United States Patent Application Publication US 2014/0325702 A1 - sequence listing, part 7

SEQ ID NO: 5332 - DNA, 1465 bp, Heterodera glycines
cagtgatcagataaaagagctgtcaatgggaagggtacttaaatattttttaattttataaaatttacgaggcttcccgggtttgacgtgttcattaaatgtgtgagaaaaatggccagtgcagccgggtggcacttcagttcttgcaggttcgaaaatgggcccaccgggtcctggcaaagcattgtttaaatattagcattaagataatttatgttttaattcgatgatttaaaaattacaaaaatataaaggcctttaaaagaatgaatttagggaattaaaaataattattttaagcaagaaaagacattaattaattcaattctatcgggtttttttgcaaaaaagaatcaatttaaaaaatatatacataaattcaacagctttttcaaatattttcgccccttttaaatatttacaatttattccaattttttaaaactgttttaaattgcccattttcacttcgttcgatgccatttcgttgtgttctgctgccccctcctcgtccttctccccctccccttttcccttctgttccaattcgtcgtcgcccatcagcaaaaggtcattggccgcttgttgctggtgaatatactgcattccgcctgtttccacctcaaaatcaatttttattttttgtgcttcttcaaaatagcaaattttaaattttagtttggtatataaatttcccctttccccgaaattcctcccccgccccccacccattttatacgtacccaacttcgaattggctcaacttttgccgcaacaattgccgactttggcggtgcaactcgcattgagctgggcggaaaagttttgttgctctgaaaggaaaattaaaatattttttgaaaattaaaaaaggaatttcaaagaatcgaacaatttatttataatttaaatatttattttttaaacgcatttaaactcgaaaatgcattactattttggatggcttcatatcccttttggcaccgtattgacattcaaaatttcaacgaagaagcaaaaatatcccaaaaatttcgatggccaatttgggggcgaaaacagcggcagtcccgcagattttctgacgggattttgggctgttggtggcaccgctttttcatccgtcccccggggggatggacgacgacgacgccacaccccgccaaaaccaacttttttgcttttgctttgtgctgtctattctcagagagaagcgattaatggcacgaaatgtttccccctcgggcgcatcgccaatttcttccttttcggcggcaacaaattaagtcaaaaaagctgtgccggggtggccacaaaaaaaggggggatgtaacgggatcggatgagcggggagagggtcgagaggggggggggggggagggggatgtttcccataaacttttagggaacaaggttccggcgaagccgataggcgcggccgggaaaatttttgaaatttataaaa

SEQ ID NO: 5333 - DNA, 2874 bp, Heterodera glycines
ttattttaatttatttgaattttaaaatgcttgctcttcttcttgtcccccgaggtttaaatgttcattaaataataatcaaatttcttgcacattttttgtttttggcaaaatgtctgcgcagtgtgctaatagcataatttgcgcctcttaagtacctaattatggtcatcacatttacggcccctttttgtgttctttcaacacccgcaaggcataaaaaataaattatgttatgtatgaatgagtgagtgacagaggctatgttttttcgaatgccaaaacacaatgccaatggggtggaagaaacggacgagggacggaatggcacacggatgacacaaatccacccaccaccacaaatcctatttgggccaaccaaatctgcaccagtagaaagaaactcagtcagtcccccggggtttgtttggtttattggcaaatttaatgagaccaaattttacaaattttggccatccaaaaattaaaataatgcaaaaggaattaacttcaaaattaaaaaaattgtattaaaagtaaaggcaatctttagaaacatagaaattttttaaacaaaaaataaaagaaattttcgcttaatattattttccagtccaaaatttttaatcattttatatttttatttttatttgaccacctgctgttccgtgccgctctccgccgccgcgctgcacagtgacgcgcgcttctccgttacggcacattttgcggctgtgccgcgtcttcgcctgttgctgcgcgtctgttgctgctgctgatgatacacgttgaatttgtcgttggttccattaaccgcgtgcccaagtcgtgctgtgttttaattaaaatttatttttttattttttaaaattagactcgaaaactcagtccctaataaaaacaatgtccttttgttttctgcctttgttggttcacccatttccttttttaatttcttttaaattgcgctgtttctttgccttggccattgttttccgccgtgccattgtccatggcattgccatcacttagcagcggactcaatgtgttcagccggcactccaactgactaatccgactcagtgcccgttccaatttgatgccaccaccgccaccagtgatgatgtgctgcggttgcttgtcagtacagtgcatgtttgcttgaagacactgaaaaggggccatcgattgatcaacttctttttgattggccatgtgaaatgattagtgatttaattatatcgtaaatttcattttgcaatttgtctttgattttatttttaattgcataattatggcaataattaattaaaaatttaatccaaatgagtttaaaagaccgaactttgttttgccaaaaaaaaagtttgtttatatgggctaagaaatttggcattcaatggtaaacgtaaattccatagggaactgaattcaacccctttttacgtcatggactaaagaaatttaggcttattcccaaaggcttctcttaaaaagaaaaatcaattcaaattcatttaaactgaacaaaaaaattgtatcaattttttgaattgataaaaattcgaatttttcttaaaactttgaaattcaatatgtattaattgatttacacctccaaattggcacgttcccgctgcaatgcgtggaataattcgttggcacattgttggcgccaattttgatcattcaatatctatttaagtatatttaattttactttttatttttgtaaaaaaaacaaataaattattttaaaattaaaaaaataaaatgtttaatcattttactgacaatatatgtacataaaacaaaacccaacctaattataattataagaaagacaattatttaaataaacggcaataaaaaataatttatttattttaaatgtttttatatttaattcccatagttttttaatttattaatttaaattaaattattttttctcttataattcgttgccacctcccaattgtgtccatttttgtcctcctccgttatcattgtttttgttctttttgtcgctgtcaatggcggcggagatttctggcacagtgccgtagccggcgatgggtggtgttgtacggggaaaagtttgtcaaagtcgtcccaactgtttgttgccacagaggcggggccgagcagagtcagtgccaaattgtaacctcctaattagagtcaattagtgtacacaattgttaattgctaatttcttaaattaaatttgaataatttatttaaatttatttttaaataaaaatactgaccagaaatcattttgatcacttcctggaaattttgcgctgtcactggcattccattgactttcaaaattcggtcgccctcccttaattttggaaatgaaatggaagcgagcggatacggtacatataaagtgataaaggctattactgtaaagtgataaaaaatacaattaaattaaactgttgctatacgcatataaaaatgatgaatataattgcacattaaattcgctcttttgtctaaaaatgatgcttaagcctaattaattagtctgtcctcatgggaaagcaattgcctttttttacttcatttttgttttaccttacgccggctatttgagcggccccgttgtgctttaccactaaaaagttgccaaattaattaaatgtgtgtttggttgtcaaataaaaaacaacacctgcaactttcactgggtattctccgttcactgtcagtccgaatccgtccgattgtctgaaacatttgtcgaatttcacattttgattcggggcgttttgacatttcgaccttgccacaagcacacatcgttccgtcatcttctgttgccattgcttttgcacacatcgggcgattgttcttttt

SEQ ID NO: 5334 - DNA, 1872 bp, Heterodera glycines
  unsure (1)..(1872): unsure at all n locations
tcgttgcttaattaaggcatttcgctgctaattaggctcattacccaaccnccatttcgactagaataatactattaggtttatataaaaaattaaaaatgaatatttatttttatccaatgactattattagaaaactttgctgttcagcttcatttgctaacccggtgaaattttggtgttttcgcgctgcgttccatccgccgttgtcgtctgtggtccgccctttttggtcaattcggtgccggcggcggaagtcggcggggaaaagcgccggcactgcggagaaagttctaaaaaataaatcaatttaaatatttataataaaaaagacatatattaattaatttcattttttaaaagtaaaataaatggaatatttaaattgatatattaaaaataaataaaatattttatttttttacttagttttgaaaaaaataaaaatttatttacaaataaaataattgatttagtgagatgtacgaataccactctttacagtattctctccaccggtttaccgtacccgggatggacggtgggtaatctgtagttgtactgcttgaatttgatgagttttcttcagaaataactgaccaacgggaggacatttttatgcattttcagcggaattggatttcctttttgggataagaatttggaaaatatgcaaagtttgaggaatagagacaggtaaaaatgaaaaagtaatgcatatttaaagagcatatgaattcatcggagggattaaaggaaataacgtggcattttcaacttttattttgttaaataaaatatttattcaataaacaaatattctatgaaaattcaaataaataaatttgcgaagttttcacaaattttatttcttagtgtgtatatagaaaaaaaaacttccgtttttattcttgtaaaatgtgtaaaatgaatttactggtgccccgagagcacacatcaaatgcccccggggatggatgggttaagccggccaaatttgacgggaaaaaatttgggttgaggagggataacttataaataagggcacagcagcagacggacgatgaaccgaccacttgggaatttgagaaagaggcgaaagttgagagattagaaattggggggggggagaaagtgccaaagaaaaacatagagaaatgggagatttgaattttaagatttttttggacgaccgatcacatagaatcggtatcaaatcctaaaaaaagctccgggcaaataattttggcggatttataaaaaaaaagtaaatgttttggtatagagaataaatattctcgacattcattttgagaggaagccgaatttataatgaaataaacgaacagataaagcaaaaagcagcagagaatgtttgttgttcgccgcttttcattttaatgccggaagaaattgcgtgagtttgtgcaaatgagaaacaaagcggaagaattggaaattggatcattttaaacaattaaaacttgaaaaaaactgaaaaatttatttgttaattaagtaaaaaaagaacgtaaataaaaatgagagaatttaatagttatttttagaataagcaaataatcaaatgatcatcgaaataaaaggagcaaatcaatgtgatcaaattaaaaagtgatcgatcggtagtcatgcaaattgtgttaatgactgatcataaatgcggagaatcagcagtgattaattaaaagaacactggtcgaacccccaacttccatctgttgctgttgcgcctctcacaaaaagtggcccccgcccgaccgaccgatgacctccccccgccccccctgaaaatcacagggttctcgagggagaagatgaaatgatgaatgaatgtgttgaagacacacataa

SEQ ID NO: 5335 - DNA, 814 bp, Heterodera glycines
gaatccggttttagaaaaaaatgccttgtggtgaaaacaatatttcacatttcactccataactttgtgagttcggcacggatcgagaccgggataagaccattggaaagagcagctcgagctctacaagaaggtatggaaagaaaaaatagttatttctgggactttttcagaaatcagaattaattctccaatgtggcccaaattttaggcccccagccacagccccttgcttctcccagttttaagtcttggatttgtcaaataaattcaagacttcaaattaatattcaaaaattctcttaaaatttttttgaacccaattcaaaaaaggaaaaaaatttgcagtcaaaaaattattcgaatttctccaattttgtttccataatttccgaaagttattcggtatcataatgccaaaacaaaacgaaatcgttttaaaatattcctttctggacttgacttggtttcttgatatcgaagctgttttctacgctatttctaaaacggttataccaaaccccagatttttgaatccggttttcagaaaaaatgccttgtggtgaaaacaatatttctcctccccccccccctgccggcggggcgaaactcgtcggataattgttccggaaattggcgcaaaaaaataaataaattttggggcagtgctaaaaaatatcaaacaacaggcgcaagaagaagaaggggaagaggaggaacaagttgttgttgttctattcttcaaaaaacgcatccgctgaagatggcacaaacggacggacaaatgggcgaaattacaataaataaaacgcat

SEQ ID NO: 5336 - DNA, 6178 bp, Heterodera glycines
  unsure (1)..(6178): unsure at all n locations
gggtgttttcggtccgagggtntaaggaagacaatcaataaataaaagtntatgnacgaacaataaataaaaaaacgaagacaatttggtcggaggcaaataacaaaataaaatgaatgaggggacaagacaaggagggaggaaaagatcgtctatttatgggtcagtgacaacaacaaaaatggcgtggaatttgaatggacagatcgccataataattcaaataggctcatccgaacacctccccctttgagcggctcatggcgagtaccgtattggggcacgtctgttccgttgcgggtatcggcgtggttgaatttgctgatcatcttcttcggccactgattcgtcgttgtcggactgatttagatcattctcgagtccctgctcttggacagtttggttgtgctcagctcgagcttccaaatcattggcaatttggcgatcggcgggttttccgatgtcaaatgtgtcgagaaagatttgcaattggtcggcttcgtcgggagtgtgtcgaggacggagttggttggcatggaatcttcctgacgacccgtcacggaagtccacgtcataaatgactcctctctttttggacacttcaccgaatttccaattttgtgaaattcggtgtttggcgaagactttgttgccgacggcgaactctcgaattttggtgccataacgtcggttgaaccttttttccatctcctcatttcgctcttttggcagagtgggagttggtttcaacaaatccaacgttgttcgtggtttccttccaagaaacatttccgctggggatttgctgtcttcgagcgaatcattgggggttgtccggtagctgacgaggaaagtctcgactatgcttttactcggagccccctccccttttaattttcggaaagttcttttgaatgtgtccacaaatcgttctgcttggccgttggacatcggattgtatggtgccgagaacaggtgtttgatgccattgacgtttgtgaattttgcaaattcatggctggtgaactgtgttccgttgtccgagaccagagtttcgggaagtccgtgccgactgaagaggtatcgaagtttttcgatagtggcacttgtcgattttgttggcatttcgaaaacctccgggtatttcgaatatgcgtcgacaatgatcaggtactctttcccgaaaaatggtccggcgtaatcaatgtgcactctctgccacggtccatttgtctttggccaagattgcaaattcgttttggttggcgcctttgcctcattttggcatggttgacaattttcaacaaattgttcaatttcctggtccattttcggccagtatgcttattcacgagccaactgcttcatccttttcattccaggatgtcctttgtggagcagttgcagaattttggctcggtgttgcgttggaatcacaactctttcagcatacatcaaacaatctttggtgatgctgagttgttccttcctttggtggaaaattctgatttccacattttcgttgccaatattttgtggccagccatttctaataaatttcatgacctttttgatgttctgatcactttttgacgactggacaatgtcatcgaatttgatgggaagcttctcgacggttccaatgaaaatcgattctacatccgaatcgaccgaagtatttgcgatgacgcggtcttccgcatcttttcctttggcaattagccgtgaaagtgcatcagcttggccgaagtcgttggtattgacatattcaatgttaaagtcgtatgccaagagaatgagtgaccatcggattggaactgcattgccgcactccttttttgttgccgaagatggcgagaagaggcttatgatcagttaggagcgtaaatttacgtccatagatcattttgtgaaatttctgcactgcaaaaattattgctagtgcttccttctcaatttgtgagtagttcttctcggcaggagttaaagcggaagatacatgcgcaatggctttcatcgttccgtccgggaatttgtgcgaaatcactgctccaattccctgatcagaagcatctgctgctactacgatctctttttgagggtcatagtgcgtgagcagcaatttggatgacaaaatttctttgattttgtcaaatgcctttttgcatttgtcgctccaattccattcggtgtcctttttagcaaatcatcaagcggctttctgacgaagcgcatgtttttaatgaattgttggtaatggtttaccattcccaaatatgaccgaagtgaagagacatccgtcggttctggcatctcattgatggcggtgattttgctggggtcgggtctgcgtccgtttttgtcgattatttgtccgagatatttaatttcatcttggaaaaacgaacatttttcccgtttgacgcgaattccccattcttgaaatcgcgagaacatctttttcaaatgttcagaatgttttttttggtccttgctgacgatgatgatgtcgtctaggtaggctgtcgcgaagtcaaaatctgccaacatttggtccattatcgattggaaaatgccaggagctgtttttatgccaaatggaagtcttttgacttcataatttcctctatgggtggcaatgacacacagcttttttgatgcttcgtccagctccacttgaagatacgcatcccggagatcaatttgtgaaaaatactggcctccatttaaggtggcaaatatgtcttccggtaatggtaacgggtgctggtggtcttttagcgcattgttgagtccggttgaatagtcgatgcacagtcgagcgctaccatcggcctttttgacgaccaaaatcggtgctgcccattctgtgtgctcaactttgccgatgactcccattttctcccaacgatccaattctctgtcaactgcttctttggcgttgtacgggaccggacgggcctttctgtatattggccgtgcgtcggcgttcaattctaagtgcgctttgacctttttgcagagtcccaattcagttttaaaaacattggtgtactcctgctttagctgattgatttctttctcggcgtccttgtttcgtttgccggcaactttgttggatttgattggggcatgtgttttgcctctcaattcttcccttgcgctgcaaagatttatcggagagttgattttggctttgatgccatccaacaatccaaatgcatccattgtttggatgctcaacagattcatcgagcctttttcggcaacataaaaattttctttaacttttacgccttggaattcgaaatgtccttatccctttccgataaaagatttttctgtcccatcgaacattctgcctctttcggcacattcccaaatttttggctgtccgatcagtcgataagtttcctcatcgatgacattgatctgtgccccggagtcgagaataaacttcacgatccttccgttcagcaggacttttatctttataagagaagcactgttgattgatttgagtgccattccaatgctaagcgttccaactttcttcactttgaagtttttgcggcgccactcttgcactttttcgcattggttctccaaatggccggtgtagtgacatttgggacacttagccgatttgtgcgagcattctctgtgggtgtggttcgttttcccacatctccaacattgaagctgagttggagttgcgtttggttggccttgcttggattgtggctttggtctttcccttctttggtttggcttcactgcattcactgtccttgatgacacggaagttgcttcgatcaattttgcctcatggattgtagacaaaaaattgatgcaatcctcaatcatttcatcgtatttgacggcgtcgccatcctttgtaagtttggcgagaatacgttaccgaagaactgcgtcctttgaatacttcagcgcagttaggagcattagccctttgaattgttcctcattcaatttgtcaaactgaaaatctttcaaaagtcgtttgtgcctgttaacaaattgttgaaattcttcgccatcgtctttggtggcgatcagacatgcaaatcggtccacaaatattgattgtggtttggcaaacagcttctccaatttcgaaattgtttcatcaaagtcgaaatccgtcaccttggccgggagaacaaatttgctgtactcgctgaacgcggtttcagacaatttgttaatcagtgccttgacttttatgtcatcggccgcgttcggtgcgcacgagtcaatggcaaaagtgaatcgctcaatccattcggtgatgcgaggcttgtcgtcacacaaaaagataaaaattcagtataggcggttaaggtcagcaaagaatgattcttggataggtaagcaagttcatcgaatcaggcatcacaaagtgaaacaaaaaaacaaaaacaaaaactgaagcttccccacggtggacatctttacacattcgataaaatgagtaaagatgaaacgacaaaattttggaggtgcgaattcaaggatagcgtcaacaaatgtaaaggccgcatttggacggacctaaacaataacttcattcgtcttgcaacgccacacacttgtcccgcaaattcttcgaatgttgaagctcaacgagttaaaactacaatcaaactccgtgccatcgccaccttggaaccgccatctatcattcgttcagaagcattgcagaacgtgccatcaccagccgcacttttggtgacaaaaaggctcgcgaatgacgcacgagaattttttaacaaatgaaaactaacaaacaacttatttagttaatcaaaagggcgcgccacgaaatcaatgcaccaccagcagtcccgaccaatttgaattttgagatcggccaagcatacaggacctacacatcgacgggtggcgctgaggagctgtttctttctattgggcgactccggggtgtattttgaaaatggaaacgaaaacctgcaacggtaatttgtgaaaaaatgcaaaaatttttttcgcagagttttattgtttgggcgcgaatcatttggacgctttgcggacagaatgactgagtgtttcggtgacggaactttctcgctcgcgccagcccaattttatcaaatttatacgatcctggcaaagtctgtttgtcttaaatcggttttcaaatttgtaaattaaaatatttagacgtgaaaaatggattttcccagtgtgccatgccctaatgacttccaaatcgcaaacatcgtacgaaagaatgtttacacttttgcgtgctgcgtggccaaattttgctcccatttctttttccgtggattttgaaatggacatgtcaaatgccgttacgacaatctttcccggatgccagatccggttttgcttttttaattttgtacggaacttacaaaaggaagtgaagcagcaaggcttatggcaggtaattttctcccctttatttaaaaattttttttttcaaaatttaagcgttattgttctgatccggtgtttgctttgaatgttcggatgctcacatcagtcgcattcgttccgctttgtgatgtcaggaatgcagtgacagcacttgacatggaatttggaaatttggcggcttttcgacctctcattgattggtcagaaaataaaattttcaattttagaataagtttttaggcttttggacaattatgttgggcgtcctcgtcccaatggcacatggtcacaaccattgttccgtccggagcagtggaacgtctaccaacgaacattggatggaaatgcgaggacgaacaataacgcagaagcggaacaccaccgtttgcagggcgcgttcaattgtcgtcatccatcgttgtggaatttcattgatgttcttcgacgtgaacagaaaattgccgaccacaaatacaattctgcgatcgctggattgtcacctgataaaaagcgaggcaaatatttggcagctgatagaagaattctgaatatggttcgcaattacattccattgaatgcagtgaatgatcatgattatcttccacccattccccagcccaatcaatttcacactattttggaatttcttcgaggtatttcacaccattatcaaatgaacccttgaaattgttgtttttttgttacctatttattttttgttttttat

SEQ ID NO: 5337 - DNA, 1025 bp, Heterodera glycines
tggaaagaggggaaagacgccctattgttatttctcagtactcgacgatgacatgacccacacaaaaattgaggttgcaaatgtaactttgttcttttttacttttctcttttagggaagtcttttggaaggaatgtattggaaacggcggatggaggctgtctgtgcccaatacaaacgatggaggacatacaatcggaacagagcgcgcaaaaaatgttgtcggaaaagggtgagggaatgtacgggcagaatgctaatgatagaccaaacaaaacggggtgcaccccaaaatcacgccgctagaaatttttaaaaaaattttttaaattaaaataaatcttggaaaatttttttacgaagaaactaatgaaaaatttttttttttttggaaaattttcgaaaaacaataatttatcataaaatttcaaaagaaaaatcgcaaaaatatttgcaattttttctcttttaattttcttataataatttttctagcaataaaattttttcttgaaaaaattctgtttgaaaattttcttacggcgtcccggcatggttttgtcatgttcccttaaaacgatatggcaaaggtggaatagaaactgatcattgggttaaattggctttgggtcagcacaatcggtgggcatgggttgtgctgtgttggttcagtgcagctcttcctcaccctcaaaggagaacagctgcggatgtgacaaaggcgccgttggcaaaattgggccggtcattgccaatccgtcccagccgaatggacagcagcggagcatgacgcccgagaacatgtcgacggggaacaacggtctgatgggtgcggaatcaaaaactaaacaggactgccacgactctctcatgtagtaccaaaactaaccacattactaacatttgttaacaatgctgcataaattgtcaaaaatcccaggcgacgcctaacagcgcgtcggactttcatttcaaatgtttggtttgtttccgacgaaaaatcaccaccggagcgcccccccccc

SEQ ID NO: 5338 - DNA, 4424 bp, Heterodera glycines
aaggaatagaaactccgcataattcattgttcgatgccattggcattgaaaccaaccattcttttctgcaagacaaatgcacgtgagtttctaatgagttcattcaatagttaaaaataaatggaaaaatttaatttattttgctgttattttctgccaggattcgattgcgccgcagcaattcgctgagcttgtctctgctccctcaaaaacatcgcaattcccgtcatcgaccaaccgctgggcctcccaaaatcgccgtcatccatcggcggattccttccgcttttcttcgccttctcttcagttaccccaacagcagaaatctctttctgtcacttcaccaccaattgacaaattcgcgaaggaagggacagaatgcaattggcgatttccttcaacatgcgccacatgaacttaccgatggcatgctccaattgagcggagaatcgtcagaaatgctgatggcaacgactctgttgggactgagcgaacagatcaaagaggaggagggcgatgggacaatgttagaagaaaagatactgaccgacgacaaacacacttttggtgagcagtgcaaaagcattcaacatttcgaaatgctgaattatccgttgtgccatttccccaattactcttgtgctttagccactttgggtcacaaaagacggcaccaccacggccagcagtcctccgttggtgccgcttgctcttccacccaatcctccgccccttcttcaagtcaatcggaacaggctgattcaacactccatccggaagagcggaaacgcattttgcatttgcatgcggaaaagaatcgccgttttgcgctgaaggaaggcttcgagtcgcttgtgaatgccattccggtagttgagcagacgggcgttaaatgcaccaatgcggtggtgctgaacagggcggcacagcacatcaaacaattgaagagcgaacaggatcagcagcagatgaagttgagggtgttgcgggagaagattaccaacatgaacgaacgaatcgcgtgagttaggagtggaagagggggggatgaaccgatgcaccccaaaactccgccgccgaaactccgcctggcaaaaaatttcacttacaaattttcaagaaaaaatcttaggaaaattttttcttaaattcggagataaaaatattttctaaaaattttccagcgattttttttggaaaacagtttttcatcatcaagttttgaaaaaatcgctagaaatttttttaaaattacttttttcttcgaattttctaagaaaaatttttcgaatatatcgaagtttgaaaaaaaattaaaatttttttggcgaagtttcggccggcggagttttgtcctgctccgtggatgaacgtggtggaccgagcaacaaacactcccatcgttttagcctaatccagtccaatttgccttcctcatcaaccggtggttcacggccttgtgaagctcagactcccagcatgcgcattcaagtggaacaattcttcgaacattacaaaaaggaacgttcccgtgaagattaccgcttttggctggtgagtcgtgattaaaaaagggggcggggagtcggagacaaaaaaaacacgaaggggtaacgatttttttgctcttcattgttaagttttttggccaaattttgtccaacaaaagcgagtgaattccttcagatgggtgaggtgctcaagcctattgtgcattcgtttgccgaacaaattcacccggacgcgtctgaccatgaccgtgttttgcattcgttgaagaaatggctggacacccattggaatgcggcggtgcttcgtcccatcgcttccgatgtgttggtccgattggcgaccgcaagcgcagcattcactgacgaagcggcgctgagcaattatataatgaatgaagtgcgcaacgcatcctccgctcagtgacacgatgccgcttttgaatgaatgtcagcactttgggatgcccggttctttttgaggttgcccttctccttctctggcgatgtgccctccccatccattttgttgcgactattcctattttttttcattattttgtacattctctgctcccccacttttccatcccttctctcccttgataacatatctttcgtttcttttccttgtcacctcattgcccttcgttgaattgctggtcaattctctgcaaccttttttctacacatatttcttattattttttgctcaatcagaataggccatcacagaaatgtgtcaaatatatatttttaattaatcagagaaatatttgtcagagttttaccatatttttaataaatggctaagatttttatataaaaaaatcccaaaattgcaacgtataaaattttttgaaatatccatgtgtgaaaactattcaaagaattttctttcccccttttaaatgccttcgttacttaaaagtcttagccataataataaatcaaaatatttttttgttctaaaacacaaataaatgatgtacaaataatctattataatttatttgtcgttcaaaagtgaatgattccatgaaagtgaataaaattcatactttgtttgttaattgacatactaaagatatgtacgcttttttacccgcagcggaggggggggggcattttacccgggtaaaattgcccgtctttttggcatgacttcgctggtgactttacggaatttttggcagagtggtgggagggggggggggggtgacccgtcaattagcgaatgggtgttctcatttgttgaaggcatttgctgctccgcgttcggtgtgcttttctttcgtgccgtcgtccgctcactcgtccacttccaatcggtgccaatgttcgaatgttttgcctgggttttccatcacttgttgccattgtcggcccctttcgtcgggtgcggcggtggacagaacaattccacctgaaaggaggaggcgggcgggggaatgtcttcgcaattcgtcccttcccttctcgtttaccgatgtaatcgtcgtgccgtccaacgtcgtagtcgtacactccgatgactaatgttttgcgcggcaagtctttgaacggcacaatgaattggagggtctgaaagggaccgccgttctccgtccgtccgtcggctttcttccctcacctcgttgaattcagggttcaatgttcgctttttgatcgtcgttctctgacgatgggcttttgttgaaagcggggtcagtgaaactttgcagtacgggtcggagaagctgaaaatggcttttccgacagtcttttcgacggcattccgcaggcggaagggcgtggccaaccgcgcttttccctggccacgcccttggggacgtacccggtcgagtccatgccaagcagttccgcacaccgtctgatgctcacaaacagcgacccctgctgaatgttgtattgcaccgccagcaaaagttttcctcgttcgtccgccgtcgctttattgggcccgaccattcccttttcaggcgcgggcattggcatcgcatgttccaggtacaggttgaacctctttgtctggcccagcggcagcttgcgcagtgcgacgcgcgtctccccgagaaagtcagagccgatgcggtcgcggtcgagaacggtgacgcgcagcgacttgcgctggcgttcctcctgagaaagacatcactcgtcacattaaggcatcagtcagcgacttctgttatgccgtagtaaatcatctcctcgttccattcggggttcagcgtcttctcaatcgttctcgaggttaattttgtcgcttttacgttgccgggcaaaagatggaacttcacgtagggatcagagaagccgtttttgtccatcgccttcagattctgaaaggagcagcgaaaactgagtgagttaatttggcatttcgcggtgaccgatgacgtcaccttagctcgaatcagatgaatgatcagctgcttatcctccaccaaataggtgagattgaattggatggagcccaaagtacctaaagggaggaagaatgacacttacaatcgccgggagaaatgccaaagtgagaagaaaaaggtggaaagggaaaagagtagtggggagaaagaagagtgagtgagggaaaaggagagaaaagaaaaagagagatggacgaaacagtagagagacagaggtggagaaggacaaaaaagagagagtgcttaaaggggagagaaaaagaatggagagaaaagggagtggggaaacgaattaaatttgattaatatgcgtcaaagttgtgctaatgtgcgtggaaaggtcctctttactcgtcgagtgagtgctttgagctgaccgctgttttcatcaatggtcggcaaagagttcgccgagtgcggccttttgggcgtcaagcctagtaaagagactaattggagtgataaaactccgttccgaagtcat

SEQ ID NO: 5339 - DNA, 948 bp, Heterodera glycines
  unsure (1)..(948): unsure at all n locations
gaaagaaaagagaacgcaaactgactggaatcgtcctcgggagagctcatgaatgtgggtgagttgtggttgttgttctgcagttcctgctccagcttctccaccgtctcctccaattgtgccctttcctctttcgttggcggcgccgtcgattgggtcgagcgtctgctaccgccgaacacatcgggcgccaaactcgtcgaacttgtggcagccgttatcgaactatgttctccgtacgaaacttctgcgcatttagggtcaatgtcaaaatcatttgctattaatgaggggaccctgcggcactcctccgacgtaagcgatcgcgcggttcgcttctcccccaactttggccggaatgctttcgtgtgatgatccgctgttatttccgccgctggaccctctcagtttgatcagtgcagcggatggagtcgttgcagcagaagcgggcctccgcgagggaacgttcggaggatagggaaagtgcgagtgggagaggggagctgtgtttggcagcgcggatttcagcggggaggaagcgatgttggcatttcggggagggatcggcggagggacgggcgatggcatttggaagggaaggcgctgaacacttcccgcgttaacggaaaagctaagggaacacctgctgggacagtgactgctcctgcggagggggcagcgaattgagctgtgagcgcgcgtacgcggccaatccgtcggcggcggcggcctgcggctgagcgacggaatgatcactttggacgacttaagggaaagggcggtaaaaggcaaagggaggacaacccaaaagagcggggcaaagaaagggcattcactcgtaaattgtggcttttgcttttcctttcgtgngtccgccattttccatttcctccaccnaaccacggaatcgacgctgcgcgagtcgctcagcgtctgctcgccgcccgc

SEQ ID NO: 5340 - DNA, 2258 bp, Heterodera glycines
ctaaacgtaacacgaaaatatttgccaattcattcaccacgatttgcacattttgtgcgatttgaaattgagcaatacaattaagataaatgggaaagacttctgaaactgtttccgatttctttatagtaaaagaaaagtcctcaattgtcccttcccaaaatggcgttttgtccccaaattcaaatgcccaaatgtccgttcgtctctttctctcttcattctctctctctctctatatatatctccctctcactctctttttctctctttctctctctatcacctgtgtccgacattcgtccgactcttcccagtgcaactctctgcatcttttggatgccctgctgatgtcccaaagcctccgtggcgttgcctttgctcttcggcttcgctttgtttgtccttaatccactcgcaaatccgccggcgtttgccccgaggggatgagcagccgcgtgctgttttaccgaaagcgcacgctctttagccgcgaccaacgacttgcggaactgtgcgggttccaaagacgaggaagtggacgaggaagccgactcgccgtccgagtcgtcgtccacactgacgctggactgctgaaggccttcgtggacccaagaagggatgatgcgcggtcgcggggtcgtcttcagcctgccattgccattggtcccttcgcttctcccccccccggctttttcgacctttgctgatgttccgctgggattggcactggtgccctgttgctgttcctcttctgctgcgggtgctgttccgtcctgccctccgtcctttgctgattgccctctccagcggaatgcattcgaatgttttctgctccgctgcaggggtcgttcccggccccaaattcgaagtgcctccgttgcattggtccggtttggctgcccaagggggggttggaccgtgcggatgggctgagcggcagataggaggactgcccgccgttggccatcattgcgatggacccggccatggcggaggagggccgtgaggagccgaggggcagcggaacctcgcggtagaaccaggcacccgacttcttccacatctgagcaaaatgaacgaacaaacgatcagacgaagaacagaggcgaaaagagacaagcgaaaggcacttacaacctcccggtactctgagcagattttgcacagaaaaatgggctcacgacgcttctgatcgaatgtttcaacgccgcaattcctttggcatacgtactgaacgggtcggattgagtttaagcggcttttcccattggcacctttcggcagtccgagcacatcgcagcgtaactttttgccgccaacagtccgaattcggtttggcacaaaaggcattgcgtgacgccgttgcccgtagcgcgtgccctcagccgttccaaccgttcgatcattttgctggagggactcagttgggaatgccttttgaattggcccaccatatgcgctgctgttcgttctggcgcccggcctccgccctttcgagcaccttctgaatgtgcgcctgctccgcctcggatatgcccccgttgatcagcgtctgttttgaggtcgtcggcgagcgggcgttcgcagtgcgtacgctccaaccgcttttcagcctggccaaacgaaggacatttggaaggcatttggggttcgagagagagcaaacaggccaaagactccccccgcccaatcccgaaaaaaacattgggctcgaaaggcactcactgtgctcgaagttggaggtgccgatcacttggacatacccacggattgggagtgccaccgatctcccaatcgttcattaaatcttaaattccgcattaattgggcaattttttttttattttattcgctatttgtcaaactgtgaaagaataatcccattaattcaccaatcgccgcttcttttaaatttattgccttttgacaagcgccaaaaaaagagagaatggcggggaatatgcgaagaaaatgaaacgaaaagagagagagagagagagagagtgagagagtagagtagagagagaggatgataaagagtgagagggagggagggggagagagagtagagagagagagagcgagagagagagagtgagagagtagagtagagagagagagagagagagaaagagagagtgagaggatgataaagagagagatggagggagggggagagagagagtagagagagagagagagtgagagagagagagaaagagagtagagtagagagagagagagagagaaagaga

SEQ ID NO: 5341 - DNA, 3547 bp, Heterodera glycines
attcagccaatgcatcagtcggaaatccgcatcccttaaacgaaagatgatttactgtataaatgtggcaagaactgaaagggaattagtttaatttgtccatacctttccatgacggagtcaacgccaagccgttccatcaccgaagtgctactaagccgaagaacacgggtagtcgcactcaaagcatggtaaagttcacaggtaaaagcaaccaagggaatgtccatggaagcggggaaaacggcaattgtgtgaaggttctaacgggaaaaatatgaaattactgatcaataagacgaaaaactctttgggtcagtgggtcagacgatgggtgactgatcagcgggaaatgactccgaccagcgtaatattggccaagcaagcgaacgagacggaaaccgacttgtgggtactgtaaatagaaggataagagattatgtgtcgagaaactgcaccgacctgcatcttcacaaagttcaaaagtccctcggggatgcgggcaagttgcgaaaaccgaacagccaacactacgccaaacactcagtttgcgagagtttcaatgatttccatgcgacttacccgtcgttgctcttggattatgttgcaacacatcaacgagccccaacacgtcaccttttccgaactcttcaattgcaactttgtgggacacggaacgaagtcgtccgctgagaaccataaaaaaggattcagagaagtcgccctgcctaaaagagaatggaacggatcaatcgattgcaaatgaacacaaaaatagaagaggacctataaactgcttcaccagaatccaacaataaccagccgagcgcaaaatcaacagcacgaacaaagggggaaagtcggagcaaaactgagtaagcaattggaaggacggaggaaggcctttgctcaatcagacggtcgacatcacttttctcgagcaaagcaaccacacaatgacaagcacccttcacagtgtagaaagccggttcatccgtcagtatctatgttcaattcgaaaatgtttaattgaactccaaaacaatcagtgaatgagccccaacctgaaggcctccgacaagttctttgggatggatgaaagcagtccatatttcctggccgctgtcttcaaatgtcgagaagcggggctgttgagtgagcttcagaacgcccgacacgataatggccaatgcgggctgattttcagaactgccctcctcgaacaacgactgattctcttccaaatgaattattttgagaaaaggtcgaatcaaatcattggcatcgctttctgaaagacgcaatgcttcgctgaaatagctaacagcgagtgccattttctgctctgcctttggctgctcaacttccgtcgacattcgttttagcttgggttttgtcaacgagttcagcgctcgcaaagactgcccgcgatgtttctctttgcttcgttctgttggcggatttaagcgctgaaaatggcgacaaacccaactaattattgcaactgtccaactttgttaataagttcctccccaaggcccatctgctgatgaagcgtggtcagcacaacgtgcaaaagtcgagtggcgattatctgaaccggacgaacccacgcagacacattcggctcatttatataaaagttgtagaaattgagcagcgaatacttggccaaacgtgtccgaacgtccgcgcgtaaagtcactgttttcaaggtagaaggattaccctaaaggaaaaagtgaagggacggaggggggagaggacaaaccatgaaaatgtcaataagagaaagcgaactgaagaagaagtcaccgggctcaatccgtcgcacatgaattggcttatcgttggcatcaggtggcttaaaattgaaaaaataaataaacatctgatacaattcatacaacaatgcaaatagtccatggggaaaaaccaacaaaaaatgccgtttaattaccgtgatgaaaacggacagacaaccttccaaagtgacaaaaattgcatcatctaaacatttgaaacaatcaaagttaaaaaaaactccgactcacaataagttaagtattggagaaatatgtattagcgagtctttttgtttattggtacttcttaaaaaggtaacataatctggtacaaaaaaccaacccggatcccccggcttcacaataacttcgttcggttcgattatgaacacttggatgtccttctggttgatatcacagtttgaagggaatccgagaattctaaaaaatgaacgaataaaatgaaataatagtaaattaaatgtattattgaaaaggtcatggcttaattttccctgcctaccggagattttgacggagaaaagtgagaggtttaaaacggtcatccttaagtgctttagagattcacatatgtaaatgaacaaaaaccgggatttctggcataggaatcggttcaaaaaattcgttcggtggcttgggaagtgcttctcgatttcctccaacagatttttgacgtcgatacattgcactgttgcgaaaaaggcttaaagaaatggatcatttattgacagtgtttgaaattagatttctcggtcatttaaataaagcgattttaatgagaatgtaccattttattctcttatattagcccaattttgacgaattgattagggttttcactttgacttcacaaagttatggccccgttaagtggccaaaatcttactaaacccacttaaatttcatgaggcattacacagcctaaatatttttaaacaaatctgaatgtgctataagataaccaaaaatagccctacaattatgcataattggtattttatttggctgattgtgagtctcttaattaaaacaatcaaaaaatttcgaaaaaattgaatttttggaagttgactttaaaataaaattgtaataaagacgaattgaatcaaaaaacccgaggaaatgaagtcaccttttagccacattggcaacttgtgatgggatgtgcgaatcgtccaccgtcgaatggcgtcgctgcagcatttgcggaatgtcagccaaacttgtggactttcccctaacgaaagacgaataaatgctctgaaaataaggccagtggtcattagataattgaagattcattcagcgaaagtaccttaaaaacattatctttggatttgttactgtcaagcgaattctgtgcatcatcaacagactccgtttcggggggagttgaagaaacacctgaaaacaaacatgaacagttaataaataaccatgagcttttccttgatataaccaaaccaaaagttactttttatgtaaaaatataatcatgttttttcttaataatttgttcattaattaccttgtccatttcgtgggtagaatatatagacaagcacagcagaagcgaaaacgatagtcgtaattaaccataacataggaactaaattgaagttgaatatgcgtctttaagctcctataaaaaataaacgatcaaatatttaactgatgccacacgaatcgggttttgccaccctgaaccactccccctaaac

SEQ ID NO: 5342 - DNA, 1734 bp, Heterodera glycines
cgggaaaatttttgtaatttttaatgtgatttgttaaagaatttgtccacaaaaatggccaaattttgtgattttgagccaatttttaagaaaataaaggacttttaggggctggcggtgccgataggcgccgccagtggaaaaattgagaattgtacatatttttagcagattttcattgaaaatattcttaatttttggtttttttttggaaaaaattggttctattttccgtccccggtgatatcgtcagtggttgatttcgtcagtgattgatttcgtcagtagttgatttcgtcagtgagaaataatttttaaaaaaaatttacctatcaaatattaaaaatgaattcaaaaatgcaagtgatatgaacatgctcgtaaatactctaacggatcacgattatcgaaattttccacaagagccatcaaattttgccctcccagggcaatagggaggacgccgagggcatttccagtaactccagccgtcttcagttcgggaatcggccttagaaaactattaattttttccatttaaaagatttcacttcgtaaagatactcatagccgccatgagtgatcagctcacggccacgattggatttgcatacagaaaaacggattaaggccattgaagacaaaaaaaagatcaattaatggggagaaattcggaaacgaagtctcgaggtcaatggaaatgaccactggcgagtctcgaaaaacgaacaactaagagacaaaaccgcaaaagcgacccattatcactgataagagtgaccaataggcaatgaaagggcaaacaaataattttttctcgaaagacgaacacacaagatacaaaacggcagaggcaaccctcaaaaagaattcttttctctgataagagtgaccaatagagagtgaagaggcaaataaagtttcgtattttaatgtatgaatatattttcattatttattgcatacaaatgtattatagttcatatgaaattataattagttcatatcacttgcgtttttgaatttattttaatttttgataggtaaattttttttaaaaattatttctcactgacgaaatcacttctgacgaaatcacatggcaccaactttttcgaccccaaccaaataagaaattattttccatataatttaagcgaatttttatgctctttctaataatcaccatcccctggaagcaacgaaggggagaaaacgaatatcagcgaaacaagtcaacccgtttgaactggattcaacaagtatcgaactgaaaatagaaaaaaactgaaaattgttagatcgagtaaaaaattatttgtttgctacgaaatgatggaaaaagaagtatgagcattattaggaaatctcagacttcttctctctacagtatcaactagagaccggaaaagagggtcacggtttcggttaaaacccgaaaaaaaccgaaaccgaaaaaaaccgaaaaactcaaaaaattctcggtcgaacggtttcggttaaaaaccgaaaaaaaccgaaatcgaaaaaaccgaagaaaatttttcggtttatttcgacttttcggtttttttttgaatttgtttatttttttttcaaaaaagtaataaactattctattaatagaaaaagcaaaaattcctctgaataaaattgtagagctattgaaattctattgaatggtgtactaaaggtagggaaatgatagaaaaggcagccaaaaaacatggtttg

SEQ ID NO: 5343 - DNA, 1882 bp, Heterodera glycines
  unsure (1)..(1882): unsure at all n locations
ctccgcaattaatactccaatgacggacccagcggtattttaagattatttagttacgactacactcatagaatttagaatttgttggacgagcgtcaacagcaagcccagcaaactttggcaggtcttcgtcgcgattatgaagaattggatcacacctttgtcgtatatgaaaaggaatttgaaactagggtaaattatttgattcttaagcatgcttcgcttcccaaaaataattgtaacaaatttagataaatcgcaccaaaactgcttgggaagacgcagttcgttctcgctctaatgaaaatggtgagtgaatgttagagttaataatggacaagtagatccatttgagcctttaattcatttttttacagacaaacgtcagttgctcgagtcaattagggaccgtcttcaaaatgttttcgaaggtcaacaatatttattaaaaacaaaaatccagattatttaagaaaccctgaaacacaaggctgttattgagaaattagaggagcgcgacaaacggatgggcaatatgttggaaagcgtagacaatattgaaaatctcaggaagtgaaccgacatagaatgtatgtagtattcccccacttcttatcccgatatcaccattattgcctcgttcactcctgatctctctacagtcaataaagcataaaacttatccgtaataaatgtatattacgtgaataattattggtaaaattatacttatccctctacaataaaacgcggaaatatttggtgttatcttgtgagcccaacattcatcaatgatttttgtagagtttgttcagaagtacatccgatgttccctaaaaaagatcagttaaatgaagcctaaaaagtaaaaatacttggtattcaagacattcaacccaggagagcaacgaccgagtgagggcctggtaatttgaaaggtcaactctcgaggtgaaagagtcgaagcaggtgtcgagaaagtgttgaagcttaatgtttgaaagaataacattttcggtttgactaaaattgttacaatctgaagttgcaaagccgagcagggctgtgaattcaacgaaaaattttcgtattgctgcaaaatcatttccaatgccgaatattgcgtttgtaactttgccaattcttcagcgttttgctccatggatgtttcaagagcctttacataatcggcagctctgagagggaaaatgggaaggggaatttacctattttatgaaaaggattaatacctaaagaggatggcagcgttggtggttttgccttggaatattcaaatacaaagaatgaagggatttagaaggaacctacacccaatgaaagaggcagaagctggcaaaaggtcctttagttcgttgtaaccgctctaaaattaaaatttaaagaaagtcttgaatatctcacacattaattgcttctctcctctgtctgaaaccaaaagtattaacattaacaaacttgaaattttgttcgtattcacctttcacagcgcaaatgcgtttgctttttcctatcattttggttcattgtacaattttatagaatttgatgtgtattatgttgtattagaatgtattagatgctggctggtgttaaataaatagaaaaattaaatttaaaaaaaagaaaagaaggggaaaggtgaaagagaatgagttcaatttatttttccctccaaagtttttaactcgcactaaatttctagcaaaaaaatcagtggggtaagaaagcggagaaatagaccattgaaactgaattttgcaaaangcattgattttatgataagtgttcaattacttaattcttcaaaaatttgtaaatttaaaagaatattggttttaaaagtcactaatcggctgataaa

SEQ ID NO: 5344 - DNA, 5159 bp, Heterodera glycines
  unsure (1)..(5159): unsure at all n locations
gagcaacttctattatatagggtacaaatattttatttcttttccaatataatttttaattatgcatttatttttactcccaaaatttttcgatgagaaaagtggtgaaaattttcaagaccgctttctctttcaattgggaaataaatattaaatcgaaagaaaattatgtatatttgtttggtaccatctctttccgaggcattcgttaaattttagccttaatataatattaatttaaattcattttttttatcaatcgattcgcctctaaatgagttaagcacgaaaaatatgtatccagttgcggaaatggatttaattgaaccggtttaaaactcgaaaacgcagagaatttggtacttccaatttttaaaacgatcgaactcaaacttctaaatttggtataatgcgaaagctattaacaaatttccattcatttattgtcttttcctgtatttttggtatagaaaaaattcaaaaatgtcgtgctttaacaatccattttaataaatatttttttttcattttcatttttttagccctttgtccatccgtcgttggcatttggaaattgtaaaatggcaaaaactggaaaaataaaaaaattggcaagcgttttggggtggggaaagtgactattggtagcgcaaatttacggaacgtgccgaaaaaattaccaaagaccaatggcacggcctgatcatttccaagcacgaagacggaataatcagttacgaaccgaggcaagttggaagagaataattcaaatgaatttaaaaaactaatccacgaatttgacggctcccggtaaattggacaccagaaaattggacaccaatggaaaaatggacaccagaaaattggacactgttgtaaataaaaatgaaaataaacaaaataaattactaaacaaaaattttggtttggcctaaaagatctttatcttaatctgccatatgttgtttataagcgtaaataatatggaaatgaatttgttattatttttgtaacttcaggagaagaaaaacatcatatcattcataaagaaataagttttattactcatttctggtgcattttttggcccattgatcaatcgtcacccatttttggtgcattttttggcccattgatcaatcgtcacccatttttggttcattttttggcccattgatcaatcgtcacccatttttggttcattttttggcccattgatcaatcgtcacccatttttggttcattttttggcccattgatcaatcgtcacccatttttggttcattttttggcccattgatcaatcgtcacccatttttggttcattttttggcccattgatcaatcgtcacccatttttggttcattttttggcccattgatcaatcgtcacccatttttggttcattttttggcccattgatcaatcgtcacccatttttggttcattttttggcccattgatcaatcgtcacccatttttggttcattttttggcccattgatcaatcgtcacccatttttggttcattttttggcccattgatcaatcgtcacccatttttggttcattttttggcccattgatcaatcgtcacccatttttggttcattttttggcccattgatcaatcgtcacccatttttggtgcattttttggcccattgatcaatcgtcacccatttttggttcattttttggcccattgatcaatcgtcacccatttttggttcattttttggcccattgatcaatcgtcacccatttttggttcattttttggcccattgatcaatcgtcacccatttttggttcattttttggcccattgatcaatcgtcacccatttttggttcattttttggcccattgatcaatcgtcacccatttttggttcattttttggcccattgatcaatcgtcacccatttttggtgcattttgtggcacattgatcaatcatccctcatttaacccatttattccactcaaatttattttcacctaattcttgattttttttaaaaaggaaatcttagtgtccaattttctggtgttcaattttccggtgtccaatttaccggtcccttttgaaaagggatataagaagtcagtacattgaaatatatttctataatccgaagcaaccatttcaatgaaggaaataattaaaatcaaagtaaaatattaaattatttcacaaattgtcttttctctgatttaatgttactatgttttttgaagcattttttttattaatttatttttaattaatatttgcccatttgttattcttttgagtcattcccgcaaattataccaatttatttgattcatatttttctgtaatgttattctattaaaaaaataaaagaaattattattttattcattttttcctaatgttattataatttaaaaaaataaataatttttataagaaatgattgaaaattaatacatacatattcattgatttttcgtgaattttattaatttcatcgttcctgtctctttaaattcattttttttttcataaatttacaattatgctaaaaattagaaaaaattttattgtaaatttttatgctttatattttttcagattaattaattccatcaatgcaaaagaaggtattaaatccgattaacttttaaatatgaatccgtttttaagctttattatgtgaatcaatcagcgacacttttgccttgtctttcatcaaaaattttcataaattaccaatagttgaggctaacgctgatcaaattcaaggaaagaatataatggattttgtaaaaagttatttaaataattatttgacgaaatctatcgaaaaagacgaaactggagaaaaccctatgaattcaaatagtgatttaattaagatgaagcttaatgcgttggttgataaagcaggagagcaatgccaaaaagttcgcaagaatcaatcaaaaaattttctgggaaaatttagtgcaaaaattggcaaaacatttcaaaaaagagagttaaaaaattcgaaaacaataaaaaatgaatttgatggtaattttattctgtgcatttaccattttttgtacacattttgccttgaacttatcaaaaatattgcaaatgatcagagcaacaaaatgaacagcgacgaattaagccaaattaagcaaatttatttaaatttatatggcaaatcatcaaaaaaggttataaaatattttaaaatgaattttgaagccggaaatgattttaaaaattcaattggaatttactcattaccaaaagaaaaggagatgaaaacggaaaattttggtaaatttaaatatttttaataaaaaatttaaaacttttagaggaaaatttatcagcgaatagtccatttgaaatgatttcaaaattatcagataaaactggtaaatacccgaaaaatattacgtcaaaagaaattacaaaggagagaaataaaatcacaaaatttgtaaagaaaagcattgccaatttaaattttggggaaataaaaaagattttgacactaaaatggtttgccaaaatatttgctaattttaaaaaggccaattttattatatttaccgatttaacaaagctgaaggacattttactaattgcattgagaaatgacaaatcaccagaagagagccaaaaaaaggttcatgatttttaaatttcattttcgatttaatcactttaaaagaaaaaagaacaattaaattatttaagattattaatttggccgacaatattttgttggcaatttcatccaatcacaaatgtcaaaaacgaataaatcaagcattaaatgaacgaaaatatggcaaaaatgacgacaaaatgattaaaaacgagccatttatctatatgaataaaatgatagaaattagaaaatgtaagttcttcttagtaaaaaaagtttgattaactagcaagtttttatataaactgaaaccgtcaaagaatttaaacctgaattctaaaaatttttacttttctaaaataatttaatagtttgggagaaaaaaggaccattctgaaaagccgataaaaagtggtaattatctaaaaaataaattaaagagtaattttttatcatttaaattcttgtgaattcaaaaagtttcgttcctttttagcttatcgccaaattggaccacgtgtaaaacgccaaattggcacagatattgttgcgctgatcggatactgtaacttttattttggcttggccgttctgttcattggcgcaccaattgtggctgccgtttttctgtccccggctctgttggcattgttttttatcaccggatgggttggcgttccggcggcaaaagtcttttttgaaaattgcattttgaacatttgataagattttttttattattgaattcatatttttggacgaaaaaatgtcaaattaccaaatgagcagaaatattaatgccaaaatgctatttatatcaaacaaactttattttttgctataaaaatatacatgaaaaatctgtgcttttaaaagctcacgaattgtaagctaaatcgttatttaagaatgataattttctcttgtcgttactaatccttaaagcgggggtctgtatggatttccatatttttttgcatatttattcggcctacttctcgcatgcattgggttgaaaacaattttggacatcacctcagaaaattttaatattttcactattttttaaagtaagcttaatctaattgattgattttaaaataacccaaaaatggatacgcaaatctacggattttagcccttgataatcggcatgctggcaaaaaaatctgtaatgaatagatttgtttttttatgtatttcaaaattttatatatttgttgtcctaaaatgccgagatggacttgcggaaagacggggccaaagaatttcccccccggggatgggcaaaatctcatcggcacatcctttataataaaagcatcttttgacctctcacttctgctgttgaagcgaagcaccccttcttgcttcatcgaccatctcctctctcnaaacaaaaattggataggacatttgggctgcaccattctcatcccccccccccccggggggggggggggtgacaaaaacaaaacttattttcaaaatggggaaaaaaaggggcc

SEQ ID NO: 5345 - DNA, 1622 bp, Heterodera glycines
  unsure (1)..(1622): unsure at all n locations
tttatcattctttattacttatattaacttcattatctgcaaatttcgttttgaaacattttaaaatttggaatttcctctccctccccccattgtccatcattacgctcaatttgttgtcctcctcccctcttcaaaatgccgtgccattgttcatcccttcaccctcctcaaaaatctccaaatatatatatatgtatgctttcatcatttgcagcccatcattcattcgtaatgttgtgaaatttcgtgcaaatttaccatacttttccttcaacaaattaattatttatatttttgtacatattccaaaaagtgcggaaaatcctaaatttttatttttttttaatttgtccaatttaaaaatcattttttgaaattaaatcacataatattgcagaattatttatcctttccttatgacaaatataacaatttaaaatttagaatttagaattttataaagttcgacctggacctggatcaagtccttgatttatgctggatccatgtcctggaatttcttgcaacctccaggtccagttccaggctttggactatttaaacactttttcactcatttatttttgcttttagcgttcatattttttacgtcaaaaaaatttgttttccatggtctaaaataaagtattttaattcatttatccaattcgttcttctccttaggcattttttgttatactaaaacggactttatctctttaattgtatgagcaacagactttttctgattttgtttttttttgattaagaataattttttttttaatttacttgtacaacttttttctcgccaatattaataattcgacgttctaatttaaatttatttttaaaatttaaattagcgtccaatttcctttgcccgtccaatttttgccatttcaacttttgctcggctcttttcaaatttgagcttgccatagtgttgtcaagcagcagacggctcagcaagcagcagaaagcacaaagctcaaacaacacattttgcgatgtctcagcccaaattttagcctcgggggactaattaatcgtcgtcgcccctccattttgtgttgggatgacaagccgagaacacccggggcgagaacagtgtgccgccgcttcctgctccatgccaaaactgtggcataaagcccgcggccctaggccggcattttcttggatttaaactttcattgatcccccattagttggtttacggctataattttgaaaaaaaatatagagaacatggacttaaattttcgtaatacattttaattaatattacctattcctttttgcgcaaaattatttttttttaaaagcatatgtatcttattcaaaaattgaaaattccattatgaagaggatttaaattggaagcatgttttttcatcaccatgatgccatttagtaaaaaaaaatatttgtttgtttgtaaagaactcatagcctaatttaaaagtaaaattagcgatttataattaggtttttgaaaaaatattcagatcaatgaaaatctgtattccttatatggtaaaaatagtgttaatatataactcataaaattttccctataatcacccatancaccaaatgctaagaattaatgcact

SEQ ID NO: 5346 - DNA, 3294 bp, Heterodera glycines
atcaaatttttgtctgtgcttttagctagaatttttaaaacttcaattgatataaagaataggatttagcaaataagaaaaaaaatttatggcttaagaaactgaggatgccaattaattggacgcttaaagtgcacgagaacccaaaatgatgcattaacagaatttggacccggcggtgccgagagggatccgccgggaaatttgttgatccctagggctcccacccaaaaaccaactctgttcgtttgtccttccttgttcattgttctaaaatagggttacacaggtccgggtactcgatcgggtcccagactcggatacaaacattacatttgtcaaattagtatgtgatcgtgtcttttttaaggtcctgtaatttccgagtcgtatccgtacagaattttggacaaaaaatttcagttttgtgccattacagttgagcccacacctaaaaagttattcgactcataacctaaaacttttatgctgaacaaaaatttcatttactctcatttttaattggatttgcttttgcgattgaaccttttgcaaatatttctttaaatttatatttttgtttttaacatatgtaaaagtaggctatgtacataaaatggcacttcgtttaaagatcatttacattaacaatagggcggcaaatcgaatgaagaaagataaaatcgcgaattgttggcataaattagcatattaaaaataacttttccaaactgagggcaaaaatttcgttaaattcctctatgtttaaatacggtattaaatttgttttacaaaaaaaaaattaaaaataaacttaaaaatgttattttttagtgcaaaacgaccgaaaaaaactaaatttgctacttttttgcttccttttgacataatttaccatttaaataaaattctcgaaaaattttcggatcattagggggtaaaaaaaggccatttagctcaatttggatttccataaaattttccgccctaataaatttgaattttctttcttcgtttgtccatttcattttctggtaattacacccgaatttggcattaatcttcattgactcaaatgttccttctgctgctgttcgtcggctcctccaagtcgaattcatcgcagaaattggcgagagggaaatcgccaaaattggcacggatatctctgcgggaaaatgccatcaaatattttattttttgtcggaaaatctttttacgaaaatatcgccaaattacttgctcagcttaagcatttggcttctcagcgacgccccttccaccatttgtcctcctccgttggccatttgtccctcttcgcttttcccttccctttcattggcttcgtcgccgccgtcctccgaatcgattggcataaatttggcgaattggccaacactttgtttttgttgtgcccccgccaaaggggcggcaattgcggacggagaaggaattgcgagaagttcgccgtctccgtcgtcgtcttcgtcggcgcccgtctcaacactcatcccagtgaaggaggaacaggacgagaccggtgcagatgcaatttcatactctgaccagacggggggggagtaatagaacgatttgttttccttgatttttttgggtttcggtctcgactcttcatttcaactctcgagcagcactaatgctcaccatacttcaacagcgaagcgtcaaatataaaaaatgacagcagcatccctactgtagtgatgggggtgtacgataccgttatcgtagccaatggagtgggccgactggcgccagcgaagcgtggaatcgccgagcagcggcagttgagaagcattttgatggtgggaggctgacaaaatgtggtgttgaccaaagccattctgttgcttaaaataggggattgtcatgtgaaaaaaccaatggcaaataaaacgtggacaaaagaccaactcggaccaacgaaatgatcttgtcggccttttgtccgattttcccatttgtttacgttttgccccaatttagccccccccctcgctcctttagcgctcccttaccgaagatgccattgacgaacaactacagctaatgtcagcttcgtcgccccctccgcccgtcatggcgccctgccgctggtccgcttcgcaccctcccgccgtgtcacgccttccaccgcccgtcgtcccagaggtgccgtgccgcttgttcatagccatcagtttccgtctgactatctccagccgactctcccaactcgaatgccaaagaccggtagtgccgtcgtctccgctgtcccttctcctcccccgttgtccctgctgcttttcctcctccgtcgtccatcctccaacatccatctcagtaccgtaattgttgttgttgttatcgtattccgacagtatgccaccgctttcctcgcgacatcgcagccccaattttggctccttctgttcctctccatttatttcggcggtttctggcggttgtccatcactggcgccgccgcctccgttaggaagcggaaacggtacgcattcggctgcgctgacactcaccgcttctgccgactgtccatcgttcatcccggccaattcctttaatggaatttgtgagtctcgaacctatgaatctagcaagccggtaaatcatggtaccgatccaagaaaaaccaattaatagacagcactttttaaaatgcgaaagggtccaatcgcttccgctggtttctgtgtgccgcccgaattcgtccgtgccacccccccccctttacccttagcattcggtcaactcttcgtgccgccgagttgagtttgtccagtgcactcgcttcttgctccagtgaaatccttgaccccgccgtcgatgtgttggcactgctccgccaatccttcggcaacaatggcccatttcgaagcggaacagcacgaattttcctaaatttgcttaactaactcacaaatgaatagtgattagatgctctctttttacagattctgtctatttattaattgacttagttgaaaccgcttccgttttaccgactgattttttctttttatttacccactaatcaattctctcttttttatgattgatccttctcacgctctttctcttacttttctctctctctctctctctaatctggtttccctgttcgtgactggacaatccgacagcggacaatccgacagcggacaatccgacagcggacaatccgacagcggacaatctgacagcggataatccgacagtgaggacaatccgacagaggtggacgatcggacagtggacaatcggacagcaaaatac

SEQ ID NO: 5347 - DNA, 2363 bp, Heterodera glycines
  unsure (1)..(2363): unsure at all n locations
catgaaattctgtattatgtgatacgncatgccctnggatcgaaataaaaattctcgtgccgattgtcctgcccattggcgccggctgcgatcatttcgggcgtcacccattccaactcggagtccgtctcggcacttatcaggtcgacggagaacaactcggaggagagggaagagtgcatggagttgaacaattcggccatttctgccaatggattggcccgaatgtggcgaagcagcgggtaggcaccgccagcagtagtgccaacgacgccatcggcatcaccccctaaggcgggaaggaataagccgagattgaagaaaaagatctgaaattctcgagccctttggataagagctctcgggataatagccatttcagtatccaccgagtgccaaatttcgttttcaaatgagagacatggaaaaaaatcaaaatgaaaaatgccaatggcaccgaaaataaaagcaccacctgtccaattttggggcaaaagcaaagcgccagaggaagagcacggactcagatcagtcatcagatcagtgccgaaattgggctgattgagttgtggcgaagagaacggaggctgtcgcatttcgacactgtaaatggcacagtatttcaggaatttaccataaactttaagcccactctcgagcatttctttgtgtcgagcaatgattaccatctctcatcggttcgccattggttggctccttcgccgctgttttcgtttttgttccgatcactttcaccgccgcttctccgatggggcggcggcggcggtgccaacaccggtggcaccaaatgttgaggcagttgatcagccgaattaggctgcgactggtgcgggcggagaagcgaataggcgacaagccccggggcaacgctgaaaagcgccatcggttaagaacattcgattgatcagaaaatgctaacaagcatggattgaatgatagaaaagccttcggggcttattttgatcagcgtcactgactgatcaaaatggtaaaaataaagaaaatgctgaaagaacgggcctcattagtgtggtggaactgggtcaaatttccgaaagcatcctaatgagtcccacctgtcaaattttcatttaaaaaatgaagagatctttgagtcttaagcttgggtttggcccgtcctttgacgcccaatttgacctcagtgcgctctgttcatcgaagctgaactgtgcgcgtggtctcagtgccgagtacacttcctccgaaagcagcacacagtcgccgcccagcgcagaggccgcctccatcaatttctgaacactttggcaaaatgtcagtaattcccatttcaatttacgatccatccgttttttggttgcgctttttgtctgatcattttcatatttcaggcttttcctaaactctgtctgtccttcgcttaagccacctttgcccgcgtgttgggctgtccccacagctcatagcgcggcccgtcccatccgaccaccacagaaagtgccgtgccacagtccaatccgatggcaatgtctaacccctcggaatcggccatcttctgcaaaaaattaaaatgccaaagttgctgatcaaccgatccgatgggtgctgtagcaacggttatgtcaatgccaatgataaatgtatgacaagcattttacgggctaaggaatttcgaatttcgtaagtcggaacttttgaaattaattcaaattaataaaaattaatcattttttaaatatttatgaatcaagatttaggtctggcaatttatattggggtaattttttgaaaaaccaatgaggcctgaaaaaacaggcctagagacaaggcgtagcccataagatttcgtgagcaaaaaaatttgagaagctctaccggacaaattgtacctcaatttcctgtgcaaattcggccagaacagcgagctgttcaccaatggtgcacggagtgtcgtggacctggtcaaaaaaagatggatatgagcaggaccattaattggggacaaatgtcgcctcacatttcgggccaattccggcaaaattccgcatgccacctgaacagcaaaaaggaaaagcattggacgaaaattataataagccaatttcgaaaatccaaatccaactcaattaatttttctctttgtccgcctaaatggcataattttgttattagtccaaagcagcgacaaaatccaatggatttagtttccgaaattctggtcccagcttccaaatctcgacttcattcccgactcccggccaattaatccccggctttttcgtcacattcttgaataccgaccatgacttttatcattaggcatgtcttaccgcgtatacggagtgcagacttcgaactttctc

SEQ ID NO: 5348 - DNA, 3816 bp, Heterodera glycines
gcaacaggagcacagagggaaagcgaggaaacacggcggaactgagagaatgggagagagacagagacatggcgatataagaaagaaagcgaaacaaactggagcatccagagagtgaaagacagcgaaggaaagtgcacagggaggcagacggaagcggagtgagaggaagaaacggcgagagatgaagggcaggagaactggaagagagaaaaaagcaatgtgatcggaaagagggaaagacgggctgccattttgatcactgatcagaccagagggcattttgtaaaactgaccaacttctaatcagagtgcaaaactcagtggcactgaccgaattggcgattccgcagatggaaagtagggagagcacgagcagtacagtgacggaacggccgacggatgttcgggtgacgaattggcaaaagctctaaactagggaaagggacgagaaaacaggtcgagaataccgaacgatcaaaatcttggtccgggaaaatttacaaatttccgtattatctccgttattatcaaaccccccccccacaaaaaatgatacctcacaacagctgacgtaaagcccaagcagtagcagaaacatcagtgccaacgcaagtgccaacgtggccagcgtggtcaacagccgcggcatggccaacgcctggaacagtccggacagggccaagaacagcacggagagggcaaggccgggaatgaacctgatgatcagcatagatgatcaaatgatagattaatcctgctcgagagtctccaattgatcagtttatgaaaatgatcggtcaaccagtgtatttaatgagaaatcaatcaaacgtaccaccgatcgatttgtgcgtggaacagctgctcaatttgatggtcggcaaagcgaagggacaaagtcatcagcggagagtgtcccagcagaggcgatggcagcgaactgtggcactgatcggacggcagacgaacacggcgccgaaacaggctgaccttttgcgccggttggaactgcttccgcttggtgaacggcgtcggcaacggaattccgtcggtggtggcggcgacggcggtggggggacggaccgattggttgagcagacggttgatcgcctgaaggggttttgatcagtgattatggttgcttgataactgattaatgggaataaaaagtggctgtttaaaaaaggacttttcagtctggacaaaaacgatcgaaagactgatcaatctgctggaatgaatataattgatcaaatttgtaatactttgatacattgcttagagattaaattgaccaaaattttgatctaatgagactttctttggaatgaacattgcgcactttaggcagaataaaatctcaataattcattggccaaaatattgatcggtattgattgattaatgccattgcctgcggtgtcgtgagcagtgaaaagcgacgcgacgcggtcaggaaaagcaaaggcctaagtgccgggttgttggtcggttgtgccgtgcccgttgggctcaaccgccagcaacctctgtccacccgatcggcggctaatctcgcgccgatcagtcgccgcgtgtcgtccgaaattagtacggtgtctggcgcacaattggcttctaaatgcattgccgcgtccaccgccatgccaatcacctcccagtgccatcgacgggcgccgacaatgccgccggacaacgaacccgaaccgatgccaatgcgaatatcaatatcgacggatgccgactcgttgaaactcctgtggcaagacagagaaaaaagataagcgggttagagacggccaaataaaagtcaaataatttggtggacaaaaaaagagatttgatcagaaattatctgatcttttgtttttgatcagcaatgagttgatcggtgtgatagtgtgaagaccattagtgatcatttgaagatgactcattcaatattagtgtgactcggattgatcactttgtcaatgccaaaaggtctaatgcaaagcggcaggcgacgagcgcgtgatcagcgcgcgcttccggcaccccggaaattgccaacacggcgtcggattggaccagcaaaaggccgtgcagtttggccaaccgcccaatgcgcaagtccaactcgttgagcagacgtgccgagtcgggcacttgcagttgtgccaacactgaggccaagccgtggaatcgggcaaagatgacactgaaatggtataagtgattaattaggcattggctaatcagtgggacggagaaacgctggaaattgccgggtttgcggcaatttgagtcacctggcatgggcaaagtgttcaacaaacactcgcggcagttcgggcccgtcaagttggagcagtacagacgaaatgacatgagggggcagcgaagcggacagaagctgggcctaaaagccaaaaagggattgtaaaaaggtgttatcagcaacttaagccccaataattctagggaaaacgaatttaggagtttccgatcagaaattatggcaaatcatttaatttttttttaccattcgttctctctcccttttccactccgtttcactttccaccgaattgcgcgcactcagaaaaacggcacgagaaatttttctaccgtttgccattgagtaaaagccgaccaaatgagtccacaaatgtgccaacaaagcagcgattagctgaaaattgattttgttttaaaaataaaattattgttgccgtaatattgcaaaaaatgtgagtgtgctgaatgtgatcaagtcaaccaactctgatcaatagcccagagaacagctttactcaatgtcttatcaaataaaacctatgcatggttataatggagtttcctgatcagagataaaattcgatttaataattaaaagctggattcaaatttaaggtctgttggttgccatgacgtactgatcactgtgaatgcccaccttttccgtgctcggcttggcctcgtcagaaaacccaaatgcgccaagatgtgccaatgaaatggcaaaggaagtgccgaaaatgaccaatggccggaagggaaagaaggcgaagaggacgaaaatggtgatcagagaagggatcagtgaatgggaagcatcggaagggatgaggaggaggaggaggaagttgaggaacagccaaagggcacacgcggggacggaagcgtgatggaaacgggcggaagagagtggcgagaggaacacacagagcactggaaaagcgaggggaagggaaggatgataaagagaaagagggaaggtggagaggagagatagcgagagagagagagaagaaagagtggaaaatgaattataaagaggaggatacaattgataaggataatgaaggaagatgaagaatgatgaggaaaaagtaggaggaagagagagggagggaggaagacaagaggaagagaagagtgtgtggtgccattgatgatagagggtagagaaagaagcagagggaacaccgagtgaaatggcggcggaaacggtcagcagcacaagtgccgggtcaggcgatggcacacgacaaagggcaagtacaagttggacagggatcagcatggaaaagagacggagcagctcagcttaaatgggggggggcacaattagggtacaagtatataattaaggcaattatgacaattggccaagggcccaccggctgctctgtgcaattgctgatggttaaagagggcctccaactgcgcgtcgccaaagggccgactcagcgcggaaaatgacacgggtaaagaatggaaaggcattgacacgaccaaacgacggacaccctcagatcagatcattct

SEQ ID NO: 5349 - DNA, 5617 bp, Heterodera glycines
gggggggggggggcgattcgggcggaaaaattgattttgtttagagccaaatattttggtggtggcgttgcgcatttcgttcattcactatttactcccctggggggcctttaaaaatggggggggggggaattcttcaaacaaaaagtgcgttttccccaactgtatgatgggcacatgttctgcacaggcaaaccctcggcggttggccccctcggcgcgacaaataaacccataaattttgaatgcgtcggtcgctgaatgcacgccgcttctgatacagcgcttcaagagtctcgattcgcggattcgtgaaaaaatttccggtttttttatatcgtcgcgcagaaaacaaaaataaaagtaaaatgaatgcatgaatttggattaaaaattattggccaaaaagcacagaagcgactttttgaaggtagacattttatccgcgtttaaatgaatgtgaaaattatgtccgcttacagacattttgtccccgtttaagatgagttaaaacattttgtccgcatttaaatgaaaatagacattttgtccgcatttaaatgaaaatagacattttgtccgcatttaaatgaaaatagacattttgtccgcatttaaatgaaaatagacattttgtccgcatttagatgaaggtaggcattttgtccgcatttagatgaaggtaggcattttgtccgctttactaaacatgaattgtttgccgccaaaaaatatagacattttgtcagcgtttaattgaaagtcaacaatttgtccgctttattaaatatggattttttgaggcccaaaaaaaatattttcccaattttggtagtcggtataatgaacacattatttttgtttttggcccctctctgctgctgctgctgcgggtgatggaccgtccgtcgctgtcattaggccaccaaaaggttggacgaactttggggggccacccccgcggcggcccaatttgtccaattaattagtgcccatttatttgctaatcgatttgaattggacgcactgcgcgagacgcatcgcatccaaaacaacgaaattggacgaacaaacgaagaccaaacaaaaattgaatggagcctccttctgccccctttaaatgatggtgtccttgtacgtaacaaaaaaaggaaagaaaattaatgggaaaaaatttaagaaaatttatccgggcaaggtcaaaacgctgaaaaaccactcaaattttcgggaaattcggctatataattatttttcatggcttattgaaagtgattaaaaatcattcatttccctctttaataaatttgattttctttttcttttttgtttattaaattgttttactctaaaaaattactgtacaaatacaaatacaatataatcattaaatttaaacgaatttgtatcaaatactatttttgaactaaaataataaaaattattccgtaaaaataaaaaatggattaaaaaattattttttttcttttttttttctgtccgtcgttttgcctttagccacaaagtgagcacgatttgcgacagttttgcatcatccacggcctcgtgctggccaattggcacaaattgttggtggcccaaacgccgcagtaaacgttggcatccgcgcaacctttgtattaaaaaacatgacataatttgtgggaaaagtgccacaaaaatgaaggaatgcgccaaaaataggaaaaatatgccaacaataggttttgacaatgacaaattcagcaaaatgtgccaaaatggttattaaagggccaaataagtcaaaaggtttgtatttcggtattcccaatccattaaaaggtgtcaaaatgattcataaaattttaaaaatgacattgaattgtcaaaatggcacataaaaatacaaaaattctggcaattatcctcaacaatcaaattgcttaaatgtcaaaaaaaatttttgaaggaatttggcggaatttgttgtcatatttcggcacacccgtcgcccaacgctaattggtcataattagtgccaaatttgtacccggcatgcagtacattcgcctcagttcctcaacatccgttgcactcagccctctccgttggcccatctgcgcatcgttggcaccggggttggtcggaaaatggtataaattgaaatcatcatgattggttttggttacggtgttttgaataaaaaacggtcattatatgggttagatatttatggggatggcagaaggaagcggagtgagggagaaagtgggataaaggacatgggattgatcagtcgattaaaaagcattccacgctatggaaaaaccgtgggtactagtccaccgggccagttatcttttatgtactaaggatttattaattgatggacaaaggatatgtccgagggaagagattcgagaaactaagactcttgaataatgacgggattattgattgccacgcagctcagtcggttaaaaagaattccacggtatggaaaggccgtgagttcgagtcacaccgggagaattaactcttaagacaaaggatgtgctcgagaggagagattagagaattgaaatgagctctattgattggtggactgatgccgaaaatagggaaaataggccgagactctcgactatctctctaattgatttgatttgatacctttgccgtcatcgttttcagtccagctgatttggacgcaatgttgctggcgtaatgcatgatggaactgaggaattgattgatcagagaggaatattgcaattatttaattgtaatttaaattaaagttccttcccgactcgaaccggtgaaattagaaaattttatttttttcgactttttatcaaaatttctcaaccacgaggggagtatttattgcttcccgacatttttttgaattgtccagccttcttcccatacgacaaattttgtcggggaatttcttctccgatttttttcctaagaatcaacgcttaaccctaattaattactgttcacccgtagtcatatcggacgccatagctagtgtatttgaccagctccgagcgcgcaaatgtgtcatagttttgcggatttatattcgcccaattgatgttgatgaacagatcacggtctgatgatggaaatgaaaaatgaattaaaaaataaaaatggcattttaagggaggaaaatcggaaaatagcagaaaaaacatagaaaagtttgggcacaaaaaaggcataaagaagcaaccaatttgtacagaatgaaaactacaggatttcttgtaattcagccccccccctgaattagagccaccactgaaacaaagcccatgccgcccgaatttttttttctacctacatatgtaaatggtggcacaatagaaatttaatccagaaatttagaaatttgaaaaaaattttaaataaaattatgccaaattttgtgccattgccaacccaccgactcggagctgttcatgctgcaggcccagcgcgtgcattgtctcatggatggcaatgccaacggcgttgccgcattgaagctcaaataaactggatttgccggagaaattcggcccacataactgagcccacaactgaaagatgccaaataattaaaacaaatagtcaataatataaataaaaattattgcaaattagcaatttaattaattatttacaatcaaacaaaaattaattaataattagaaataagcatgaaattaattaattagcaatcattaattttttataagtcatcaattaagtaattaattaaacgatcattaattaattaggaaatcgtaattaattaattagttagcaatgaattaaacagctataaaaaactaaaaaatcaattcatttattcgttttttgcgagttgaaactcaattttaattattaaaaaattgagttttataaatttattaggtaattgaaatggagtgaattttaattataaataatttttttaattaatttcttattttttaattaatttcttacaattgtggattgttgatcttcacatagtacagatggtttcctgccggttttctggacgcttcttggaagctcagacaacttttggattggatttcctggcaataaatttataaattcaaaattaaattaaatcagacaaaaaatgtataaaatgttaaagagataatttattaatatttaatcccttatccaattttcataaaaatatttttaattgtcatccaagaaatcacctgaaccgccgcgcgaacagaacctttgtcactttccgcttaagttaggcagcaaattattgtttttaaattaattatttatttaatttgctttatttcctaaataaataattttggagtgtcatggattcgtacaatggaagttcgtacaattcctataaatttttgttgtttaatttaaaattaagtaaaagctttaattttttctcaaaaaatcagaatgatttttttatagaaaaacttttaaaaaattcttaaatttatttttcaaaaaatttgaactaaactcaaataaattagcagaaaattttttgttaagtttttctagagaaaaatttatttattttttgtgtaagattctaggttctaaatgaaattttaaaaatgtttacacgaactgccattgtcccaattttgggcctttttcattcttttgatcaaaaaagttacagtatttaaaaaatttctggagaattaaatgccatttgacaaggtgttgaaagccgctgagatggaaatattttagaaaaaaaaataataatttttattattttttaaataattaattttctttttaaacccacgaacggactgatcgaacatgtacagaattggttgtccgactggccatttttgggtgggagaagcttcaaagaacagcgaattgccggcgcgagtgaaacgacggcgattgaaattgtgccgacgactgaaacggcggttgtcagaaggcggcacggcaccaacgccaaccgaaaacaaatgggaaaatgaaaaatggaagattaggataatttaaataatttattaaatggcaaaaaataatatttttaataaattaaaatatttacaattaagaaactctgaaaattattagtgaaaaaagtaaaataattattaaaccattaaatatttctaaattaaatatttaaaaacttaaaaatttacaataaaatattaaataatttgtttaaaaaatattataaattaaacaatttacaatatacaaatagtattttcaattttatataaaattgcaaaataaattgatttaattaaatgaaatatttatggttaatcttttaattcaatttaaaataaatatttatttaaggaagaatattttattaaatgtgttttgcctcattctgattgatctccgtaattagcacattcgcctgctgttccgttagcagcaaatcttgctggaaaacgccattgttcgccggctcaacgcgtccctaacaaaaaataattgtttaaaaatatttaaaataatttaaaaattaaaaaaatatatatttgcctccaggccagctttgcgaatccacgccttcttcacttggaatgttcgcgaaagtctgatctccacgtcacgaccaatttgactgtcc

SEQ ID NO: 5350 - DNA, 4219 bp, Heterodera glycines
aaaattatgttcaaaagtagagcccgacattttgatcttttcctgaacatggatttttttaatatttgacctggagctggatttcctggaaaaatccaggcctagatccaggtccaggtcgaaaatggctttttgacacagaaccgtttgatggataggagggagtttgatttaatttttgggtttctggggaccctgcgaaatttagttgccacctttctcccgctttttaaaaaatgcctaatttgtcatccccccgccccgaaatattttttctttaccgccccgatgaaaatgccgtggcggttgatcattgctttgcgccgtgttcggctgctgttgacccatctggccgaaaatgccgcccaaattgacgcccgcttggctcgtaaattggttgacgttgccgagcagtccacccaagtcaaattggcccattgccgacgacggcacggccaacagaaaaagcagccggattggcaacattggcacaatcactttttaaaattgctgttggtataaagaccaaagattatttagtaattggattttttcgagactgtgcaaagagaatcgggtccctagaaattcgagaacgggaaccctcaaaacccgagaattctctcgattcgagaatgtgaagaaactgacgagagtttctttcccacaataagagaagggttggctttgtttggttcgggcggaccagaacgttatcattaattaggttcgggaaaaaaaacaatttccgacccaaattcaaacgattaacgggagaaaatgacgcgcaaaaccctcgcgcaccgcttagagggagaaacaaaaattgaaaattgatcaatcactcggttgctcgagactgccctctgtttggtgaacaaatcgtctcacttcccgtcccaaatttcatcgtccccaatttgattaccgcaaattgccccccccccccccaggggccaaattttgttttgtcttccgtttgtttaatttaagagagaaaccacacgacccatccgtctcctcctcccaaatggagaaggaaggcccgtccccaaaaacttgttttttattctaattagctttgcattaaaaatagtggcgtcatgtcaatttggcggcgagtgatcaaaacgctttgtgaagagagaaagcgctcaccgacaaatgagtacacgcatttattctaaatttctttttttcttgcgagaacaataacaacaacatcaaaaaaacaaaaacaaaacaaaaatgatgatgagtgggcgctgaagaaatttcaaaaagttttcaaattttcaaaaatggaatttttcatgggtgcgaaaaacaatgaatgggcaggcaaaagagcgagagattggcgacaaaaaaaacggtgctgatcaaggacacttttgaacgatcaaaacaaacagaataaaataaataaatgtaaggaatgatataaaaatataaacggcacacatttcaaaaggctcaaaatcgcggtttcaaaatttattttgcatcaatccaaatattttcaaaattaaggaatggattgatataacaataagcgttttttaaaagagtctgggatataatttggacgctattttagcggtaatttttttttaattggtacaaatgcacaaatttgaaaccgatttgtgggggacacaaaaaagtacgaaaatgggatcaccaacagaaaagaccgacaaatgaaaatatggatcaaaaatttgcaaaaaatgatgcattatcccctcatcctcctccttcctgagttattgttggcacgtctttacgcaaattccgcctgactccgcccactgttcgggtcgcatttttggcaccgccccgtcggcacgtcgccctggtagagggggaacgcagcggaacagacggtgcagcgacggacctcgtaaatgttgcagcgcgtgcagtgtttgttgttcggaatgcctgacaatgagcaaaaatgaaatcattggccatatttttttatttacaaaatatggctccgggagggggacattttctacgtcgttaaattaattagttttttcttgaaaattaattaattgccttctttgcgcgatgagcccttgccaatggtgcccatttcgttgaattcttccgcctcgaacaaagagaagggctccgtgtagtacacctcgacaagcgtgtccaatctgattttgtgagaattaattaattttggtttttcaagtaacatttttttgacagtaataacgaatctgccacacataaaattaatatttaatttatcaaaaaaagaggggaagaatggaataattaatactaatctaaatgaaaatctaatgaatggacgggtaaaatacggccagaaaagaaaaccattggagaatcagaaattaaattcaagtgtgtgaagttgacgaattttttttttgtggcctacttgtactggttgaactgtcggcaaacagccaaatattggggcgtcgcggtgggcgagccggccctcaaatggaccttgaggaacgggttgtcgaaccagtccatgctgatcatcttcttcattttgcagaatctgtgtgccaatgccatgttttttatttgtttgtaaattaaaatttcttttataatattagtagtaatttttaattgggttaaaaatttcgtacatttattattaataaaataaatcataatcacttgtccgtgtccgagttgtgcttgcacaccaccaccgtgacgtagtggagcacggaggactgagttggctcgtccacgcttgccgcgtgcaaataaaagtcggcaaagtacaaattgcatgtgtcaaaatcgagcagtttgcgcgccgaaacgaccatttgcacgtcgctataataaatttttttaattaaatttttttttaatgagtatatactgacccaaatggcgaatccttaggcagatttttgccgcgcaacagtgtggagaagaaaagacctaaaggatagggggatacaaagccgagaattttctttgatttaattcaaaaaaaattcaatagaaaaacaatcgtaagtaaatgtaggtaagtaaaatattgcactttcaaaaaaatgagtgaccaattttttatgtttgttagaaaaaatattgctgctgttttctcggttttaccgtcaatggacccgttgatgggacagcccgggtgtccgttctcgtccttggtgtacggtcgcatgatacgcagtccgcctgcaaaaaatgccgttacacatcagagatgggaacatcaaatctcggacattgtaggggacgcgatattccgttcccaaactaaggggcctaggaaaccaagtgcctatgcccgtttttagggggaggaggcctcagaatcacgaatttcgatttttttttttgtgcgatgaattccaggcctgtcacacaagggtgcaaatgattagcgggcaatcccgccaattcacctggtgagtcgtaaatgtcgtcccaatacgctttcggtttgctccgatgcaacatatcgaaaacaaacaaaaatttaaaaaaaaaaactttttttcctcacctaatggatacatttgctcgccacaatattttctcgccttttcaaacagtgtctgcatttccgaacgtgaaaaagctgtaaaaaatggtaattttcaattaaaatagaccaataataaatgacaaatttaatttttcgaatttttcacgagatgcctaattttgaaatacccaattcaaaagcctcgaaaatcctaaatttctaggaccgtcgcttaaaaagtattcgaaaaatgccaattatcgaatcgccactcactggctctgaactggccggagccgtgtgtcactttaattcccggcacatcaaagccctccagtgtgacggcgtatgtgcggccggcacacacctcgaacacgtgctcagtgcgacggcccaactccacaacacggggcggctgaaggtgttccttgtgctgttgctgctgctgtggcggaagacatgcgatggtcagcgattggttgtccacttggaacggtgctgcaaaatttggacgttatttttttagaaaatcagtttttgacatccattttgactaatagtgggaaaccatacatgtgcaaggggtgtcttagcccaaggcccacacgacggacgattggaacaggggggtgtctcaggaccgatttttcatacgcaggtccacttttttctccgccgacgacctttttt

SEQ ID NO: 5351 - DNA, 4732 bp, Heterodera glycines
aaaaaaaagacacacgcaagagagagggacagagaaagagagagggagagagaaagagagagggacagagaaagagagggacagagaaagagagagggagagagaaagagagagggagagagaaagagagagggacagagaaagagagagggacagagaaagagagagggacagagaaagagagagggacagagaaagagagggacagagaaagagagagggacagagaaagagagggacagagaaagagagagggagagagaaagagagagggacagagaaagagagagggagagagaaagagagagggacagagaaagagagagggagagagaaagagagagggacagagaaagagagagggagagagaaagagagagggacagagaaagagagagggacagagaaagatagagggagagagaaagagagagggacagagaaagagagagggacagagaaagagagagggacagagagggtggggggggggggggggggggaaaagagagagagagagactcataaagtcggcacagcatttgacgcgttcggcttacgtccttttttggaaatttttttgcggcataatggacaagtgttgtgctgattgaacctggacgaaaatgaattctctgtctaataaattttcattttttattattttaccatgcttcgatgcattttgtgtggaattcatgctgaataaaacgaaagttaattgcttgaatacacgaacgattagcgtaattggcacaacaattagcgtaattgacgtcaattatcggaattggcatccctttcccgcccaaattgccttacttttatcatgaattaattgatgcataattgaggtcaattaagataattggcattaattacctaattggcacccctttcccgcccaaattgccttacttttacttttcccttggcacatggcagcgtaataacactttccccctgctcataattgcccaaacaaatggcgcaactttcagctgattgttcaccctcttggacaattcgttgtggcaaatggtttattttcacttgaataaaaaataaataaatttttgaatattatttaatatatttgttatttctttttatttaattcgttggaaatcgatttaaaacggttcaaagaaatgagaaaatgcaaattaggcgagtgcttgtgccattttaaggattagaaatgccgggacggcgcctaccggcaccgctggaacccccattttaccatattctttaaaaaaatggagacaaaggtggcaaaaatagttattttttggcgattcctgcaaaatcacacccccccccccctcccccaatttggaatttctaaaaaatacaccctaaaatcgaatttttgaattcagcccctaccaccgaagccaatggatatattttgatttatttatatcaaaagccgtgccaaatagtctccgttttaaaccaattccgaccgttttgagcaattttacccggtttgtgctgcattgaattttcggaattttcaaaagccaacggtctgttgaagggtgctatgtcattacttaaaaaccatcataatgggcgttacttaaaaaaccatcataattaaaatttttgcttataactttgctctaaaaagaccaaatttttaatccttgctatcattcgatagaactaagtgttctttaagagcctgtaaaatttcaaaaaaatttataactttaaaaaaaagttatggccaaaaatgtccgaaaatcacgtttttttgagttccccgagctataacttttttgaaacttaacgaaattttttgaaattttgcagactgatagagaacacttagtgctatcaaatgatatcaagaattaaaaatttggttgctttcgagcaaaattataaataatttttcgacaaaatttttcataatgatggtttttaaagtaacgcccattatgatggtttttaagtaacgacccagcacctgttgaagagcaacagtctgttcaagacggattccgccacggaaatggccaaaagtaaagggattaccagcacaatggcaacgaccatgacaattattttaagtatcgatagaattaatattaaaacgaattcaaagaagtcaaagaagccgcgctttgttcgccttttctgcgtgttgacgaagccaactaaaagtgccaaaaaataagacatttttttggcatttaagtgaccgtttaatggaaatttggaaggaaaaagaacagtaaaatgtcggtaagctaccgtagtccgataaaggacgattttcggaaagccgattatatggcattcccatgtttcccaattgtcctacggcatatttcattgcgcattaaaatatgaattagctaaccgtcgatttggtcaacggctgttcccaaaagctgcagcattcgctgcagattcgcctttgttttgtccgcgactttttcggcattttgtccttttttgtcgacactttgtctcatttttgcttcctttctatttgccttcttttcttgaataaataattttaccaattcaataaatattcgctttttgctcatttttttcagtggcacaattttttcggtcgaaattcggagacgcaatgccaaaatttgaattacaaattgcaaatatcccttaaaggcattttgcgaaaattgtcctgtaattatttatttatttgattatttaatgaataataattattgtatgacctgtttttatttcttttttgaatgaccgtaattcttcgattatttggctcattaccgtatccttctcttttattgcttttattatacggtatttttcttcaaaatccttccctttctttccacctaacatttccgaattcatttgattgcttctgttttcattctgaattttatgaatttatttccttaaatttttattttaaaaataactcctaaaacctttaataattaactaagtataattaagaaaatggaaaaaataataattttagactgttcaaagctggcaatttcgtgaaattaattcgcgctttccttggaaaagttatttgagttccattcattttccgtcccttgtctcgaaaatggagcccaagaccaccaaaaaagccgagagtttcctcgagccaaaagtcgagagtgaatctcgaccagcattattggtcattatttgcctgcttggcttcgtcctcgaacactttttctatcagtcgctcgttttcccccatttcctccacaaattgatcaaattcttcctccccaatgccttcctctctgatcagttccgccagcgtcgttcccttttcctttcatgtgccgttttcgtcggcgattaaatcggccaaagttttgcgggggtctttttcgaaaagatcggccaacgatgttctgctgctggtggatgatgccgaactttccgtgccgtactttgtgccgtcgtcgcccacggcattgaccaaaacggaagacgaaaagcacagcaaagaaagtacaaaaagagacttccggccctttaatgtcagcatttgggcaaaccaatcgaaaaagtttaaattttataaaatctccataagttttcaatgaaattttgaaaaaattcctaaaaattgtgacacctattttatagtgatgctcgagaccgagacccaagaaatccgaaacttttctcgagtcagaatttgagattgttgagcatcaatattattttagcggtagctcacaaaggcctctttaacagagggggggggggggcgttgtaataaaggacctttttttgaaaaatggccaaatatacacataaatcgggaaatatgcatatggaaatacgtcaagaagcttgaatattaattgctagtgaataatatggcaagaaaataggataactttgagaaaaatggaatgaaatgctaaaatgcaaatgtttgagcaagaaaaggcaattggctctaaaaccaatgaatcatgtgccttttccctcgagtttggcgttggcaaatttatttaaacattgttttatattgggaaaatttgtgattggaaaaaattgttttttacagaacaattcgacaattttttaaaatggttttattatttatttatttggcataattgttgtcaattatgctaattgacgtcatttacgttaattgttgtcaatcatgctaattacgtcaattgctaattagtgtaactaacggcaccgccggaccccgccccccctgtccccaaaaagttttttaaaaaatgcgtcgcaaaaaaatctttgaaaaatagttttttatttttagtaaaaattttgaaaacaaatattttcaactatggcagtgaacgaaggaagagccgagcggtgccaaatcgtccgacgaaggacagggccgttcgtcagtgcaactcccaccagtcggagtgtccgccgcagtaaacgggagtcgaaactcgtgttcgtcaagtcaaaggggtccgacaagcccttctccaaaccttgtcggtggtgccgttaagcaagcagcaaatcgctgcacaacattcacagcgccagtccaactttgtcgcccctccccccctcccattctcgtccccctttggcgccgatcggatcggtcagcaaagtcagacctatcagagcaaacggcgaaaagagtgcgcattcctttacgacaagcgaacggagtgacgagagaagaaagggacgagagcggtgaagaagagcgggacccaatcccgcc

SEQ ID NO: 5352 - DNA, 2339 bp, Heterodera glycines
  unsure (1)..(2339): unsure at all n locations
ctagtttcgtttttttggttcaaaaccggcttaaatgttcgttaacaactaaaaaaccataaagganngggngngatgagacttttcgaaaggnngngccngnangccaccgaannaanngnngngaangggaaacggcncacgnggncgcgnaaaaggncacgnaaaacacgnnatggctaaaaataaacgtcatattcgtgatcacgctaaaaattatcctagaaaaataattattaaaaaaatatttcaggggggggggtggcaaaacccataagtaccaaactttgtttttaaatcaaaggcaaacgattttatattaatttttgcatttaaaaatatatttttttaaatcttgtaaaaattccaggtttagactatgtttaattaataattaccattttattcagaaaaaaagaaacaccgcgtacaaaaacagaaaaccggcaaaaaataagaaattatatctgttaatgctcacacgacgatgaaagtgccaattaaagattaataccaccaaataattttaattaaaattaattggtgacattttacaacaaaattaaaaagtgaaattgaaatcggaaaagtgtgttcattcttctccctcatgcatttttaggcgccgtatttcaaccgtttgtaaagggcgttcatttgttccttaaagaaagaaaaaacggtggattttttttataaaactgtaaattttgacggaaaaaaagattttccgaaatcgagacccggaaatgagctcgagagtcgatattaagaaacaaactctccaaactcttccgagactctcgaacagccagcccttttagtcaaaaatgattagaaatagcaccagaaggatgaatgtgagcacagtgtgcgggcccagccgcatgtaatagggcaaaaagcccttccaaagggcgaaaatgccctcgttggccaacacgcggcggacgacgtccacgacgccggagaattcaggacgaccgtcaacaacgctcatgttttggattctgttaaatgaatttatgcaaatgattcaaacaagaggtgtcattagcggtgccaaaataaatttatcgacttccaaattgcttttgataaatatgcaacgctttatttttttgaaaaaaaaataaattaaattttcaaaatcccgattttcaaatgttgtttctcgcttttatccctgtttctgatcaagcgttttccactttttgccaattttgtggccctctacaattttttttgcgcttttcacttgtttacagttgattaattgtccgtttacctaattgcttttgagacatattaacgcattttttgaaaaaaaataaattaaattttcaaatattcccgattttcaaatgttttttctcactttcaccctttgtttctggtcaagatttttccacttttgccaatttaaaatttccaatttgatcctttcgtcaacaatcaacaaaatttgatagtgttccttcaaaagtttcggccctcaataaaaagtgatttttcttgcgcattttccccgtttagggtaattaattaattgtccgtcatttaattgctaatttgtgcctcgtcttcacaatgtccacgggcattgaggcgatggtggtggccaatccggaaatcattgaagcgcaaaaatggagcggaattccgtcacggaaatggccggaggcgagcagctgctgcttggcctgcgaataggtggccaattgggccgcgttgaccaccatggcacggatcactgtcggagtacagcccttttgggggggggggggattcagaggtggcattttaaatgaaatttgaattgaaaaataaagaaaaaaggaatcaattccgtctcgctgcgcccgaaatcttgccgagataaaatctcgccgccgaaattaaaaaaaaattttcaaacttagaattttcaggaaaaaatcttcgaaaatttttaataagaaattttaagaaaaattgaaacgtttcagcgttttttgatcattttttgaaaaaactcagtaatgcatcgtaaaatatcaaaaaaaaaaaaaaatcagaaaaaattgaactcttcgaattttacgaaaaatcgaggaatccatccagaaatcatgactagaaataatgaataaactatttaaaattaaaatatttaaaatcaaaatattttcggcccacccgccatagtgtgaggacgccctcctcgcgcgtgacgcgcaccaacgcgttcagcacgctgctgtaatttcggcgctgggcgggcggcagccgaccgtcggcggtcatccgaaccaacgccaaatcccatcgatttcttcatccaaaaatacaaaaattaa

SEQ ID NO: 5353 - DNA, 1904 bp, Heterodera glycines
catccgattcttgaccaggtccaacggctgcacgaacagagtggcacccattctgagcacatggaaaacaccgtgaagcggcaaaaaaaccggcacttttaaatgaaaggcataaaaaaagttggcacgatgaattaggagtcccccaactggcaaaaatgggttgccaaaatccaaaactgatcaagggcatagccagggagaggctccaaaggcaaccaccacctactccctgcaaccagcagaaaattaatagaaatttgtatccaattttgcggatagggaaataaaacgggaagacgttggggagaagtgcaagaagtatttgccattatcaccccgcaattccgccgaacataaatttgactgagttcggaatcgtttgtgccgcagcgacggatttgctgttggctttggagtcgcccattgttggaccggcacaattagcaattaaaattacctgaaaaacacattgagggggaaaattgccaaaatttaaatttaattaaaaaaatataattagggatttgagcgtttcccttatgaaattgcaattaggtaaattaccaatttctcttttatttatttctttggtttttttgtgaaaagatcataattttcatgatgtgtattaaaaatcgcgcctaaatatttgggaagaaatgcgacaattaaaaataaaacgaaatgaaaggaaatcggaaatcggtgggatcaatcgaaagagagacataaaacagacacatttgtatcaacttgtatttatattttaaatatcgtctgatcatcatcctcgagccgttttttgtcattcattttgatgatcatcagctgcggaatggtcgccgcccgccggcgccgtcgtcgccgacgaattcgaagtgttcgccgcagcgcctaccgccctttcctcgtcgtcgtcccgccgttcgtccaatgacaaaagcatttcgtggaactgaaacatttttaaaaatatttgaaaaatttaaaatgtttgaaacctttacaaaatttaaaattttcttttaaaaaatttaatgttttaaaaatattagaaaattcattttaaacctttcacaaaaatttaaaaatcttttttttttttgtaaaattcaacagattgtgggcatttcctccttcaccacactcataccgtatgcttttgaatgtttttttgtgtgtggtatactgtaccttgtgaaattcctccgcgatgctccgtctctccgcccattcgtccgttaccgtccgctgcggtgccgcgccggcggcgccactttcgccaactgtggtggcaaaatcgggcgaaaagcaccggatgttgcgacgacagcacggcttctcgtacacctccttcgcttcggacggagaataatcggcaattttcctgcaaattttttggcatttgttttaatttttgaaaaagtaaaaaaaaacgcactcctccttcagcccgtacagtcgtaacagatacagcttcaaatgcagcaacagaaagcacgcctgactgttccgcttcagctccaaaatttgagcgcggttcgatggcaaatgctctgaaacaattttaaaaaattatttcattggaaaaaccggtcaattgctgaaaaaataaacaaaattatttaaaaatttgtttaaactttctttttaaaacatagatgttctcaaaaattttttgaatttatagaaagaacaaaaaattctttgacagattttttgtttccttaaattttcttataatttttttcaagttaggctaagtaactaaaaaatgtttgcttttttccttgtgtttttatagaaattttttttttttttttgcatttttttatttaatgaatttggcatggtttttaagagttttgcccttgtattttaatcagtttccccaaccattt

SEQ ID NO: 5354 - DNA, 1413 bp, Heterodera glycines
cggctctactgcagtttacgcgtccactctacttttacgcgtccaatcgacttttacgcgtccaatcaaaatttaacatccttttcacggtgggggtcgattgggcgacgccgtttgggcgccgccgattgggcgacgccgtttgggcgccgccgattgggcgacgccgtttgggcgccgccgattgggcgacgccgtttgggcgccgccgattgggcgcgggtacgattgggcgccgccgattgggcgccgccgtttgggcaccatgcggcagccaaatttttcgttttcatattatccaaaaacgtaaaaaactgaaattactacaaaaatttctagccattcaactgaattacgagaaacagcactcaaaaaacgtaatgtttatgggttaaaatctatttgagtcacaaaattccttcatgactccttcttttttaatggcatgggtcctcgaaattatgccctgtaacttaaaatttgaagtgtccttgaatttaatgtccttgaaaaagaattcgagaaaaacaattattttatataatgtttttaatcatctacattcttttgaatagattttgggacaacaaaggttgatttgatgaaaaataaattttcgtcttttattcgaattcgggtccgggattcgaaattggtcaaaagggatgtcagatttgtgatcaacgacctgaaaaccccctagaaatgttttaaaaaatattttttttatggtttgtaaagtgcatacataagtaccctgaaatctttcaaaaaaattttcctgctgatcggcaaccgccggaaccaatgttcccaaaaagttttttgaaaaaagcataccgcaaaaaagtgcacatgcggtgaaatgaggaaactgatgaacagaaacaaaataataatgaaaaaatactacaatcatttttcattgcatattataatttttttgtatcctatccttgaatttaatgaaactttcacgttacgtcctcgtaaattattatacccgtccttggaaagtccttaaccctaagttgaggcaaggttaatgaatttaaatttccccatggcgcccaatcggcggcgcccaatcgtaccggcgcccaaacggcggcgcccaaacggcggcgcccaatcggcggcgcccaaccgacccggtccgtaattttacaccctaataatgacattattggcgctagcgaaatcagatgattaaagtgaaaaaagaagatttaagagcatttaaaaagaaaaaatggttttttttgggttaaaataaaatttggtcattcgccgatcggggtgcccgaccctcgacaattgagctcctccccgccccgacccccgacatgtcgccccccgaggtccccggcccccgacattttgcccaccgaggggtcttggagcaacactact

SEQ ID NO: 5355 - DNA, 1857 bp, Heterodera glycines
ttgacatgcaattcagtgcatacccttttgacgtagtcaaggataatgtcctgctctgctcggttagagtacgagtgcccgtccatttccctctcttcaggttcattggcgtgatgccaaagaatgggaaaaccctgaaatttcccactctctaattatataaattagaaaatgtgattatgttttgttaaggatttggctctacggcattgtacgcgtagaatcgacttttacgcgtccaatcacagtttgcgcgtccaatcgacttttacgcgtccaatcgacttttacgcgtccaatcaaaagtttacgcgtccaatcaaaattttcctaaatcgaacatccttttcacataaggtaccaaccattgcaaaaagaaataataatttaaatattaaaaacgtaactccaagagaaagaaaaaattactaattaatttttaataaaatttaaatccgtcattgatcacttattatcaaagtatcgataggtatatacgcattcaatcaattgttataaaatttaataatagagagactaatatgtgcgtgcttattttggtttcgataacctctgatatcaaaacacacaaacttttgattggacacataaacttttgattggacgcgtaaaagtcgattggacgcgtaaactgcagtagagccggtttggctgcagataaagccatttgagattaaataaaaactatttttaaagtcctgtaaatggtaaaatgcgattagaaaagatgcttctttcttttttacaataatttaagcccagttttcgtgccttattaaacgtcggacggcggttggtgctatgtcattatttaaaaaccattattatgtgcgttatttaaaaaaccatcaaaataaaatttttttgcttataactttgctctaaaaagaccaaatttttaatccttgatatcattcgatagatctaaatgttctttacgagcctgcaaaattttaaaaaatttcattaagtttaaaaaaagttatggccaaaaatgttcaaaaatcttttcgacaaaaattttcataaagaaggttttttaaataacggcttcgccccggacggtttagtctccgtcgaaatggagctttagtatccgattttttttattatgaaaaatggcaagtgcgtcctaatttgtattgggaaatgcaaaatcccttagggtcattaagtcgaatattaaataccaaatactagcctaatccgttaccgaaatgccataattatgctttattccgtttcaatatattttcttctaatttctttatttattagtattgcttatcggcttattagcattttccaattttcattacccgttctgtttcagtgatatgtcaacaataatcggcggtgcagtaataaatatttaacataattaatctaaaaaattttccgggtgtcatcattaccttggcaattatgacattcatctaacactttattaactcaaataatttaataaagccggtttaaaatttagagtgcgctaatttgtaagtgcacagtccaaagtcacacgtcacactgaaaaaaatattataatataaagttaatttaaaataatgaaataaaagcaaaacagagttacctatgttgtgctctgatggcattgtcaaattgcgcaacatttgcaccagggatggcacggaattccgatttccgacgtttttggggccggaattccgatttccgaaaaattttggtcgtcggaattccgacttccgatttccgaaatttttgatgaaagtcggaaattttcggaaattttttaaatttttttttcaaaaaaaaaaattttggtataatttctgttaataaattgaactgaaa

SEQ ID NO: 5356 - DNA, 869 bp, Heterodera glycines
cccccccgcccccgacactatttcgggggatgggggactccgagcgtttaaaaatttaaaagctaattcatccacgaaggcgggaaatattgaaaattgttgagattttgaacaaattttcttaataaaattcattaaaaattatgaaaataaggttcaaaaaaattatggcctacttttttggtcccaaaccaagatcattagatttggttgacaaagaaaaaagttatagtcaaaaaacatgtgctcgtacaaaaacagcctggcccggccgataggtgccgccgtaaaaaaaaaaaaaaattgaaaattgggagtttttggtagcattttttacataaaaatggccatttcaaagcttttttttctcaaaaccagcgaaataaaacattaatcagaaaaaaattaaaatgtttaggtgaagcctgaaaataagaaaaatcttagaaataaggacattttcagtttctaagatctggcccctccaagtaatgacaaatcttagaactaaggaataaggacacttacgaaccctgcttaatgacattatgtcataaaatttcaaaattataaatatatttaagaaatctgaacaattttcgtcgttaccccaaaatcagaacattcttataaataagaacaaatggaagccctggtttaaaggcccgcttggactcattcatactggcgctaacgaaatcggctacccgacttttggggatttgcaacttggggacccgacattagggaacccgacatttagggacccgacatttggggattttaataaaacaaaaaaaatattaaaaaagcccttgacggatttctgttctcgttggcccttggggaaggcactttaaataaaaatt

SEQ ID NO: 5357 - DNA, 286 bp, Heterodera glycines
aaagcaacacattataaaatacagataaaaaagaaaaaaaaaaatcagaatttcccccccccccccccctggatacgcccttggccccctttttggaaaatttttttttgtaaaaagtcgtgaaaagatgtttattggggttttctgggtcgggaaccaaatccaacattcatttcgactaatttcgaatcccggacctgaactcgaacaaaaaagccgaaaattcaaaattttaaaaattcacttttatgttcgtacctgtaaagaatgatagttttatgatgtt

SEQ ID NO: 5358 - DNA, 1454 bp, Heterodera glycines
aaaaaatttgcataaatttctcttattttcccatcaaaaataatttattttttataagaaaaatttgtatacctaatctaaattcattttgaacaatttctatcccggatccgaattaaaacaaaaattcttaaattgaaatagaagtaagggcacactctgagtttcagtttatctctaaatttgggcggctaacatacgaattccaaacgaaatgtgtgacctgatagagtaggagggaccaattttatgtctaaaactcatgtaaaaaactcaccataattttgacctggatttacaaagattaagcagaccgagttcaacgcgagctaaccatccgaccaaacagacgcgaaattttaccaccctccgcccccctccctacaaaaccatttcaattgaagcacagatgagcatttattaagcacaacaacaatacaattacataggcaacaattaaatatacattcatttgaagttatgatcacagaaatttacataaacatacaacaatttaaatgacgggggacaaaatgacaattttgggacggtgggatgggatcctatcatgtccatgttgtggtgacgaagcatccttccatcagaagttgtactcgattgacaagttcttgcggcgcaccatccgtctccctggaaccactcgggcttgaacacggtggcgtctgggtgcggcgtgtttgtccactccacggtcgccctcggtgccggggtcgaaggcgtcgcaggagatgcccacgttgacgaacttctttgggccgatcgtcccgtcccgttcggcgggttgatgttgatgcgctgcgccttggtggtcttgacggcgtcgccgaggcgccgcggtttggtggttttgaaggcgtagccgatgcgctccgtcccagggttgatcacctaaattttaaaacgggggttaaccgcatgccacgtgcaccatgcccaaacgcacccgcacccaggcggtccccccgttgtcgaacggcgcgttgaagacgaccttctgcgtgtgcattgttgcgatgtcttccggtggaagttgcgcattgatgtttttgtcgctgttgtcgggctggctttgtgggtgcttgatgtgtgatcgttgagaacgttgcttgaagtgttgctgctgatgagtgtggcgaaatatttaaaaatttaaagattacctactttcaaaatttttgagaaaattaaattttcaacaaacttaatgaacaacgaaaaattctcaaagaaaattgaattttcctaagaaatatttctaaaataaaaaatgtaacatataaaatttaattttccggaaaaaatcttttttggagcagctgctgacggaaaaatcgaagtgggtcgaaatgcgtattatattcgttatcactgatcagcgacttcagaaacctctaaaaaacttctttttgatgagtttaaatatttttgaattt

SEQ ID NO: 5359 - DNA, 3343 bp, Heterodera glycines
  unsure (1)..(3343): unsure at all n locations
aaaaagaattgatgaaatcatttaataatttttcaaagcaaaataggtattcaaatatgtnaaaccaaaacatttttgaaatcacctttacttggttagaattttaaaattttgcctattaaaatatttttaaaaaatcttggttttgtatgtgacacagacaaaagtcggtacgattcaaagcagcaggtcacccaatccgatttttaagcatacgggtagaacagatatgcaattgacatatgaaatatacaattgaatacaacagtttatgacgaaataggttaactaatttatcttatatgtaagtatatcatgcatccatcacatcgtcgtttcatcgtattgattatgtttattggcatcgttctactcgtctctgcttaagttcattcgatggcacttccgttcttcttctggtgctgatgaaagatcatattggcacattccgtgtcgacatcattcagcacgaatttgtgaagaataatctcgaagacggacgaacacaacaagacaatgctgagcacctttaaaagtgtttaaaattttgaaaaatgtaggaatcaaatggtaaatgtgacaacaaaacaaactcaccaaagtgatcaacggcacatttgtgtgatccgcttggaagttgacgcaagtccaaaagtccgtccaatggagcagcaatctgaaggagtacacaacagagcaaccccagcagaagatagaagcgaaggcatacgaatagatgccgatcttgaaaagaaacaaattaagcgacgcagacaaaacatattttgacaactcgtgaacacagaacctcaacactacaaaacttaaatctcaatttgatccaaaaaatcaatcggatttcaactgaaaagcaattttggtcacgattttgtcgggttgaattgatgtgggccacgtgttgcgctcgctcactttatattcttcgatagagcgcagcatttccatgatgccatagaacagaagagcaagcgagaccaatgcgctccaaaaaagttgggaaaaacgaagcagtgacattgttgaggggtttctgtgcagcatgtcaatccagcaaaaggcgtaatctgaaaaaccaaatgaaaattaattcatcgttattattggctttgcttacgggccgttatcggaatgcaatggcgtccagcgggaggcaatctcgcgaccaagaagtgaaagaattggcgtttctgttctttggttggttgtccattggtgatgttcataaagaatgaatgggttgtgccggtcgatcacatcgccgaattcgccgttttttgagtcctttccaatgagcgtatagcgttcgcaaagacgaccacagaggaaggcctgaaaatcacatcactttgatcatttgtgaaattctaatgcaattgacttttgggtcggtaaaagtgccgcagaactggtggagtgaaaggagttgccaaatgatggtcaaagtgagcacaattgcaacagtttggagcagggatggcacggaattccgatttccgacatttttggagtcggaattccgatttccgaaaaattttggacccccggaattccgctttccgaaatttttgataaaaagtcggaaattttcggaaattttttttgaattttttttcaaaaaattaacaattttttacaaattttattaataaattgcactgaaattttcaaaaatttcccggcggcgcctatcggcaccgccggaccctaaaatcttatttttcttgagaaatttttgccttaaatctttttttaattcattttagcaaatggttaaagtttcaaggtattctattaatgattccaacaatctgccgttcatcgcttttccaacattggacgatataaatttgagatggcttttttcccaaaactctgaagagattttacaatttttggcacacagcggacttgtccaaaataaatgtttatgccataattgttggaactatgtatatggctctgacaaaacgtagccaaataaaggatggatttcaagtaatttgaaaaaaaaaatcttttttaagtccttttttaagtggcactgtcaacactgtcatctatacaaatctgtgcgcgaaaaaagtttttttcacaatagtgctttgagtctcacacaaatgttcaccatcatctacatgtggattgaagactaccgaaacaaaaacgctgtcaaagaattgggcgtgtcaaatccttctatagtcaatttcttcaactattgtcgttaacaatgttcaaaacaggctaaaattggaggaaaaaacaaagtggtcgaaattgatgagtagggcttccaattatatcgaaatccatatttttttcctggactgtgggaggcctgaaacgcacgaaaagcatgtgtttgcttggtttgaagcttctaggatgactttccatatcaatattttccatatttttccatatttcgcgatttatgtccatatttccatattttggcatttttatccatattttatgtccatattctgggatttttctaaaaaacctattagaacggcccccatcagctaaattgggattttgaccccaaatcggaaaatttttgcgaaaaagacattttttatcaaaattttgtcgaaaattttgattaatgtatcgtgtttttttcttcaaaaatgatttttaatacatatctagccattcttaaaagttttactttgcatttagcgaatttgatgaaattttgagaaattatagcctatatttggaaaaatttatgtccatattttgcaattttatgtccatgttttgatattttggcaattttatgtccatattttgcgatttgttgtccatattttatggccatatttcgcgattttatatccatatttttggacgccctattgatgagacatgttggacgaaaatgaagcatcatcgaggaaaacccaaaaaggggagccaaatttggatgtttggcgccattgaacgtggtgaaggtacaaaaaactaccataaataaattaaaaaaaatttcccccctcgcgcggcgcctatcggcaccgccgaactctcttccctcacccatacccaaaaatttttcgaaaaatgcgccgaaaaaattgttaaaaatctgttttttttattctaaatgcactgaaatttagcttatgttcgacaaaattgttaaaatcttataattgattttcggaaatgtataaattttcatttctaagccgaaattgctcagaaaatagttggcggttagtaatgcttgattttgttgaataaaaagcgataaaagttttggaagcggttttaaaaatgtccctatttttgccctaaaatttatttttga

SEQ ID NO: 5360 - DNA, 1908 bp, Heterodera glycines
ttctacactgaatctcctcaaaatgcgagaccttggtctaccaagggactaataattaattgtttccatttttgaggtgtccacaaatttggtcctacatccattccgaaccttgggcctaatacgaaaaattaaacttataaaatttcgcatttttggttccaaaaccggcttagagttgaatttgtgttcgggtggtcaaccccgagagatgaaagttcacaattgcatttattttccctttgcatttgtctctttcttttcctcttattttccccactctctaattgttgtgtcttcctttattaatgtaagacactattgatttattttgtccaatgcatgtccattcccctcattcattcagttgctttttattagagaccggaccgggccgggcccggtaccggtttttaccgggcccggaaaccggaaccggtgatttttggaaaaatccggtttgaccggttttccggtttgaccggtttttgagagaccgggcccggaaaccggtcgttttttaaaatgcaacccggcccggaaaccggccttttggaccggttttgaccggttttataatcaagccaaaaatgtttctttttgttcatttttctttgaaaatgtctttttggcataatgtttttaattttttttttgtcaatgttcaagttgaattttttaattctaatgtttgcttctttataattattaaataatgtcttttttgtttagattttatgcaaatgagtcttatttggcaaattggcctatttaaaaaaacgtccaagactacagcaatttgtctcgagtgccaatcaaatgaaaagccgaaatatgaattcaagctcaccaaaggaacggtcaaaagcttgcacaccaatcttcactgctttcacgaaaactccgaattctcttaaaagctgaatgctcttgaatcgaaagctgaaaaggagaaacaaaaacagaagccaatctcagactttcagtcgtcctgcggaccgactttttcggactgtaattcagccaaattttttttaaattatttaatttttgtttcagcacaactctcctcgtttgataagaaaattcttcattttttggtgacaaaaaacatttccttcggcgcggtggatcaccaaacttttcattctttatttccccatcaaaaagtgaaaagtgaaagtttctataggtgatgagttacattaaaagttatgagaaaattacatttttgaaattttcagaaaaactgccttgccaattgtttaccaacgtgtcagacataaaatcaaagatgaattaaaagaatcagcatttattacactgacaactgattgttggagcggaagcacttgcaaccttctgtggtacattattactttgtttattaatcatcatgggttttactgcagcctaaccgcgcactcaatttctaaatggaagtctatgtcacgtgttttggcaattacggaattttctgaatcgcgctcaaaattgaggatttattgctcaaatggggtattcctaaggaacgtgtgcattcaattatctcggattcagcagccaatatgaaaagagtgataatctaattaattttctttacacttgctcttatttgcaggcatttgttgagagggatgaaaatgaaaatcgaattttgccgatgccaaacggaccttgcgctgctcatttattgaatttggctgtacaggaggcgttgaagagagatgaatcaatcagcagtttattggccaaaactcgtcatattgttggccgtttcaagcacagtaacactgccttcagcgaattgaaaaaaattcaaaaattactcgatgccccttctcatactctttgcaaggttaaatgttaattagaattcacttaattttatttatttctaatgtcatt

SEQ ID NO: 5361 - DNA, 998 bp, Heterodera glycines
tttttttagatttaacttagaaaatttttcgaaaaaacttttgacaaaaattttttataagaaaatttcaaaatgaaaaaaaatctcagctttttttgggaaaattttgaaaaaagataacctatcgtaaaaagttttcaaaaattgctaaaaaatgaattctcaaaaaaaaattctaaattttcatcaatcattgaaattgctggatatagggacggacatacattggtagaattgaagaatggcattgaaccacccacttgtccactgggaaagttggtttctgattaaaaatattaggagcaccgggcgagagtcgaacccacgcctcgggatgggtgggcaaccaattctccactgaactacgctaatttttgattttttgtaagccactaaattttaattttagacggcggtgcaaaagtttgccaatggcacagtgttggcgaacagcgactggcgcaaggggacggagagtgagccggcgggctactaattaggacacgcatacactaattaatttatgccaattatttatgtcgttttctttttagctaatacttatgttgtttcatacttttgagagaatttcaattttttagatttttcatacatataaaagaattttactttttaaatttgttgttttgttactcacgcccgttcccttcccctaattgccctcataatttgtattgattgctgcaataaaattgaataagggtcaagtcaaagtgagtgtgtgtgagactcccgttttaaatatttgtcgaacatttaatccttttggtcaattgttttatattagagtgccacgggaccgggaatttttgccaaaaccgggacttgccgggacctgagaagccgggaccgggacctcgatttttcttcgggaccgcgaaccgggaccaaccgggaaattttaaaaattcaaaaaaatttaaaaaaaatttaattttaatttatttcaattgaaaataatacaaaattaaattaat

SEQ ID NO: 5362 - DNA, 950 bp, Heterodera glycines
tgagcgagaaggcgcgacgttacgacgacatggtggaggccatgaaaaaggtggcctcgaaaatttctaaaaaaattttttgaaacccccctaatgttttttttccattttagctgatcaagttggacccaaatctgaccctggaggagcgcatttcgttgtcaacggcttacaaaggtgcgatggcttctcgtcgtacgtcctggcgtgctttggtctccatcgaggaacggaccggcgcgagtttgagcgatgcacaacaacaggtggcatcatttggccacaaattctgatcaaaattggcccaataatttcccccaaacaattttcaggtgttggagaactatcgtgagaaggtgcagaatgaactggtgaacacttgccaagaacttttggtgagtttctccgttttccaccgattttttccaaatttttaatttccccaatttccaatttagacatgcatcaacgaagtgctgtttccgaaggcgtccgacgtggagcagaaggtgttctatctgaagatgaaagccgactactaccgttacatttccgaagtcgcgacggacgaagaccgatccggtgggatttgagaggatttgtgcccgattttcaggcattttgtgatttgtgtgattcctcaatcaactaaccatcctctgttttttacaggtgttgtcgaactcgccaaagttgcctaccaggaagcgattgacatggccggcgacaaaatcccagcgaccaatccgactcggcttggccttgcgctcaacttcgccgtgttcaactacgagatcttaaattcggtgaccgaggcacgcaaagtgatccaaactgtgagtttcctatttgaattttcatgtttccttttcatggccaaatcccccggcttttcacaggctctcgacttggccaatgcgcatatcgccacacttacgcagccgctgtct

SEQ ID NO: 5363 - DNA, 3567 bp, Heterodera glycines
aggatccagttttatccactttttatgccatatacaataggtaatcagtttcacaaatgtcacgttcatttggagccaattccgagccttgattgagtgaaacctccattttaaatattttccggatatttgaattacatttttcccactcattttggctaaactttgaatttgtgattggacccgccgactaaacaaatgtgatctttgtcccacttggccgccgtccactttaaatttcttttggccaagagcgattaatccattcgttttgtgtcaaatgctcagttggccaattctctttgaattttcagttgaatttgtccttaaattcgtcaccatttgccaatcaactcgaggccaaatgttccgccattcattgagttttgctcagaatttccccccccccccctccccttagtttaagcacaaataatttgaaaattggacttggccaaatgcccattaattcatccatcctttaaaaattccgtgtttccttcctctaatagagcctccggcagcttcggttttttaagcaaacacatcgaacggggcttctaatagagggctggaggggcttttattagagggcttgtggtccctcaaattaatcgtttccacacggttaatcaagctttgagtgttctacttcatcttcctcgtagggggggggggggctttattcgggggcgggggttataatagagggaaatacagctaaaaattacatctttattgactgatatgtaattatgatgattgagttgaattgttggtgatcagtcctcgacaacgttccccgatcggcgcggagggcgaccgtttgtttacttttctttttggccctcccgcgcccaatccgtccatttccctcaacaacttccaacaattcccgtcgtgttcctcatccttctctcttcttctgctgcaaaaaagaattgatcacccctcaaacaacatcaaattggatggcgccacttttgctaatataatagcccaaaataattaattaattaggggaacaaagacaattaattagtgagtgccctctgttctgagaagagaatttcgaactcaagacccaacccgagcaacgattctcgctttttgggtctcggatattctggctttttgtggtctcgactttagagaaaagcccggaattttttttttgtggtttctgtctttggctcgatccgcaaaatttttaattcaaatctcgactcaaaaatggctaaaaattatgtgttatacaaaatattatttatttatagtggcgaagaaaaaaaagagaaatttaaatttaatttcttcggcaaatttttgtcggttcgattggacagcaaaagtgccgaaaaatgattaagcgacgcatcaaaaggcgaacaccgacagtggtgatcatcacttgtacagtcagagtggtcagtgcctgaggggattgagttggggcacaattagggagggatatagaagcgattctcgacctcgaatttgtcgatttttgggaatctctggggtcacattggtctcgataaaaagtgttggcgatgagaaccaataaatctctctaatccccctcccccatttttattggataacaaaaaatggaagccgaaatttaaaaaatgtaaaaatgcaattttaaaataaaagtgaaattccgccgcccaatttttgtgctaaaatttggcatggatcagctcaattttgtgcgagttggccttttctttttgaatgtaaaaatgggataagaaataaaagaatttttgggattttaatttttttttggggatcaaatgacaacaaatttttgaatggatttcgagggggcggagaaaggctttttgtgttacttttggtgcacttttttgatcggaaatgggagaagggatggatcaaaatgggatttgggaagggattttgctgcttttcaatgggtcgggggccgaggttcaatttcaattttaaaacaaatcccgccaaaaaaaaaaacagatttcggtgccgtgtgccgccggtggtgcgcaaaagtcaacaaaagtggcggcggtggcggcaaaatgcgccgacgcccgggtggcggaaaatgaggcggcaacggcagatgaaaagcggcggcggctgcttcaaatgatggcggtgacgaatgtgaagacggaaaaaatgcgggaaaaattggcgccgcaaaaattgggagcaattagcaacggaaagtacagtatgacgacggacgacaagggcggcggcaactacaatacaccaccgtacagtagtactctcaagaacaacagtaacaacagtgacagtaataattgtcgtaaagacaacggtggtggtgcctcaggattgaaaaaccagcagaatcccggcatcggttggatctgattttgtcgcgcattcattaacaagaaaatgccaaactgagtcccgcgtttctcgggactcgagagtgggaccaaaaactcgcgacccaaaaagcccgagactcatttcgatcaaaatccttggcctcattaagcgcaaaatgtgcgccttacgctggacaaaatgcgccaaaaagaggcgcaagcgctgcgcgagcgctccaccgatgtgtacgccaaggattatgtgccaaaaaaatatgcaaagaattcggcggagtacggtcgaccggtcggcggttaccgtaaaacaagaatttatgattgttttttagccgccagggtcgctgacggaaatgagggcgaacaaagcgtgtaagttttgtggtgatcactgatcaagtatttgtgtgcctacatccttaaaaatttcggcaagcggaaaggcattccgacgacccaaaaattcggaaatcgaaccgtaattacgaaaaatgtcgggaactcgtaaatcggcattccgaccgcccaaaaaaatgtcggaaaacggcattccgacattttcatggtggtgatgtgctaatgggaaaacgccactttttcgaggctgcaaattgagattccaacgggacttcagggagctttaaaaaattacaaaaatcgggaattttccatttcagcgatactcgagaccaggtcctccaaaaattcgagatttttctcgactcttagaccccgatattctcgtgccaaatggcactcttaaaaaatcggcaatttgttttggtgccattgttcagcgcggcacgttgcgcgcgagatgctccaactgtgcgaggtcattgaggagcatggacatcgccggagggcacggaccaacaacagcagcaacaatgagccaaatcgtgtggtcatttcgtttggcgccctgttcaacatctaccagttcatctcggacaaagtgagacatttggtgccacggaaggggcgggggacattttgtccccggacaattggtcccttagccacggaaggtgggacgaatagtccgagggagacaaaaatgaaacacaagcaaaaatatatgccaaaactctgaaattatgtttttatgtgccaaaaaccatcgaaagtaacggcgatgccaaatttcgcggtcaagtaaagattgaaatctcgagcatggaataattaggag

SEQ ID NO: 5364 - DNA, 4500 bp, Heterodera glycines
cagcgcggcacgttgcgcgcgagatgctccactgtgcgaggtcattgaggagcatggacatcgccggagggcacggaccaacaacagcaacaatagtgagccgagccgcgtggtcatttcgtttggcaccctgttcaacatctaccagttcatctcggacaaagtgagacatttggtgccacggaaggggcgggggacattttgtccccggacaattggtcccttagccacggaaggtgggacgaatagtccgagggagacaaaaatgaaacacaagcaaaaatatatgccaaaactctgaaattatgtttttatgtgccaaaaaccatcgaaagtctcggcgatgccaaatttcgcggtctcgtaaagattgaaatctcgagcattggaattaattaggagattttcttattaaatatttacccattttaacatcacaccccctcgcatccctataaaatttgttttttttctcccctaaatttacatgcctttttttgtgctaaaaaaaatccacaaaagatgtgctaaaacccctccaaaaaatgccaaaagtgctgaaaactggacgaaaaatgccacaaattcttcaaacaatgccactttccaccaaaaaattcataaattgtacttcaaaattgttctcctgcttacaataaatccacacacataaaaagagttttcttttttttgccaaaaaattttccggtgtcaaaatatcgaaacatttcggtgccattctttcaaagatgccaatttttttgacaggtggttggcatgctgttacgtgcccgaaagcatgggatggtcgactttgaaggcgaaatgcttttccagcggagggacgaagcaaaattgatcactttgctgatcagccacgaacaaattcagcaagcattgagcgaaattgagaaatgatacaattaaaaatttttatggcgcaataaaatggcggaaaaatcgagaaaataattttttgtgccttttctgcaatgccattttcatgtattttttaacttttttcatgcctaaaaaaattcgtgccaaaagtccgcacttaaaaaaaacaatgttcaagattttagtcatttttcgtcttttaaatttaaaatatttcaacaaaataaaaaaaacaaaaaaaattatttttttattttttcaaagccttcaattttttgtgctccgattcttggacttccaaacactgcataattcgtttcgtcttctcgtccctctcccgtcgcactttgcgctgtcgctcggcgtacgcactaaaatttacaaaaaaaaatttttttttttgcatttggctcagtggtctgtgcgcttggcgccatcaaaaatgtgttaaaagttcaatccccagtgcacgcagaaatgtttttttttatttttttcaaattgaattgttgcaagttctcttaattcaatcaagttttgttgtcgaaaaagcgatttttattttctaaatttattcatgtgttttaaaaaaaaactaaagttttatacaaaaaaattttccaggtaaattgatcattttctcatgaaaaaattagtattttaaaattcaacaaatttttttgcggggaataaaaaatcaaaattaatttttttttatttcgaaaattaaaaaattatcacccatttcttatgaatgccgcccctttttcccccactcacttggccattcccttggcgccttttcgcaattctttgagtgccccgcgccgttcatttttggcacgctttgcccaactcttttctcgcgccttcatgccgttgctgtcgttgtttttgttgtttcgcctttccgggtcaaaccgttcgtcaaagcgcggctccaacattttaatggcactaaatttggaagggaagaaaattttagtgggagagaaaggggcgcactttttgaaaaatgaagaaattgaaaaagtttttttttttaatttccgttggaattttttctgtcgttctcaaaaagtttattttaaaaaaaattaaaaggaaaatgaccgaatccatggaatttcgtagcgattttcaacggatggtattcttaaaaaattaaaataaataatttttgccaattttttaggcaaaattttgtgtaaaatttcgaatgtcgaaataatcggggcacatccgaaaaatttatgcttatttaacggattttgctattgaataaagccaaattttcaaaaaatttacaaggaaattacgtcaaagctttaaaaaatttaataaaaaattagccccaattttcaaacaaattttggaggagttaaaaaatgccatcccctcggggcaatggacttggaaacccctacccttacccacctgttggttgttgttgttgtgccccttttgctgatgcgtttcatttgcatgactcgcccattctgtgccatcagtttggccaacagttgggtgagtcgtgccgcttcgtccgccaattgggccgggtaattggccacgggcaaatggagacaaatgcgatggaacggactgaaaattgggggtggaaatcgtacatgaagaaattattgtaaactcgcttcgatattgaatttttatttgatggggtatggctgtcaaaaaaaacggtggttccaatgatttttttaaaaagacacaaatttttggaattttgctgaaaagtacaaaaaaaaaaataaggcaatcggtccatcaaattccgaaaatttcattaatttttaaacgttggattgaattaaacaaatacagttttcacgagaaatgaaaaaatggttaacaataagcatattaaagtctaaaaaaatgggacataatgtccaaaaacaaattgtccattttttcctcaaaattctacggattggaggcattagggaagcaggaattttcataaaaaattaaataaatttcaaaaaatcagcaattaggatggatccgacgacccaaatcctaaaaagaacgtacccaaaacaggcattgaacgcgggacacattgtgccgccgtcgtttgtcggttggtccccggcggcggcgacactttcgtcggcggcggtggtggtgccgtatttgcgcgcgtattggccaattgtggcgaacagtgcgcgaacggtggccaatcggagacggcatttgtcctcgtctgtgctggtggcaccaccaccattctcttcctcatccaaaatgccaccattttccgtctccaaatcgccaatgtttgggtggaaaatttgtccaagtgacaaattaccaaaagtgccggttgttgatgttgttgttgactccttaataaaattgatggaccgtgaaaaggaaataaatttaatttttttttaaaaacttttttgtgtcaaaggcaaaaaaaattttttttttttttttttgctaaaaccttgaatttcaataggttgacatcgaaaatagctattacgagtcgttccaggtaaaaatttattttttcaaaaaaatgccatgatgaaattggaacagcatcagtcaatttgttggcataaatatggaaccaaatcgctgtgcccataaaataaccaacctttggcgcgacaaaaagcatttggcgatggggcagcgaaattgggaaattcatcgacggaaatggcacttctttcgcctcatttttgctctcacagcacagctgaagagcgcccaacaaaaaggccaacacttcggggaagaaacgaggcctaaatttttagaaaattgggaaattttgaaaaaaaaatgacgaaaacggcggcagcgacagaccgacgacaaaaccaatcgcacatttgggcacacagaaaaatcagacgagcgcattggtcaaccgagcaaatgcgagtgctgaaaatgagaaaatttgaagggggggggggaataatggacccaaaaaaggcaattgttgaagaaaaaattcagtggatggattttatttcgcaataaataatctttcgagaaatttgtcgtgaaaaaataaaatttttccaaaaaatgaaaaattcaaacccctgaattttttaaaatattgatgaaaaaacgcactttccgaccagttcagaagcaaatgcaattgtgggcgtaagaattggatggaaacgcgcttctgacgggaaaagtttggcaaccaattgcaaaaaagtgacctaaaaagagcaaaatattgcaaataaaagtgcaaaaaacattgaatgacctgcacaaaggacggagacgaagccaatcgggcactttttgagtgcaaaaaatcggcacgaaactcgctcaatttgtccaaaatgtgccgaggcccactgaccgaacatttctgaacagaatttggcacaaatattgtaaaaatttagtccaaattcaaatccaacgacccggaatggactaatagtgacgaaaaattcaaaaaaaaaaaaaaaaaatttttttgaaaaattttgagagtaaatcgttacaaaaacagttccactcccataatttaagggaaaatcttaaaaataataagcccccaacaaacctcca

SEQ ID NO: 5365 - DNA, 5428 bp, Heterodera glycines
  unsure (1)..(5428): unsure at all n locations
tagaattntaaatttcctaatttaaaatttgtgnaatttataattaactccaaacacaacaaaaagtcaacaaacatntaatagttttgaaaaacacaatatcatagcattggctcaccacacgactacgatatagaaatacagtatcacatattcttcacttttatgtccctacttcttcctcttcttctctaatcattcccatattttcaatcgcttcatatgctttaatgcttatcatccgatcatttctgagtgattgcatttgttttaaaaggtcgctaatgtaattgatcacttcttgaatatcataatcaaccttttcgccattaaaaagtttgctgattaattgatctaaaacgtttttacggagttgatcaatcgtcgtttggctaattccttcccgaatattttgttcagtgagaaattcgtccagatcaatgccaatgatgtttaattgatcaaacaaaactcttatttcaccaacactttcatgtaaatttacgagatattgatcaattacttctttagcttgattggaattaaattcatttgcatgctttttgttgttaataatttgtaaaagtattccaattgggtctatgtacaaatttgggccaaaatttgacggcccactgaacattgggttaaaagttgatgactgaaaaagaatacaaattaattttgaatcttaagaaaataattattatttaataaaatgaaaaatataatttttttagcaaaagtatgagaaaatttgatttgatgcacaaaatattgtgatcaattctcaattctataactattaagattaatctgctaaaatcacatccaaatttcttaccagcactaaatttgcttccatcatacagagaggacagcaaatcttgttttgtgcaaacctaaaagtaatttaaaaaaataaaaattaaaaaaaaaataaattttaaccaatttttgatgcattcattgtggaatttatgctaaattaaaagtaattaaagtaattaattaacgacaaaacaaccgttattttgccctttccgtcattatgaatttctgtaatttgttcatttttatattccattgcttctaaacatattgaacaaatttcttcttcacgcttcttctttatctctcttttattcgttttatttgcaaaaatattctaaaagttaaatttatgaatgaattcaaaaatttaatttaaaattttgggttttaacctcgaattgataaatttttaattcaacattctcaataagttccgtctcttccataatgcttttatagaacagactatgtttgattggaaatgacaattgatattcgttaaactgaaatttaaaatgaattgcaaaattaaaatcattattttaatgaagccctcatttatttttcgaaaccaaaaacccagaattgtcttctttttgccatgagggtttttgatctcgtgtgccgggcttttggctttttgcccatgcattttggttggaacaccaatattgggatgggaaatttcgggacatggtttatcgtagggttaagccctgaccccgagctgcccgactcagctccaccgacatttttgggctttctgcccgagcccaggtctccggcctgcccttcccctcgctcctcgagaatttcttccccgagcggcggggcttaaccataattttcggagcaagaattgggacggggttgaccatcggccgggggtttttcaatttttgccttatgccaaacaatgaaaaaaaatttccgataattactagggatgcgatttttaattttttttaactattttttttttttgctcaattttttgtgaagaaaggagcgcaaaaaactcatttctgcgttgaaaattttcgattctgatgacactatcagtcactagaaatcattattagggcgctttgtccttaaaatagttaaagttcattattttggcgttttgccactattttttaactatttggatatttttgggaaattactttacaaaaatgcaatgaaaccaaaaaatgcacccctaaaaataaaaacaaaaaaatttcaaaaaatacccctaagaaacggcctaaaaattttttaaaaatacacccctaagaattgaaaaattttctctaaattcctctgcctaatcttttttgacgaaattatcaatttaaataatgtaaataattgctaagaaaatattagaaatgaaatgtacctaatttgcaactgcaattagttaataaaaattatttttgctcaattttttgctaaaaatatatcactcttgacttttagccattattttgtcactattttggactctgtcaattttttcgtcactaaagtcgcattcctaataattacttataaatttaacctcattcagttttaggtctatcgctggttcattttggtcataaactttctccaattttgcgtatcccaaaagcattttctcctcggagttctcagttcgaccgattttgatcgtattggcatacaaaagggcatggtaagtcccgtgatcatttttctgatcaaccatcagtttccgattccaataaaggccgggcggatcaatgcgacccaaattgatcacatatctttttgatgggtttggccaaatcactgccatggtcaaatagcgtcgtaacagccatccttccggtgccatttttactcgcgcatggccaatgagtggaacttcatcacggccaaatggctttatgaaaatgtaaaattgcagatcaaccttttcaatgccttcttccttggcattgtgttgctgatcaatttcgagttcaatgttttgtccattttttatggttttcgctccttcaaattttttgcttttgtaaaaatattccaagtcaaaaattctttcgcgtttttccttcatcgtctcgtaaataacgcgaatttttaatttttctgaacatgtttctttcgtcaaatataaaattaatggaagaaagacacaaaatttgttcaaaaataacataagtaataataaataatcagcgttttaattaagggacataaattacaaaaaaaaagtaaaaaaaaatcctaaaaagaaaataaatatttaagaaaactaatcgctattatattcactttctttttctggagaaacacaaaggaaattcaattatattgattaaaacatatctgattttatatttctattaattctatgtaaaatttattacaaaaaatttaaaattttattactaataaaataaagtaatgcaatttaaataaaagtaggcggcatttcacatattttctagtattcaaatctataataagctctatattgtttactataaagcatctaatttttgtctcatgtgttctctattgaaggtctatagtctcgctgtcaagtctcgactcgacaaaatgctcgtctatcttggtctcgatccctagtgtctttatcttatattttattttaatattatttggcaggtctctctccaattttccagatttccgtttatctttcggtgaaaaaaatttaaatttaataattcgaaaaaacccattaaattctgaaaaaaatttccccccacgacatccggccacgccttctttgtgcaacctttataatctcgaatgatttggcccaaaatattgaccagttcttccaatgcagagattttctcggcaaatgacaattttttgttaaatttttgcaaataattccgaattcttgcacaattttctttgtcttcaattgattctaaaatttgtcggaaaattttgaattcattcgaattcgaaatgcgccgttgcccttttgtttgaatttggccttttgtaacggtgtccaattgggaatgaacgatttgttgcaatgcttcaccaaattggatcactgcttaacagttggaaaacggttgtaatcaattaatggaataaataagagagaactgaaaatttgattgattctttgtgaattttcggatttattttaaaatattcggaaaatttgtgacttaatgaatttgtgagtgtttgcttaattatacttagaccaaagaaatccattgtattttaaattttttacgggtttttaaaaaagcacaatgaaatttaggctcgaaacttatgtcaaactctagataatattttaagtctttcccaaatttcatttaaaagcatatttcgttaaaagaatcacacatttctcttctgatggaggagactaagcaaattggtaatttcataataattattatgtaaggccgggaccggaaatggcctttacccttcccccccccattttatctctccgatagggctcctcccatcccgaggggcgcttaaaaggcaacggataaccagccaaaggggacaatcggagttcagtcggaagtcattcagtggaatggctaatcgatccccgcctgggaggcgcccccaggtatccatcaacatcccttcccttccaagccctgcggggcctaattacggacgcgtaagagggctcccctggactatttccctcataagcactgggtatgggacttcacggctttactggtagcaccggatggttccctccctatgcttacagggcttgggccatgggaagagggggatcagagtggcagaccgacttttcaggggatgtctttgtgttgcgcaagtcgccaatcaattttagagtcctgatcaggccccagcaaccccctgggaatcaaaaaaattttttcaaaaattatcccacgcgtggttcgataatgatttacagagaaacaaaaaaaaatactcaatcatggtttgaattatctgcagcagcagtcaaaaaaaaaaaaaatcaaaaattccatgcatggtttcagaaaagtctaagttgaaaaaaaatcaaaattccatgcaaatgatttcggaaatttacactcaaaaaaaaaagtcatcccacacgtggtccaaaaatttatctgagtgagtcaaaaaggacccttaaaaaagagggggagagagacactgtgaataataaacacataaattagtcattttctcaacgccttaaaaggggaaatttaattaatcccggtaaaataaagaagaaaaaaaaataaggttacggatgcattaattagacattttaaagcgccttaaaaataaaggaaaatttaatgaaccccgcggggtctggaaagaatgtgtcctactcttctcaccgcaaatcaaatcttctcaattttagtcggaaagtccattaaccctgaggggatcaattaatttgaaatacgataattataaataaataatagcaattaaattgaaaagctataaaatcaaagacaaataaaattaattgaaaagagggaaaggggaattgaaaatgcaaatcatgtgcatccagcacacatatttagttatgtaaatttgcgtctcataaaataag

SEQ ID NO: 5366 - DNA, 3314 bp, Heterodera glycines
ccatataagagcccataatatggtttgtgattaggaatataactacctctcaacaattttatattaattttcattaaagtaaatttatgatttaaactaattttaacaaaaatctttttaattgtaacacttttatcaaattgagggaggtccataattcatttttttgcatgaatttattttcattgaaaagtttgtgcagaagaaaccgacgttatcatttttttcttcaaaaatatttttttcttcactttatcaatgttttcgtttttatggggacattaaagttctgcacattttcaatagcacttttgtattaagtacatacttaaattgttgtgaataagatggaaaaaatcatcattaagaaactaaaatttttttatatttaaaaaaaattcaattttatttgttgaatttatttttgaagaaaattgtaccgcacttttcatttcaaattagcacataatggagaagtctcggctgctttatgttgtgctgtttcacaccgttttcgcatcttttggcgaaattgaagctaatttgctcaattacttaactgtgccggtgcgacagttttttgccgactcacttttgcaacggtacggtattgtcccgtacagtagccagtttgagtttgtctactccatggtggccagcattttcttcatcggtgctatttttggcggcgcaattatgggcccatgcatggagcactttggacgcagagcaaccgcagtttacctacggtaatatgaggcatcacccaaagcctataaaatactgtaagccacaaaactctattgaaccaaataaccgaataccaaaaccaataaaaaatatattattaagctttcaataatttaaaaatgaattatagctcatttttgggcgctctttctgccatttgtatgctgttgtccaaatggcttacaattgttgagctgtttgccattggtcattttattgccgggataattgcggcatggaaaattgccatgatcatctacttggctgagtgtgctccggaccattcgcggggtatttatttagtgaaaatttatcaaagaattttttgaaatattaggataattaatgaaaaattatttaactttaccttggcaatttaaattatatttaattttaaattaattttggttttttattttgcagaataaagtatgcaaaatatttttaatattatatattttttcaatttaatttttcaacattatttctatttagtttttttcattttatttttgaagttttttatgcgtttttttgctgttattttaacttttacatattctgcaggttggtcgacaagcctcattggctctggctcaacattggcacttttgttcatggcttcgctgtgtttgccttccgtctttggcactgcccaactgtggtggcttttgccggcatttgcattgcttttgtccacctttcatttgtgcttcgctgcacattttcctgaatcgccaaagcatttgttctgcggtgatcgtcgaaataaaacaggcggaaattgccatgagcgtgccaaattatcaattaaggtaattaaatatgaaattattagtctaaattaattttaatgtttttctacttagttttatcacggatcggcaacagatgtttttaaagtgatgaaccaatttgagcaggaacagcagttgttggccagccgggagcactttagatggagtgatttttggaaaattcccgagctaaggtatttgggaatttaaaaaaacctttggaccagatttagcagaaaatggtaatttttaggaatttttgggattatgaaaaattgtcatttcttaaatccatcactatgtgcatcatcgacaaaaaaactttgacaactttaccaaaaagccccaaattttttgtaaattggatttcgaccccaaagtttcggaaatctcaaataagaaataggaaatgggtatttcgttaagtcccaaatatgtacgcatttgaaactctattaaaaaattcattttttctcttttttgattcagacattcattgttcatcacattgctcacctcttgggtatttgctttttcgctgagtaacctaaagagccaatatttggaatcaatgctaatgcgctatggcttgactcaaacgggtgcaatgatttcaactatggtaaaaaaggaaaaaatcaaacgaatattttttatattttactaaaatttgatttatttttattacaattatactcattaattaaaattaagatactttggcgctaaatcttattaatataattattaaaatataaccccgttaataattaaataaatcaaaattttatttaaaaaaccagtaaaaggatttatccaaaaactcccaaaatatgtgctaaaaactcaaaaagagaaaatctctgccaaaaattgcaataaaaaactcaataaattcgagattttctcaaaaaaaatctcattaattatctatttagtttgctagcacgcaaatcaaattcattccagtgcatttaggtgtaaagcttcagggaactttgaaatccaatgtcaaattaaagattttggtcacttttgccaatgatttaaatggtaaaaagcaatggaaaaaaaaatcatttttttcagaaatttccaaaatatgtgccaaaacaacccaaaaatgtttttgtgagccaaaagtcccaaaaatatgttgttttttatgtgtgctcaaaactagctataattaaaagaaaatttgagcttttcatgtaaaaaatatatattcgcaaaaaaattatataagaacacagaaatcactgattataatttaatttcaggcgatgattgcagtgacagctccatgctgttttctgtcaccggtgttgatcgaacggtggggacgccgcccactatttttgctggtcacatcgttctccgtcgctgagttggcactgatcactggtgctcagtttgccagcgaccaaacggcgtctggtggcagcgctgcgacagcggcactggcactgatcggcttcacattgggccaatccagcgccaaccttggcattttgtatatgacgccaattctggtcggcgaattgattccgcacgctgctcggtcagcaacgattcaggtgcatcttatggctgagtaaagttaaatctcgaccccgagcttcccgctccgcgtcagtgatgccgcgggttgagaaaaatttcggggtcgggtttcgggttgaaagaaacctcgggtttcgggttcgggttggcatcacccctgggagagaaaaaatcagatttttaccaatatattttacggcg

SEQ ID NO: 5367 - DNA, 1356 bp, Heterodera glycines
tgtgatttgttaacagatttatccacaaaaatggctaaaattttattgatgaaacagtcaaaataataaacacaaaaatatttacccaaaaaaaaactccgaccatcagattaaaagtaatagcataatttttagcctaaaatgatcccaaaattcaagtatttgagctaatgaaataagagtccaaatcttttattccaataatctctttttattttcaaataaattttaaaatttgttatttaaaattgccttaatcaggtcaatttgctgtttgcttcgcctctgttcattttcattgtgatcgcttatccgccactgatcggcacttggggtgcccttttctttatgccaatggcactgatcagtgccgtacttttgtttttgctttatcggtggatgcccgagacaaaaggcttatcagtgaacacaattttcctgagaatggccaagttgggactgttaaacagcagcagtgagggaagcactacaagcataaatggtgatgatgaggatgaagaaactgaagcattaattttaaaaaattaaaattaatttgtttaattttgaacaaaaagttgtattaaaactcatttgtattttaattcatatttaataaagaaacaattatgcaaatattaatttggattaaaaatgaaaaagttttcttcccctcttattttggataaaagagtttccaattttttataatagtaaaagcaaaataaaacaaaaaaaaatggtgctagatcgtttcataaatccgccaaggggtaggaaaacaaaaaatgtaagacatataaattataacttggctcaaaattcgaccaaattaaatatatcatgtaattattgaatagcttaagtgatctcaatcagaatattaatttaaaatttttttttacaaaattataaaaaagttatggtcataaaatagcaataagttttgtgtcagaattttttgtccattaaattttaatctttaatagattatacagaggagttgaaattctaatataaatggaaaattggtaatttttagcgattgtgaatgataaattcaaattttcggtcagtgatcaacggcttatttgttagttgaaaaacgaatttgaaacatagttattgaatttttcaagtctgatctgtgattttcattaaaaaaattgaaattcattttttatgcttttttggcatttatgtgaatgataattagggctgggaattatatggaaatccatatttttccccggactgtggagggcctgaaacgcacgaaaaacaatgtttttaacttggtttgaagcttctaggatgaatttctatatccctatttcccatatttttccatatttc

SEQ ID NO: 5368 - DNA, 2121 bp, Heterodera glycines
cttttcaattaattaaatatgggtttattttatgatttatgttttgtttcagtgtcccaaaaatgagcagcccggccaattgagttgcaacagatgtgagccgagttgtgaccatcggaacccgaagtattgcacaatgaaattttgttattgctcatgcgattgtggggagggattgttgcgcgacaaaacgacgaataaatgcgtgccaaaagaaaagtgtccactcaaaaagaatcgaaagtggcaaatgatggagaactgatgggacttcaattttccaagtaaaagttcaacttttaagtttttgatgggctcatttatcgagatcacataatttttcattcattttataatagcattctttgatattcattttgataaaaaaaaaattgggtttttgttttgcatttaaaaatatataacattcaaaattaattacgaatgaaaatttaatgtttaattgatttaaatttgcaaaagaagtaataaataattgatattaatttgtatgggtcttagttaataatctttccttaattattttcttgaaaagcgtgctatcagaatattaatattaaaaatttggttctgttcggttttatgcgtcccatgaatgactatcttctgtttcttaggacataacttttttcttacttggtcaatgcctatattcttggtatcaaacaatagtttaagtctacagcagcttttgattataagctttcataaacatacattaaaaatataaatttagtaaatcccattaaattttaaataaaacccgcatcattgattttctttgccagctaattaaatcactcacattaaattggaaattattattccaaagcaaaagattagcaaatctgcgtgttcaatttccaattattaaaaaatgattttgtccaattttgacattaatatgaaaatgaatcattaaaattggcattttagccaaaaattattagtttattaataatcacattttacaaaaggtcttttttgtccaaatgacaacacaatttcattaataaaatgaaccttttttgtctgtgtgggcggcttccacaaaaatttgtgtgacttttgaacttcaatgaatgaattctttataaattgtaagtgaagcatggaccgtatgacacttatattctaagaattttttttatttaataaaaaaaaaatttaactgacttttttgcatcaaaaatcatatttatattagatttaaattttgtcaacatgcttttatatttatttttatatttatgtctacattattccgtttttggagacgggtaagaaaactaatcaaaaactttgtcctacgaacgcatttttgacaaatgaaaatataaaatttgtttaagtaattttccaaaaatggaaaatatttattaatttttaattaaaaattttggaataatgagaaagttttaaccctccgtgagaaccttatttctaacaagccagaagggcatgaggtatttttttgcattttattaaaggtttttttttagcctatgtttaaaaaaagtttggggttttggtcttttaattctttttttaaaaaaataaaaaaataataataattagaaaaaaaaattaaatttaaaaaaaattaaaaaattccaactgattcaaagaaaaaatctataatatttaaaagaccctgggatagggtgatttgccgaaaaaatgcaaaatgtaaaacataattccagtccgccgccgcacattttcccggcaccatcgaaatgtgaaagtgggactttgtttgcgccatcgttttgttcatcgcatttcttctatttgtgctcaaatggacaaccgatcagaatgaaatgtccggcagaccttgtgtttgaccaactgatttctgtgtgcaactacaaaaatgcatgcggcaaaaggcaacaaccgtatgcttcttgtggaagaattacgatattttgaaaaattattaaacaaatttcagttctgattcacctataccattaccggctccgcatccaccgccgcctccaccaccaccgccacagtctcagccactaccacctccgcctccaccgcccccgccacagtatcagccaccgcctcagccaccaccgcctccgc

SEQ ID NO: 5369 - DNA, 1917 bp, Heterodera glycines
cttcttctgcacatacagcatgatcgtttctaccgtttcctggtcagattgaaaacgggcctctcccttcccatgcttttccatgaatttcgcgtgcgcacgaccgtattccgtggcccagcgacaccatgcggcccatgcaccgtatttaacttttgctttctcagattgtggggcgggcacagctttgacaatgccagtgaacggtggcggcaatttgtactgggtggtgcccatcagcttgtgcaggtacaccttggcaaggacgggggcacttttttatgaactctttttaggtagcaaaacacgaaattttaaagtttttcaaccaaaaatttttcaaaaatatattaaattttgggaaaatttttcaattaggggtgtattttcaatttgttttttttgttaaggattttttcgaaagccctgaatccatgcttatcagtgcgtatcaagtgcgcagaaatttttggcatttgcctaaaaatggagtccctatttattattgatttacatgttttcttgagccataatacctgccaaaaaaattacaaaacttttttcactctcagttcctgtcccagcagggtccttagtcgactgcctatttttttttgtttgctgaaacacaaaaaccgtttgcatttggatactgtacctctttacggatattgggcagcacttctttgttgagataatattcaacttttttccaatcatagtttttaatgatctgttttcccgctttttgccaccgttttttcggcgtttggttactgtgtccactactgtcagtgtggctttcataattttctgtgtcagtaaatgaagctgttgaggagctgtcttcgctgtccagcaatgggaaattttgctcatcatcagatgctttaaatggaaaattttttttaaaatattacaaaaaaaagagaaaacatttggaaattttcatattttttatttgtaataccgagacttgacccttagactcaagacaaagactcccaaaagatccgtgatttttctcgggccgagacttgacctttgatactcgagaccaaaacagcaacgagaccatgactaggcaccatcgagagcaaaactcgactcgagaccgagactaggccccgagatttgatttcctaaagtcgagaccaagacccaaaagacccgtaatttttcttgagccgagacccgacttttgaccgagacttgacccatagagtctagaccaatactccaaagaaccagtaaatttttttcaagccgtgactctcgagtctgagggaattaagcatcactaatatttaccataatctccggcggcgtgggcattgtggggaaaagagacagtgtggagtaaaatgcacaaggcaattgggagaaaaatgggcgtcatgcctggaaagaaaaattattcattaaaaatatggtggtcacaataaaattctataataaataaaaatgaaaatacatatttttttattggcttttaaacagaaatttttggggggggggggcgtgcaaatttcgaggatgatcagaattggcaaggacgaactaccaaaagcaaacgataatggaccagaacagaaaatgtctttactaatcgatggcaatgtatcgattggtggcaattttgtggattttccgttgtctgctcgtcaaaatcaaggacaattaaatcaattagtcgtcgtttaatgaaaatatggctgatcagtgatcacctctcggaaattgttgagccattcgagatttcgtggacccacataagcacggaaacgcaatcgcttttggttgtccatctttgctcggcgtgtgcaaccatttggacagaatttgatcatcaatcgtgccagagcacataagagcgaaatcgatcgaatgcaattgatcaagatcgttgagaattgt

SEQ ID NO: 5370 - DNA, 920 bp, Heterodera glycines
aagcttgaataatttttttttttttatccatttttaacaaataattaaatttttcttgaccaacattttttgttttttttataaattggtccaccatcgcgtttttctactgttgctgatgtccttgttcctgttgatgaccaccaacaacagctccgattaatgatacgactccacggcgcctctgggcacaaattgcccaaaccgagcacatcatcagaagtgcctgttttggcaaatcccattttaaatgaatctcagtttttatttttctagtacatgatgggacaatctttgaaaatcttttagatatttaattttcaaccatttgaacatttttaggatttcaaagataaagcgagtttgctgagatcattcatcataagcgatgccggtggaatttttttgaaaatcgttattcattttattacagattttcaacccgtaaattttgtaaaataaaaatagtaataagctaccttttttagaattttttgcataaagctgttgcatttttagcctgtggcacattgttcctcattaatgtgagttgaaatatgtaagaattggcatgaaactgttgcgcgccgctgaagctgaccaatatacatgggaagagcctaaaattggcataaacgtggaaattttggcatgaccgtgggcatggacaaattggcattatggggaattcattccattattttatatagaacatgaaaaaaggctgtatcaaaaaatttcaaattttttcatatcattgaaaatagatttttcaaatttacggaatttatttttcagattttgcccaacggcgcccggaaaatgcgtcagtggaaaatacggcagtggaaaatgcgtcagtagaaaatgcgtcactctggaggtatgtcataaaaacaagttccttgcgttttcggggg

SEQ ID NO: 5371 - DNA, 4943 bp, Heterodera glycines
gtaccaagaatgtaaaatttgattgcctttaagcaaagttatgccatgttttgtcgaaaaatcgcaaaaaaatagcggattttacgaaatgccctaacacttttttaacgctttctatttcttaatttgaattaaatttttatgtttttttttgtttaaattaaataattttttaaattaattgtgcttccaatttttaattttttaaccattttcattataaaaattgttttaaaaaaatgtgatgaattagtgattagtaatttgtgtcatttgattattgcatttgttggaggcaaaaatgaacaaggttttttttgttgtaattttcggtcattaaacctttggaaattgaatgaatgaatgaataataatggttgatcagagtcattttagcatttcattattactaaaatgttttagtaaacttggaacgattttgaatgtcgaaaaaaccgatcgaaccccgtccatctcaactatatgtttgttggcattttctttgttaaatttcttttttttagtttcaatccaatgttgtctgttgtgatcctttacatatttcttcaattattaacattttccgtcataaatgcctataattatgaccaaagaggatacggttatcaagcggcttatgctcaaaattgtctgaataaacgaggtctgaaaaatttcgtttttccaatgcttaattcgaattgtttctctgggttaatgacatgagtaccgtagtattgttatggtatttattgcgtctttatttaataaatacaagtttttatttttattattttattttttcttcagtgatccaggcccgcgtattcatgtttagggcaaatgataatccgagcataaaaccattggaaccggtaaaaataaaataattttttaatatttttaataacaaatttttatttacaaatttaaataaataataattcagtttcattttacaattaacttaataaattaaatttaaaatctcacttgttactcaaaaattaatataaaattaatatatttaaaattatttcaaaaatctcatttacatttgcaaaaatagttaaaataggttaaaatccaatttaattttcatgagttaaggaaattttccgatttttaatttttaattttgattagattggagtgattgacattgcagagaatttctatggcgtcactattgtaagttttacaataaaatttacgataaaatatgtaattttgttgaaaaatttagttaaaaggtaccatcagacttgaaccgggcaaccatggcttacattttcatcaatttggcgacatttcaaaagcgtatggttattaatattttgggaaatatattatattttaatatggattctggtggtttaaaaaaaaaataaattttataattttctaaaaaatctcatcaatttttggaccaggaaattgaagtgaataaatgaatttttaattttttttagataattacagaaattttggtgccgaaaaaaaataaattttaaaggaaatattttgcggaaatttccggtttttatttttttttgttaattcgccgattacttttggttatatttttttagttgcatggcggcaggtgcccattttaatccgtacaatgtaagccatggagcaccagacgcacgcgtacggcacgtgggcgacttgggcaatttggctgtcaatgtgaattaattatggaattaattaagtatagtaattgaccaattgtatgccaattatactaataatcagtgatttgtagtagtacacttatacaattggcctaaatacgaatttaatttggatgaataattgactactaaaatcagacaagctttattgaaataagaatttgacaagacatgatgataaatcaatatcattaattagacattgttttgttaattgctcatgcctttatggcatgtgatcaatcaatcaatgcgtgttaaaattaaagcgccaattgtcccaaaatgaatttttgctcccattgatttcgttttctgatcatccaaactactaaagctctattagctaatataaatacctaatcacatatcctgtgctcgtattggcagtacaattttaaaaatgctttcatttggtcacgatttcgggaatttaaattttgaaaaacaggcatttttaggctgaaggcgttgccgtggtgaatattcaagaccgattgttgaagctgaacggattgcacagtgtggtcggacgagcattggttgtgcatgagaagcgggacgacctgggcttgggcggcaacgcggaaagcctaaaaacgggcaactcgggcaaacgggtgggctgcggcgtggttggcatcaccaaggagctgtaatcaaagtgccatgatcagcccagcatcggctgatcagtcgaaaaaaaagaaaaaacatttgaattaagtgaccggtgatcgggttttattttgtatccaaattgatcagtcaaggaataacaacaaattagtgattgaaaatgtcggaaaaagggcaattgtctagaattgtggtcccaacaaaaaataaatttaacatttttaatttatttttccctgggatggaaaaatatgccgagggtgtttaagaaatgacaacaaacaagagtcaatcaaaatgctatgaatgttgtgttgtgcaataaaaaatgccgtgcgaggccgcaaagcggccgagccatagtcgattttatggttcccggtgatttcgtcagtgagtgatttcgtcagtaagtgatttcgtcagtgagtgatttcgtcagtgaaaattaattattaaaaaagagtacacctagctaaaaaaattcaaaaattcgagccataagaacaggcccgtaaatatttaaacgattcacgatttgcaaagacctctataaaatttctcacatttttggaatggctaatccatttttatttgagtttttcacgatgtcaccattttcgcattttctggactacccaattatcaattactcttaacacacttcaaaaggtaattgtcgttaccttacttaatcataatagttctctctttttgttatttcccattggccattatcaattcaatcacatttatccttttcacacgttttttccttttctcattgtaatgtttctccgcccattctcttcgcatttctttttccccagtgatcagtcagtcagttagttgtggaacagacttcaattatttattccttttctcgcttcgtgtaaatccaacaacgagtgaataaatatatcgacagtcaatgagtcgttgggattttggggcttagtcactggccatggctttccccattccctcccatgttccatccgggatagacggtgcggttggtctggggggcacagtgcgcatccctcacttatcgaatgaattttaattttatgaaaaattaaatgtttttttcataaaaaatgattattatcactgacgaaatcccttactgacgaaatcactgctgacgaaatcactcactgacgaaatcacttctgacgaaatcacatgttaccgattttatcattcataattctacattacaaccgtactgcctagcggttgcgatgcgccgaaggcgcattcaaccgctagttttttaacaagcaacaaaaaaatgattgttttttgacgcgatcacattttttggcgacatatttaaaaaaatttcaaaaatctctaaaaaatcagtcgaaaatgcgtttcccccgtctccatttatccccccgtatctaataatcccccccccctttctgaggagttgaacaataatccccccggggtgacaattagagataatacggtacgggaccgggccgggaattcccggtcatccgaggtcccggctcccggtcccgggttttgaaaagctcatcgtcccggtcccggtaggtgaaccggtacggggaaaaacaagcactggataagaatggggtctgagtgaaaaattagtgaagaaaattggagtcaaagggaaaaataaaaaataataattaatatattctttaaaagtaacactgcccaagtgtgcaaatggcctaatggctagtctccttgactttccttcttttttcccctggttcaatccctctacagaaattagattattttcaatttttttttttttgtatactcgtgggtttcctataaagaaaatatgattcctcatagttttttttaaattgatacatattttatcattttttaaatgaaaatcctaccaattgagcttaataatcgcaaaaaccaacctttttttgttgaaaatctgttaacaaattgcacccaaatttttaaaatttcccccggcggcgcctatcggcaccgccggaccccttctttcccaaaagttttttgaaaaagcgctccgaaaaaaagtgatgtgaaaatcaaatctgaatttctattaatattcgatgatttagtccaaaaatgattaattgtttgaaatttgaagaaaatttgtttgaaaattttcattaatttaatttattaaataaaaaaccaaataattttgtattattttcacttgatataaattaaaatttgaatttttttttaaatttttaaaaatttttaaaatttcccggttggtcccggtttttcttgcggtcccgtcccggtcccgaaaaaaaatcgaggtcccggtcccggcttctcaggtcccggcaagtcccggtcccggttttggcaaaaattcccggtcccgtggcactctagcttataccccttgaaaacagcaaaatgctgataaatcagcagagttgagagccctttgaccataatgaattaagtcgcaaaaaaataaatttcagaaataagcacatttggaagttaaaattaaagatgagaagctaaactaatcttttatttcagagaagagattcctttcaaatctcacaatcaaggcaattaagattt

SEQ ID NO: 5372 - DNA, 3774 bp, Heterodera glycines
  unsure (1)..(3774): unsure at all n locations
atactgttcggcaaaacattttcaaaccccctttaattaaagttaatcaggcccaaaaattattttttccaaatttatgttgaatattacagtatgcgacattccggattttggtcatattcggaagtctttaagtttaataaaatattgaaaataaaaaataatagtcttaagtagtaattaaattaatttttttttttattaggtgttgggtttgacagtatggaaagtgatctggacaaaaacaatgtgtgccaattccaaacaacatttccattacatgattatctcaacaaaattaatcgggatttggaagttgagcaaaaatgtaagatttgtgaaaattaaaaaaaatatttatgacgaaatttatataagtgtatttatatttctataaaaaatggttatttattctgtttttgtttgacctaacgtaaatccatttttaattgattatttaaatacctcctaactcaattatttatatacacaattttcggcaattaaattcgattaatttccaaatttattgaaaactgaaatgaaaatcttaataataaaattataattatctttatctttgcacaaagcaaacagtttttaataaactctttcttttaaaaacaattttattaaattaaataaatatcaaaaaaaataattaaataaattcatatgtaataataataataataattatttttttttagttaaatcagagcgccagcttaaacgttttattaactttgccaaaacaaggagttctccaccaataaattctgatgtgcatccaatttccaaaatttcaatttcgatgaaaaattttccaattggcccgtatgaattattcgattttcagaacaagtcggaaagtgtaatgattgaaggtaaaacatataatgtttcgtgtcccgacatttgcgcctttgtccaaaatcgggttcaaaataaagttttttttcaatccctgatcgcgtaagcagctttaaataagctattgaaagtgattgtatccgatcatttgatcttcaaaaattaaaaaaaaataataaaatttttcaaacaacaaattattgaacataatgaaccaaaagaccgtgttttcttaattttattgctaattaggcgctatcagagtttgaaaaaattcaaactttgagtccgattttggacataggcgcaaatgtcggggctcctaatgtttagatgaaaaaatgtttttattctcatttgcaaaaatggaaaaaaaattctccgagatttttgaaaaagagccttggataaaaaagaatatatgctgtttctccattattatctgcatgaaaacgccgcccataaataatttcaacatttttatttaaatcgaattcaaaaaattaatataaaaaataaataaaataaatatattttcagctgtgaaacaagacgcaaatgaaactgatcaatcatccggcattgcaaatatgattgagataattgatcctttgaaatgcagcgagctttgtggggttgccgatgaactttttattgaaaaagatgaacatcaaagctttcgtgtaagtaacaaatgtcacattggcgcgggtacttttggcgacttaaaatttaaagtgtcattaccaattgattagggtaattaaatttcatttaattatttgttcgatttgatggaataagtgttttctttcgcctggaaaatttaaaaagtttaattaagaaatttaaaaaacttcattttagcgggggagtacgaaaaagaattaaatgaaagtaaaattaattcgaaatttaatattaaaattagctatatataattaaaactcattttgcacgataaaaaataatgataaaatgctttaaaatttaaaaataaaaaaacattaaaatttattaatttttaaaaatttaaataaaaaatataaaaaattggaattaatttgtccaactatattaatttatttttaatttattaaacaattatatttgcgattattctattaataacttcttggaattaattgtttaagcaaagtttttcatgtttttaaaataacggatttctgacaaaatatatcaaagtctttctttagcaaactaattggtggacaaaacaacaaattgtctttttactagagaccggcataattaatcgtttaattagtctttttcgattgtttgttgttgtttttttgatttgaatatcaaaaaatcgatccaacaacacttcccctatcaattttttacaatacttttgaaccaaaaaaaaaactatagttactcaatttttaaattctcgtttttttatttgtaatttttttttaaaacagacagttggcggcgaagtcatcaccgacaactattatccatgggttgtttttgtccgagtccacgtgcattgtgcatattcggccccaatctacattcactgtaccggagtgcttatatcgtttaagcatgtcatgacggctgctcattgcatgcatttaaatacaaccatgttaaatgagtgcattggctggatgaaattttttccagctgggtgtgttaattaatgttgatttgtttttacaaggtgtgctcggggtgctgagacattatatagtagggtgggggaccccggaaacggtgcgggaattccgggttttcccaggtcccggagtttttaaacagccaggtgcccatgtagggccggaaaaataagcattgataagtagggttgtaaatttatatggactaaaaaacgcgaaatatggactaaaaaagtacgaaatatggaataaaaaaccaaatatggaccaaaaaatggactaaaaactgccaaaatatatgttttaaacactcaaacattcctaaaaaggtttttatatatatatatttgcttaaataaacttaagaaatacaataaacaaccaaaaaaaatggatttaaaacttaaaaatgcgaactttttattgtcgtccgttgtataaaaatacctccaagttcattttaaaaaaagaaaagttcgcaaaaaaatagtgcaaatatttattaaaatgccaaaatgacaacgaaaaaacaaattttttaaaatttttatttgcagtcgatctttaggggtgtatttttcgctgttttgcatttttcttgtgaaaaattgccaaaaatggccaaaatatggaccaaaaatgctatttttgagcccctttcttcatagcatatgcgcagaaaaaatatgttaatccatataatttacaaccctattgataagaatggtaatttgagttgaaaatttttttgatggaaataaatggaatgcaaaattttttgaaaaatgcctaacataaagatgcataattggccttagaatgtcgttttaggtaaaaaaaaaagggtgttttttctttgtcgttacggtaacggtatgataaaaaagttcacctcaattttttaaattgattgaaactttttagtttaataaattttgcatatttaaagccaaaaaatcgacttttctataaggaagactcttttttttgtatattattcaaaaaaatgaattaaaatttcgcaattttttgccactatttaaggcccctaagttgtaatgtttctcgcttaaaaacccgaatactaattattatatttgaaaaagaagtaattttgtttaaccctattantaaattttttgattcgtaanaattgtctgttgaaaacccaggtcttaatataaattctaaccaaaattcgaatcaaattttattaaaaaataaataagttaaaaatttttaaaaa

SEQ ID NO: 5373 - DNA, 1806 bp, Heterodera glycines
  unsure (1)..(1806): unsure at all n locations
aaaaaaaaactatagttactcaatttttaaattctcgtttttttatttgtaatttttttttaaaacagacagttggcggcgaagtcatcaccgacaactattatccatgggttgtttttgtccgagtccacgtgcattgtgcatattcggccccaatctacattcactgtaccggagtgcttatatcgtttaagcatgtcatgacggctgctcattgcatgcatttaaatacaaccatgttaaatgagtgcattggctggatgaaatttgttccagctgggtgtgttaattaatgttgatttgtttttacaaggtgtgcccggggtgctgagacattatatagtagggtgggggaccccggaaacggtccgggaattccggattttcccaggtcccggagtttttaaacagccaggtgcccatgtagggccggaaaaataagcattgataaaagatgtgaatttgagttgaaaatttttgaaggaacttagtggaatgaaatttttttaaaaaaatacacattttgcctaacataaagatgcataataattagctttatactgccgtttatgtaaaaaaaaatttggatatgttttttcgtagttgatacggtaacagtatgataaaaaagctcacctcaattttttaaattgattgaaatttttaagtttaataaattgtgcatatttgatgccaaaaaatctacttttctataagaaagattcttttttttgtatattttcaaaaaaatgaattaaatttcgcgtttttttcgccactatttaaggcccctaagttgtaatgtttctcgcttaaaaacccgaatactaattattatatttgaaaaagaagtaattttatttaaccctattataaaatttttgattcgtaaaattgtctgttgaaaaccaggtcttaatataattctaacaaaattcgaatcaaattttattagaaattaataagttaaaaatttttaaaaattagatggaagaaaaccgagttgcacgacgtttacattcattttagttcatctactatgagtgaaacaaaaattgaaaaagttcggagaatttcaattgtcaaagattttgacatgtcacatgacaatttattacggcccgacgatcttgccattctcgaggtaaattttttctttataagattgaaaaataaaattttttgaaggcttttctcattttatacagcgacacactaatagtaatgtggggtagaagaggtaacttgccggtgggacttgaacccacggtccatttatagcgtggaatgccataactgactgacaaatgagctacggctgttacaaaaaaaaatttaacctgcttttgttcgagtttttaatgttaatcgcagtaaattagaggatttggcgaatttttatttatttaaagaatttaaaaaattagaaaaagaacactgagtttttctaaagatagaacgaattttttttttcttaaatttttgcttttgtgtacaaaattcacggttacagaacatgttggttctgtttttgtagctcaattcattattatcccaacgaccaaacattttataggttagcataggagctattttcatggaatttctgaatttttaaattggttaaattttttaaaaagaatccgcctattcttatggacaatttataaaagcattaattttttttanattttctttcattcagctaagccgaacattagaccgaaaagcggacaatgttgttccgatttgcttgtataaaaatttgttgtataatgagcatatgggcgagatggcaatcgtcgc

SEQ ID NO: 5374 - DNA, 2673 bp, Heterodera glycines
aaaaaattttatttgatagcaaattcactttttacaattacaaattttgcatttaccaaatatttttaaaagattatgaaaaatataccatttttaatacatgtttatttacaaatttaataattttttttttaatttagcgtcaaactacttaaacaaaagccagacagcaactttagtgccaatacggtccgcaatttattgcaacaaaatttacaacaacattttgccttggaaatacaatccaagcaaatttgtatgcgcaagtagcagaaataagggcattacaagcgtaagtaaatttatttgtttgaacaacagttagtcatataatcctctggacatttaatgtcgaaaagtgtccgagttttttaggtttccaaatgtataggtgtgattttttaaattttattttataacattcattttctcattgttttcttgaaactaaggttgccaaaatataagtgatttttcttcattttgtgatttttctcgcgtttacatttggcattgtttgactactaatgccttttttgcttttaaaatttctgtcaattttgattcaaaaaaatgtgtgaattttaataatattatgcgtaataattatttagggcgattgtggcggccctttgatgattgaacgaaacggattgtattatttaattggcattgtaattgcagcgtatcacccaaaagcaggattctacaggaaatacgttcctggtgatatttgtttatttttttatttttgaacaattaaatgaaaattcttggtaggcaaggtaagaataaaaatttatgactaactgaaaatttttttcttacaatttaaaagattttaatttaatcgaaatgtacctaatggtcaggtttatgataccattccagcacgaatcagcaaaacaattaatgattgcatatactagtttttctatttaataaaattttggcttggaaattttggctatgtttttgcagataaattcttggcgcatggtcatatttataaaattgaaaatgacaaaaaattactgataaacttgctgaaaaatagcaaatttatattcttgatatcattcgataactctaagagagttcatgattagcttgtaaaatttcaaaaatttcgttaactttcaaaggggttatggccaaaggaaatcacaaaacaggtttttcgcatatttttagtcataactttttgatcgtttgaattttttaattttttcaaaatttttattttcatttttctaagtttttttaattcatttcaattttttgaataatttttttaagttaatttcttttttccaaatgtatttcataatttttttaaaattatttttaatacattcatttattttatcaatgttttcctcaaaacccgtttcattaattttttcgatttaaagatgtttatactcgtgtgaactcctttgatagttgcggttttgtggaactggtcacaaacaatgaagctacatgttttcaagaatttttaaagtctgaccgacttgaaacagtttgtgcaacacaacacgcgcagattttggaaaagaccttaagaaaaagttgcgaatatgtttccgtggatcaaatgtgttacattggcatgatgctattttcccacccttaaaacatttaagcactcccagcaatttccccccccccaaaagcaattaaggaatcaaaactaattcaatcaaaaattgtattattagtaataattcacaatccatttaaaacattttgaatttattaattttgattgataaatttgtttttgcattcgtttggagttaatttaatttttattttttaactagcataaaatagggcccgctgggccctgtgaaagtgccgtggccgccgctttcaacactggcgccagcaaggaatacgaagcagcacccaaatttattttcaaacaatttcacacaacttttcatcattcctacacaacttaatttaacaaccttgcatacaacattccgtacaattttcaaaaaagtttaaatttttgaaaaattatgaaagaaattttaaaatagatatttcgattaataatattttgaaaaaaattataaaattttctatgtagaggcaaaaattttcggttttcagtgcttaagtttttttgctaaaaaaatgtgaaatttttaaaagaatttttctttattttttacagtcacagttgccttatgtacactcatttcctcctcactagaaaatttttaagaatttaatttaactaaattatagattttcaaaagaaagatgtttttttctaagaaattttctgtataatgctataaattaaaaaatgttggaaaaccttttgataattaagcattaaaaccactttttaatggttaataattacacatcaatttaaacaatcacttattaatatggtaatgaaacaaactttcgacattttaattacaatttatttttgacctgttgcagagctttaaaatgatgatgtaaagataaaaattttaaatgtatgctttttggacattgtcttctaaacaaattctccaaatatctcatcaaatgacttttgtttcaactttttcttttcagttgaatcaacgactaattttaacgattaaaaaaataattattatgaataataaaataaataatttcatcttctttcaaaat

SEQ ID NO: 5375 - DNA, 1498 bp, Heterodera glycines
gaacaaattatcaaagattcttttcatacgaaacaaaaaaaaatttacattaatttacactaacaaaaaatcaactttttgtgattttcaataagttttacattcaaaccaaaataaattttaaaattaaagattttatagagattaaagcattttaattttctttgtaatgaaaccaatgacaaagtttttaattggttttatttatttaaaaaataattacgaggtcaaatagaatgatacgataaaagatttgaatgcatcagttttccaaatgtcgttttttaaaatttttcgtttttcaaccctcatgcttttcgtccccaaaattgtttctttttccatttgtagcatttatgtatttgttttggagatcaaattgtttaatccatttataaatataattatcatttgtgcccaattttttcgctattttctcttccaattttactcctttcttttgttgaatattttgttcctttttgctttattttttcttttataatattttccagttatttctcttttttcttctcctttttcttcccatttttccccaaatatttcgccaaatgacttttgctgaacttttttattttctgctccaatttgactaattttggcgattaaaaatataaatattatgaataataaaataaataatttcattttctttcaaaatgattttgtataaaattactatttgtctttttcatcaggaatgattttaaaattatttaatgtgaaaaatgaaggcaataatttaatatgagaatttattcgttttggctggataacataaatcagaacaaatgaaatatcagtacaattatccacgaataaatatttttacattaatttacaataacaaaaattatgttttcgagatttccaataaggacattttcatgcattttaaatcagataacttttaaaaattaatggcctttttatagaggttaaaaacaaagtttttaatggattttattttacttaaaaaaaaaaaataataataatacaagatcaaatcgaatgatttgataaaattttattatttttttgatcagtagagtagaaaaattaaattatcatttatttaattttcatttattttgaataaatttgatcagtaggaagaatatctttttttaataaattttttccagggatcagtagagagttgtgatttttcatttgaataaaaggctcttaatgggctaaaatgaataatttgaatttttaatcaagaaaaaaaaattatataaattcatatttgagaatataatcacgaaaaaatgaaattattattgttattattctgtttaatttcaattataattgccctaattagtacaattaaaacagaagagaaaaaactacaacaaaaatcatttggcgaaatatttggagaaaaatgggaagaaaataaacaaaaaagagaaataattggaaaatattataaaatggaagaaaaaataaagcaaaaaggaacaaaata

SEQ ID NO: 5376 - DNA, 6756 bp, Heterodera glycines
gccgatttaaatttccaaaaaaaatctctctttcatcaaaaatcattcaaatctctcgatccattcgggaatcgggttttctcggataataaaaattcacacgatttcttctaaataaataaggggatttcggatacttctctctaacgacgagcaatcataatttttcgaataatcgcgtcattatttaataaaatatacaaattataaaataaataatgtattttggaaatttctacataaagataaaacttattattcgtagccaaaacatccgccaaaatcggcccgtttttaagcaagttgaattggatatttttgattttgaaaatttaaacaaataataaaacaacgttttattctttctctttaatttcttttataattatttcgccatcattttttaattccattttcaaaagcaatttcatcagtgagttaattgctaagggtaattaatttttctaattatttttaattagggagacgacaaaatgctaattgcatttatgaaaggtcaccaagaaacgcaaagtaatgaatattcaaagcataaatatgaggcacaccttggcattttgtattatgaaaaagaattggcaatgtgacaaaagtttcttttttaacgccaccaaaagttttgttaaaagtcaagtgggtagtgtgttctgctttcttctttcttttgctggttcgattccgcttggctccacttcaaattttaattagtaataattgcccaattacgacggccaatgatgacaaattaattgctgaagacaaataatttgttgacacaattaaacattctcatagatacttctgaggcagtgcgtagtaattttttttcaaacaattttcgagaaaaacaaaaattttataaaaattctaatgaaaatcgtaaaataaatttggataaataaaataaggcaaaataaagaggaatattttcaaataaattttgcagaaaacctgataaattttaaagaaaaaacagtgaaattttttcaaaaaaagagaatttaaaaaattgcacaaaacaagtatttcaaaaagtcgaattttattccaccaccaccgccagcatttgtataaataaaaaaagcaccaaaaaaagagtccacaaaaataaatataataatgacaaattttgaaaaatcaagcgaataaaatgtggcgccaaatgccattcgtcttgcgcgacttttattggcactaattgctgcacacttttggcactcagtggcgccgctgcgcgctgttgtgggtttgcagtttatatcttctgctggtgggcatggctgtgatggcattggcattttggtggctggtggagcagctaaaaattaaatttttttttaattttctgagtaagagcaggttggtaccgtcaaaattggaattaggcttggggttggtgtaccgtgacaaaaaaaaacaagtaccgtattacttcaacctatatgtcgtcctgattaccctatttagtgttcctaaaataaagcaccgtaagtccctaatttttttttaaaatatttattaatattaattcccatacttgagggagattaaaaataaaggccttaaattactaaattcaccggcgaatttttaaggtatcatgtatgcgttttttgaaatgccatgtatattttttggaaaatacggtaatatattttgaaaattctcacgttttccggttttggccgcttcaatggccgagcggaggacaattgagcgcttcttacgtccgccaccgccgccgcaaccgcagcagcaacagcctaaaacttttttggttaaaaaattaaaaactttttggattttacatggcctgcaacagcaacagccacagcatttgcaacagcaggggcaagtcctgaaaattcgggaaaaattaggaaacaatttctaaaacatcgattgcctagaccttggcaatttgatcagcagtggtgggttacaacattggcacggcccgacacaggtacagccacaacagcaaggcttactgtaataattaaaaaatataaaaaaatttcagagaatttaaaaaatttcctcttaccaacagcagcaacaactggcatcagcaaaatgttggttctggtcaatgtttgcaaacagaatgaccaacagaattgggaatgtgaagagcaattgcattttattttttaaattttgtttttttaattttctaaatttaaaattatttaaaatatatttttatttattattatttttgaggggggggggtaaataaatatatttaaatttatttaatattccaaatttttgtgggtttgtggttctgttctatcgtcacatttcgtcccaatttataccgatcgggacacactcccaattttttgtccagtgacgtccacctaattatggccaattaatttgttattgttcgtccatggaaagtgtgtggttcgctggtagagtaactgatggaggacggacagtgagtggacacaatgaaaaattcgtcggccaatcagacggatgaagaacaaatttttaattgtgtccgatcagagtcgcaggaattgtctcatttttccgatcagaaaaacgagtccccgcgcgggcggagtgggaacaacgaaagtgtggcgttgtgatgacgcaaaaaaaaatgcaaaaataaatatacaaaataacaaaatgtgtgcgtcgaagggaaaataacggaaaatcggcgctactaaaaatggaatttgtgatgtcatcatgggcgatagaagatttgatcgcaacatattgtaatgctaaagatagtatttttcaaaatgagagatatacggtagtgtgataatttgattgtttaggcttaaacggtagttactgaaatttagtgttcccgatacagcatatttaaattttccgtagaatctgtttttttaaatacagtaccactaatcatttttgtaaattttgtggatattaaattttttttttaaactacgaccatttttgggtccgatttttttgtcagttcagtttttcgattttctagcattttttagcaattaaattatattaatttgcatttttattttatttatgtattttattctattgaccatatcatgtttttctaattgtattcattcctgtgttttccgctataagtgcaatatgttgccttgcagtttgctcaaataaaaaaaaataaataaatagatttaatttacatttaaaataataaaatcaattaaaaagcatttaaatttttatttaagataaaataaattaacgcatacaataaaataaaaagaaattaaaaatctgtccaattaatgatcaaagtgcggcaaatggctcttcacctcccaacggcaatttgctggccctctgttgcataatttcacgaaatctcatatttccttccgcttctctgtccgcaatgggtgaggtcctgaattttttttaaggcctcaaaaaatttttttaaggccttcaacacaaagtataggaaatttgtgattttattagtattttagggtcggggtcatttttgcgcagacaagtttaaagattcataacttttttttaattcgaccaaataaaataatgttgatattaatcaataggtctaaatgttctttattagcctgcaaatttcaaaaaattatattaggttttaaaaaagatatagcgcgctgcaccaaaatggccagaaaaatgcaattttttgaggttttttggccataacttttttgtttctcagctaaattttttgaaactttgcaggttaataggcactatcaagccacttaaaatcataccaagattatttagtttggtggtaaataaaaatgacatgattcgttctgcgccaaaatggccagaaaaatgcaattttttgaggttttttggccataacttttttgtgtctcagctaaattattttaaacttttcaggttaataggcactatcaagccatttaaaatcataccaagactatttaatttggttggtaaataaaaatgatatgattcgttctgcgccaaaatggccggcgcctaagtgggcggttcccagtattttaagagaaaaaactgaaaatacgatgataaaacagtgcttcgaaaattttaattaaatttttatgaaataaaattttttttttattttgaaaaaggtatggaattttttggaaaaaaaattggttaaaaatcattaaaatagggaatattttacgaattacgatgataaaacaatattatgaaaaaaaaattaattcaattttatgaatatttaatttaaatttttttttagaaaaatggaattttttgaaaaaaaattgttgacagaatttgagaaaaaataaattttcaaaaataaaatttaaatagtcttttttcttactttttatccacacccgcagatgcatctggtgggttcatgtgcagtgaatgtgaaaatttcaagtcatgaaattgtcgctcttcggcattgaaattttttgcttggctcctcagcccagtgattgacgttttggcatcggccataaccttcatcatttaatgatttattaaaaaataaagcaaatttaagttattttttttaacaaagacgaatgcgtaaaaaaagcaaaaatttgtaatattagtatgtataaaaatttgttaaaaaaatgaaaattcgaaattcaaaataaaaatctaaaattatggcttaagaaaaagcataaagttttctcttctgaatgaaatatgaaaattggattatttgtttgattgatttttaaaaaaatcccaaacaaatcaatccccgtctatgacagatattattatgtcaattttagaaaaaaaaacgaaacttttattggataaatgaaatttttgtttacgaacagcttaaggaaaatttcttgaaaatttatttaaaataaataattatggacaaaagctaccattgcggtcgagttatattggcctgaaattaaaaattttttaaataatttttatgaaccaaaaatcgttttacccaaattgaatggttcaatatcgccgtgcaagcattggtgcaaaaattcctcaatgaatccggccattgccaatgtgttgtgcggttttctgggaccatggcctagaatttttttttggaaaatttattcctacaataattttcatgattcttgaaacgaatataaagcgttattttatgttttgaaattattatttaagcaaaaggtccaaaaaaaaatttttgaaaaaatattaaatgaaaaaaccaaaaaattccaagaaatttaaataaaaattgaaaaactaatcgtcaaattttttccaaaatatcaaagtttaaaaaatattcatatttttctttctttttcaccacaccttcgtcgggaaacagaatgtatgtcactgggatgtggttccgctttagtgcagcaacaaattggtcttaaaattataatttaaaatttttttgaaatttcttgaaacattttacacctgactcggcctgcttaacccgtgggtcgtttgccccgtggacgatcagcagtggattcttgacccgatttgcaaagtacagtggtgatcggcttttcaaaaaacgacggcctaattttaaagtaatttttaatgttatgaataatttgagttttattaaatttttagaggattttttagtgggttttaaatttttttaaattgttactcccaccccccaaaaaatttccttgaaatcagcaaaattaatgcataattttaggattagctaaacctaaagtcaattagtagcttttaaatttggtgtgatttgacaatttttataaaaattatgagggaataaaattttaaaaatgatataaatttaaatgaattttatataaaagaataaatttttagttaaagataaaaatataaaactatgcaccttcttccgtgtttttatcagctccaagcattgtgatcatgtcgttgtagaagccgagccaatacggaggaattgtgtccaataaagtgatcagatttgaaggtccaacaatgtccacccctaatcaattaattaatcatttattttaattgcattggtttctattattgtttaaattagaagaattaattaaataattcattctatttgagttattcattcgcgaattaattttaattgacaattatttattttaattggtttatttttcttctttgatttattaccgcacgcaaaaatgtcgggtgtgaaggtcattccgaccaatgtagcataacctccatagctgccacctaattttaaaaaataataaatataaaaaatataaattattttattgataaaaatggacccaattatttattaaattatgaaaaaaatatgaaattatttgtgaagcgagtgtaagtttgcgaatttaaaaaaacaaaatcaaagtttttctatgccgttaatttcggcacttttgtctgagccaagtttagatcatcatagcctttttctttgctgaacaaagccaacaaagttggtattattcgaaagctcttaacaagctcctgagtgaggcttttcaaaatgcacaaagaaatacggacatataaaaaagtaaaaataaaaatatacaaaaattctgagttcccccggattagaatctaattaatttaatattaattattaaattgattgcctcacccattatggccacttggcgtcggtccgcaatgttgttgctcaccaagaagtcaacaccgtccaacaaatcttggtgcattttacggccccattcactgttg

SEQ ID NO: 5377 - DNA, 1687 bp, Heterodera glycines
ctcagcgatattctcagcatatgggtaatttttttttgtagtttctaacaacaacctgggtttttcctgggcctggatttttgtccaggacaatccaggtccgggttcaggctttttcaaaataccgagctctagtcctaggtctttaagacgctaattttaactaatttatagaaacggaacacaataaattcattaggaattctttttcctttaaattggcattccgaattagttttttttttaattgcctggagcacagcgtatcctcggctggtcagccacgcgttgatggcggcgaagccgaagaaatcgcgcgattttgggcccccgtggacgagcacaatcaatttttggggccgtcgtggcaacatgccctggcgtgccaactccagcttgtccccacgcacttgtgccggcgacaacaacggggtctgagctcatgggaaatctttgcacttgaaccttttgaactcaacaaactttttgtccttatttccaaggacagtccttattttctaaaagtacaactcgtttgtaaaagatgattttgttcaaccataatgtaagggttcgaacaacagggtttcattaaatggaagaatttcagcatttaggtttatagtccttgtttataaggactgtcattatttgcttacaaaattttgtttataaatatctttacataaatattttagagaaatcattggttatttcgtgaaaacaaatgctctgtgattcctggtgacaaaaaaaaagctctcccgcgaatgagacagaaagatggctcccgtaaattaattcagcattcttttttgtccttattcataatgacggtccttatttaatttaatgtatccttataaaaactagtattttttaaaatttctctttttaaagattttttattttctaattttaataaagaaaatgaattgccgtgttgtatgaaattatttaattttttcatttaaatactgtacttatttttgaaacattttcaatgaaaatctctagatgaattagaaaattttgttgttgaaaatttcaaatttctggcattttatttcatatttggtaaaaatagataaattaatatttagggtaatttgtttgtttacctgtggtggtaagcttaaatatgcttgaatgcgtaagccatcccgtgccgaataatcaaacccaatcattttgcttaggggtcgtccagccaactcaggacgagtggtgaacagctgcaattttcacaaaaaaataatatataaaaatacttaataataattaaaaatatatttaaatgaatatatttaaaaaatgatttttttttttttaaacgaacgtaatcagcacgttttttgcttcttttgtagagaaaatatctaaatgagtttttatgtacacaataaatttaaatcaaaaaattttcctaattttttcgaaacgttttcattttaaaatttatttaaatcaaaatgttactcaaacggttgatcgtcagagatgaagctgaccagccatgtttcgaagtccatgcttaaaataataataaataaaaattgcaatataatttagtgtgtatttttaaaaaaattattttttgtcaattttcttaataaatttcattaattttctggttatgggcctaaagacctcatgctttcaatgactggtgttcctgatggtcgca

SEQ ID NO: 5378 - DNA, 1019 bp, Heterodera glycines
caatgttgacgtctcggcagtggcagtgaacggagccattgtcgtgatctggggcgcatttttggcacgccccaattgagagttgacactgatcgaagccccgggcctgctgctcgtccgtgcagtggaggtccgaggggatggtcttccccattgccacagcccgcccatcggtgacgaaaaatgatgacaagactggcaatggagggagggaagaggggacgaccgccagagtcatattcccccattgctcgggaatcccgggatggatgacgaccctttgagactccacttgcccgctgttcgtttccagttccacccaagcactgagctgtaggtcccactccaaacaactgaactcctcgaaaagcgtggacgttgtcggcgttgcggcccagcggtagaagaggcaagcagcggaaggaagaccacacgaattgtgccaaaagcttgtgctttggatgcaggctgagtggccgggtcgactgttcagttccacgagctcggggacctgtgccccgtttcgaacacgagcgcaatagtctccatggcacgagcccgccgctgggcatcttttaatcgcaaccgtcgagacagtgtaggagcggagccatttctccgttttgggcacgcagaccatagtgattgacgtgagccgtaggcgaacagccccgagcaattcgtcctgagccgatctgatcaaaaatgagttgacctgatcggatggcagcagagtcaggattgtcgccgcggatccgatcccgaacatttgagtcccgatggcgtcctcgcgcaatcctccgatcggagcattaccgatatgggctttgacgaagaagaaatggcgacgagacacaacagcggaagcagtgccgtagcggccccgggcatgaatgcccgccctcgctcaggattcctccaggctctagcgaccgcgcgagcgcgcctggccaattgcagtcgttcatggacttttatgatttcggccctcgcctttcttgcgccctttctccctcgag

SEQ ID NO: 5379 - DNA, 5606 bp, Heterodera glycines
ataaatgccatcgggacctgctcaaaattccatgcgcctcgggcatatcggtccggttccggtcgtgattccgttcggcgttccggctcgcgcattgccgccagagccgattcagccgcacgcatgcacctgacttgagcacccaccgccctccgaaattcccgaactgaccatttcgttccactcgtgctttcccggatccgcagttccatcaggatccgcaccggcaatttggactcgagcagtggcccgaaggaagcgtcttccacatttgccccgagctgctccaattgacacactccgcgctcgaactcgtccacgacggttgtcaggctttggacattttctctggccggtggaaggtggagaagctgggcccggattgcccgctgtagatcatccgtgtccccaaatcgttccctcagcagttgaatgaccacgggataattcccgtccgacggggtgtagacctcgacagccctcctggctggggatccttcctttaagcagcgaaggagaagaagctgcttttcgaagcccgggatgggcttgtcgtccactgcccgcttgaaatacgaccaaaatgtcgtccaatcctccggttttcccgaaaatgtcggcggctggaggctcgaccgggagttcgtagtgagtctcgggattcttgggcgaagttgcccaacacccatccgcgcagcaaatttcgagtttgtccaccgattcgtcgctgtacacggtcactccacgcgccgcgcagctcatctcgcatggattcttgaggtcattcgagtcgcgcagcgccgtcagtctcgagtttcggggggcgggttggcacccgacgacggtcccggtccacattagcacggcaaaaagcgtcagtcctatgcgggattgtccaaacttccgcttttgcggttttctcggcattgaccactccgggtcacgaatttctcggattttccggtcccgctgtgaccgtcgaagggccacgggattgttttcccgttcgatttgcgctccttccttgtcctgcccgctctgaccgacgacttcggtcgtttcttcggcgctggccggcacggactccccgattgtgcccgcctcctgctgcgttggttcggcgttgtcctcatcctggggttccgtctgttgcatgattgggcccgggggaatgaggtcccccctgatgtcgccgctctcgcacgtttctgctgtcccgtcccgttccgattccggtgattcctcgagggggcatatcttatttaccgggcgcccccaaattcggccatttggcattcggattagcacactcctgatctgatccggtggtcccctgagttcgatgattcggcccatctgccacacattgcggggctgcattttgtcctccaccagcacgacgtcgccgacttttggtgtcccgccggcgaccacccgtctgttccgatgctgccagccggctttctcccgtaactgcagcaggtactcggagtgccaccgcctccaaaaatgttctgtccgttgctgcgccgccttccatcgcttctcgagctgaacatgcggggggtccttccgatcgggtgggagctctgaggctgggttcaggggaccaatccccaatcggccgttctcctggatgaagtcgatcggtctgatcggtagcggatcgccggctccgtcactgacgtaagtgagcggtctcaaattgaccgctgcttccacctctgccagaagcgtgatcagctcgtcataactgatcacccagcttccgagtgtcttctgcagtgcccgttcgaacactcctcccgcccagggggtgtggctgggagtgaatcgccacttgattccgcgagaatcagtgaatgccacggggtcgttacccgtaactccgaatgatgaaagagttcggcctaccaaagtgaatgaaggcgcattgtcactgaggatccgtgaaggcgcccctcgcctggcgatgaatcggcgtagaagcgtgatcaggctgtcagctgagaggtctcgagtggcgtcgacataaattgcccgagttgtcaagcacgtgatcagcagcacccaggctttgcgccgctgccccgactcatccaacgccgccgtagggcccaagaagtccagccccaccgattcgaatggcagccgacgtctgacccgatcagctggcagcggtggcattggaggaagagcgtaaggcgccgcttccattcggcggcacttccggcatgatttgatcacctttctcgcttgttgacgggctccaggggtccagtaccccttcaagaactgggagagagtcgcatttataccagaatggcgcagtccctcatgagtgtccgcgatcagcagaatgccgatccttgaatgcttcggcaggacgattggtctgctgagttccgtttcagcgcaattctccactcggctgtgcaggcgtctcgtaccgttctcgtccacctcggtttgaatcccttgcggcattttgccctcgttttgggctgatcggatgatggtctcttgcgctgcgtttaactcctcagtgcacaggggatcacgtttcccctctctctccattcggacttcatttgtcccccccctttcttgcctttctgccgaatcgcagcgaccaagcgatgatacggaccgctcgcttccactggccgcactttctgaggaaagctgtcgggaacgaatcgtcttgcgcggaggcgaggagcattgtgctaggagtgtcctggtccagggggaagtctgtcccctccttgtacaccttgaactccaactcttttggccatttgtcggtgggtgagacaatccaccagggcccattccaccacaattgactgccgtgaagttcagcgggaggcatcccgcgcgttgcaatgtcggcggagttatcctccgaccgaacatggtggaaggtgattccgttgccgtccgtatctcgagcagtcgattggctacgaactgcggttggggtgtgtggttccttacccagtgcaaagcaatcatggagtcgctccataaatgctgttcagcgaccggacggtggagttgggcacggacgaaagccgccaaccgcacgccgagcaggatgcccatcaactccatccttggtatagtgaaagtgtccgccgctttctttggcttgaggcgcgacttggccatgagcagacgggaaaagatcccgtcgggtccttcggaacgaatgtacactgcggcggcgtaggcgaactccgacgcatccgtgaaaatgtgaagggataatgacagtccggttccacttatcactttccggggaatcagggttacttccccgtcccaacttgcggtgattcgttcccattctcgctgatcagctgggctgagtggagagtcccaatcgtgagtcgcgtcccacaagcgttggaagaaacgcttggctgcgagagtggcaggggccaaggtccccaaaggatcgaagagactggcgatcattttgagtacggacctgcgagagttggttgtggcgcaatccggggggatccccgggtaattcatccgaatttcgtcccgctcggaatcccattcaaggccgagcatttttgttgtcgtcttcccgaggtagtcgtccgtcgggaattcccgattgagattctggtcattgctgaggaactctctcagattcatccgagcatcagtgaacattcgcttcgccaagctggccttttcggccgcttcctctcgtgtgtccgcggggatgagcacattgtcgacataggtgtcgcggatcagctgctccgcgaagtccgaaccgaatttccggagatgatgacgaactacagcggcgaggcagaacgggcttggcgtcagcccgaaagcgaggcgccggaatctcagcggcaaaagattgtccgtcgtcactggcctcgtgggatcccgaacccacagaaatttgcatacctcgcgatccgtctcttcgatctcaaccatcagaaaggccttctcgacgtcggcaatcacgggcacttggcaagcccgaaatctcaacagcattccagccaaatcaggcagccacacgggtccccgtagcaggcagtcattcaaggacggagctcctttggcatgagcactggcgtcgtagacaatccgcagcttcttgggcgtgatcacggcttgatgcgggatgaaatgttcccgctggttggccccgatcgcggctttttcgatgatgccggtactgaattgctcttcgatcactgcccggtaccgctccaacacgtcgggcattcgctgtaatcggccgatcaggctggtgaggcgcctgtaggctacagcgaagttgctgggcaacgcgggaatggggtcccgccacggcagccgaattgaataacggccgtcttcattttgtcgaactgatttctcgaattgaatgatcgcctcggtgtcggcgtctccggtcgggtcgtcccgaattccgatcgtctcgagtgaccagaactgctcaactgccgacggggccggcatgcgactccatccgctgtcttcatcggttatggccatgaggatgtggttatggggcgctggttgccccaagtgagctccgaaatgctctccacaaagcacagtcccgaagactgtatcaattaggaaggccccctcggccgattttttgaaaccaatcacaaagtcccaaaacttgcgtattccgatcacgatttggggctgaagtgtcgcgcccaccggttcgagcagtccgggagttcccggcccaaccagcttggtttgaatgggcgtgcaaacattgggcacggatgacacctccagcggctcccaccctccgtccaatcgtttgagcttcagccggtgcctggacgacgggactctcttctttgatccgccgaacacttgcacgacaagcggggctgaccccgcagttggtagttcgagttgctctgtcaggattgtctggacccaatccacctgactccctggatccaagagcagagcggtaggacgctgacgcgtgatgtcgtcattggccgctaccacggggcataccatcaggtaagccggcaggctctcgcccatcgctgtgaatgcccgttgatcagtgccaagggatcgttcccctcgtttctccgattgaatggccgggtcgttcgtccgtcgcttcggctttcgcttggttttggtacgagcctcgggcgggcgggaattgccctccgagttcagtccggtctgcaccagcatggcatttgccaccggtttgggtttgtcctgcccgcgggcctccactcccgccggtggttcgcgggttgcgagctgtgtccccgacccgatccaacagaccaaggaatgatggtcgtctcgctggcaccatcgacaggttcttgggcgtggacagcagctggcaatgtgatcagaagagaggcagcgaagacagcgccgttgctcgacgagccgctgtcgacgtgtttgggccgtggggtaggccgaacaactgctcgggcgatggcccggtttttggcaaagagaacaggcattgtcagccgggacctccccccgagagtggggaggtcgatgattcctggtccaattctgatctttcaccttctgat

SEQ ID NO: 5380 - DNA, 2134 bp, Heterodera glycines
  unsure (1)..(2134): unsure at all n locations
tggttttgctgaatatgaatgttttccaaatgaaatgaatgggtttgattcgcaaatttgtgaaattgtttctccgtcaaatgtgccaancgctgagggtgancgatggcatcgcaaattggacgatttgttgccatttgaggccacagtaccactgcaaaagcatcagcaaatacagtaggtcacattgtctctntggttcaaaatcaaaaggggaccgattgtgccacataataatccgcaggacggcattcgttggcaaaaatagaaaaagcacttgtaaaaatgtgaaattttacgaaattggaaaaaaacccaaaattttgcgccaaaaacttaaatttttacgaaatcgaattcgttttcctatttcaccggaccgccacccatccaccgacagtgccaattttgagggcatttctggcaaggaaccgttgctgatcagcaaagtggtgcagaaggcgttcattgatgtgcggtgattgcccatgattagggcccggatttacatggattggatttccatataattgggcttaaatactcaaaattatcattttaagcatgaattgtctattgaatttgatttaggtcaatgaggagggcactgtcgccgcggcagccacaaacgtccgaattgctcatcaatcgagcaaagaacgacgacaaaacttgcgttttgtcgctgaccatccgttctgtgcctttctgattcgcgatgactctgtgcttttcagtgcgattttccgcaaatgattcaatttattatttaatgtgtatttgtgttagatttggtaattatttttgttgtaattggatccattttataaatcttcttttttgtgtgtgtttgtttactatttttgcatttgattccaatttttaatattcttttatttgccgatgatgaagagtgattggatttacacataaggaaaatcgcatatataatacataaatatgtaaaatcaaatatgaaatacagtacaccggaaaaatgcgaaaatgttaaaatgtttatctccaaaaaagtgtgcgcactaagcaatatgtgcgggaaaaaattctgtgttatctctaattatcccccgggggattatttctcaacctcatcagaaaaggggggaggggataattagatacgatgggataaatggagacgggggataattagagataataccgtatgcgcctgaagaaggaaaatttgaacctcaaatttaagagcacagaaaaacctcaaatattaaagtttatctaacttttgatgctgatttaaaactttttagcttttcaatcttctgatgatgattgacatttaagacgacaaaaaagcgaacaattattgaaaaccaattttatttttattttattttaattttcatattcaccattttgccgataaatttgtgaatgaacatattttgggaatgccagacaaatttttgattagcaaaaacagtaacatgatcaaattaaagaagtaccgtatcagtcgcctttcattgaggataagccgagattgtctatatttaaattatataatattttaggaaataatttaaaccaaataaatttagttggcttttacgagccaaaaattttatggcaaattttaatgaagagctttcgctaagtgaagaagcatcaaaacacgaactgctgtcggtccgctttcatcagctattccatgcccaataatttgcaatttgacggaataaattagccaaagcattactttttagtaattcattaaaatgacataaaaccaaagattggattttcagctgggggatggatggcattacgacttgattctcgagttttcaatgccaaaggggtgacaaaagtgacagtgaaaaaaccataaaaaatcaaaaagttgatgctttcgaatgcttctcctccccattatcaaatttcaccgaatgtttgttctctctgcttcttttctgttttctctgctcgtgtcttttcatttttaagcgcctgcttttgtcagtggccaaacgaatcaataaaagtgccactgctcttccaagcatttggcacaaatgaccaccaccggccactgctgggccaagccattggctaacgagtggccacccactaatgccgctctcttccaataaaa

SEQ ID NO: 5381 - DNA, 3013 bp, Heterodera glycines
cgggaaatgcgcatttccggtaataagtttaaaaagcctccttattccggaaattcagttacaattttaaatactatcccataatgcgcatttccggtaataagtttaaaaatgcgcattttccggaaattctgttacaattgtaatataccggcaagtgcgcatttccggtaataaatttacaaagcgctttccgtaaattcagttacaattgtaaatactatcggaaagtgctcatttccggtaataaatttacaaatgcgctttccgtaaattcagttacaattgtaaatactatcggaaagtgctcatttccggtaataaatttacaaatgcgcattttccggaaataagtttcaatgcgcattttccggaaattcagttacaattgtaaatactatcgggaaatgcgcatttccggtaataagtttaaaaaggcgcattttccggaaattcagttacaattttaaatactatcggaaaatgcgcatttccggtaataagtgtaaaaatgcgcatttccggaaattctggtacaattgtaaatataccggcaagtgcgcatttccggaaataaatttacaaatgcgcattttccggaaattctgttacaattgtaaatataccggcattgcagatccgcttgctgaccggtggaaattccttctcgatggtgacgaacttatcggccaacaaatttgtataataacgttcactggtgcgtttgatggagcaatgccatgcgaatgcgatttgctctggctttatgactttcgcgaagagctctattgccagattgtgccattgagcagtgagtgttggcgggggacggcagaaaggtgaactttcggggcccttgagttcccaaatcgtactgcccctgtcggaacaccagaaaacgtccgctccatcacggttcgttcccaagtctctttttgctgatttgatcgtgccggaaggtgtcgttgcgtcagtttgttggcttcttgctttcgtgacgtatagtattcgggttcgtcttgtcgtccaagttgatgcgctgtttgacatcattggagtccatctttgcttggtggtcgtcatcgatgcccatgttgtcgttgtccatggatttgtcttcgtggtggtcatcatttcagttcgagttattgtgctgtaccacgacgaagttactggtcggagtgcggtgctcaaagtgattgttaattcagatggcggtgcagttgtgagtgtgctgtaatgcgcggataccatttggaggaatctttgtgcattttggcttaatgaggctcgatgaatgcgtaacggtgccgctgctgttggctgaaggaacatcagcgcgaacatgctgatgaccatcagcgtgtttattgagtttctggacataagtccactgctgcttgcggctgatgttgaaggtgtcggatcaacttccatgatttcgtcttcttctcgcgccaagatcatgtcggttaattgtcttgcttcaccggttcgccggtggtagacgaaaaagcctgccttggccgccttagccaactggtagcattcattcttgtttttgagccaggatttgtcgtccgtttttgctaacactattgttagttgaatgtccgtctttgcgagttctcggatgtacggggtgatgccttttgttaagtcgctttcattggccaagtagcagaaaatgatgtgctgtacatcgggcccaggggatagatgaagtctgtccgaggcgtagtgcgtgaaccattgagtcctcgatgcgttcgccaattcttctgccgccagatcgccaacgcaaataatttcgtggttactgtagtgctggtttgctatggctgcctttgttcgagaagcgacatttgcggtgaatttgttgaggttttcgagccaattctcgaattctgatgtttctttcccttcgattgagattggcctgagctttattggctcaaattggttcagctgcattaatgctccaaagtgatcacacgaagtgctccattgcttcaacaaatccatgagcgatgcttgcttaacgagttgccgatttttggtgacgaattgttctttccaaaatttttcagccaactgcttcggtgtcaagatggacggcattacgtattcttcgtggaggacgactgtttcgctgcgaagatttaaaagtcgctggaccaagtcgaaaagcattgcgttcatcagagaatttgctttgcaatcttcgaatccgttcaattgttttttgcgtgttgaagcaatttgccgatacgtacatttggcacaactttcgtgacgttcaccagaacattcggttaaaatgttataaccgacgtattgttctccttttggccagctttgttggtaacattcaatgcgcaattcttccggttctggaatgtgcggtgctgatgggggagtgtgtcccgctctctggactcgtcgctcgttttcctcttgaagctctgaggacgatacttcctccgtgacgatgatttccggttcaggttcgctctcactaaccggtgggccatggaagaccatttcttccgtgtcagattggtgtagtggccttctttgaatcggacgttcacggatggtcgagtaccaccgaggaattcggatggttcgaccatttttcctttttggtcatgaagtttccatccttgcgtttcgagctgatgaagctccctggaagtgcgtccatttttccagagaaactgccaattatcattgccgtaaatccgttgacagtacgtgagtaggacttcgttgttttttggcatgtcctcactacaatgtacgagtactttgattatcgatttttttcaatccatattttcggacccccccccgccccatacctattggatgatctttgatccctttcaccgaaacctattggatggacttgtgcgcgagaattaattaatttaaataatttaaattaaattatttatttaaatgagcgagagctgcgcgactttttccgataaattgtggaaaatcaaaa

SEQ ID NO: 5382 - DNA, 1748 bp, Heterodera glycines
ttacttatgtgcatctgaaaagtcattttttttgtccagcagtgagctccatctgtatatatgaataaacctacattagagagacctgtcaataccttttttagaatccgtttatttcccagtatcttattggctttttttttgcctttttcatcacctcgtccaccctttgttccatttctcgatggcttacttgacgtgctccgagttgttcaacaacaatctatataaattatccataaaaaatggcataatttaaacttctcttgcgagtgcccgcgctgaagctgtgtcgtggtctacccctaatgcattgccaaaaagctggatttcgtacaaacgagggcaaatcttcattgttatcattgccattttttgggcctgggtgtaggttctatgtttcgaaaagacggtcacaccagcatagcggacaccttccggactagtgccggggataatagacatctgcaacattaggcaatttttctcatagtattttaactctttaaaatcttcataattaattttaaaggaataaatatcattctttatttttatatggacagtagagaccggaattttaaagtaccgggaccgggcttagacatttgaaagggaccggggagctcgttcaaaaaagcccgttttacgggcgcccagggcccggtccaaaatttgaacgggcacccgacgggacagggctttttaaaatttttggaattttgattatttcaataaaataaaaattttaatcttttatttgaatttagaaaaatgggacgggaccgggccgcccggtaaaagcccgcctggtcaccgtgccaatccggtctcaaatagacagtataatcattttgttatattttatgatataattacatattctaaatctccgatgaaatctgagttttcccaaccgcaaaagccatgggcgacttcgtgccaggaagtcctgccaggcgtgttgataaggggattttgtatggcgtagtctatggcagcgttgtattgattgtaaagccgttctttttcggcacgagctctttcaacgattcgctgatcattgattagcgatcggaatggaaattccgacactacttatccatttatatttgtgaagaagaattaaaaattaaatttaaaattatctgttacttatgtgcatctgaaaatgtcaatttttttgtccagcaggtgagctcccatctgtaatatatgaaataaaaccttacattagagagacctgtcaataccttttttagaatccgtttattttccagtatcttattggcttttttgcctttttcatcacctcgtccaccctttgttccatttctcgatggcttacttgacgtgctccgagttgttcaacaacaatctatataaattatccataaaaaatggcataatttaaacttctcttgcgagtgcccgcgctgaagctgtgtcgtggtctacccctaatgcattgccaaaaagctggatttcgtacaaacgagggcaaatcttcattgttatcattgccattttttgggcctgggtgtaggttctatgtttcgaaaagacggtcacaccagcatagcggacaccttccggactagtgccggggataatagacatctgcaacattaggcaatttttctcatagtattttaactctttaatatcttcataattaattttataggaataaatatcattctttatttttatatggacagtagagaccggaatttttaagtaccggg

SEQ ID NO: 5383 - DNA, 3032 bp, Heterodera glycines
gtttttttggaaaatgtgccaaataaattattaaaaaattctatttatcccccctggcacataaatggagactggtagattatttttcaacctcctcagaaaggggtacataattggagaccggtagtttagtgaagactggcacataaaaagagcaaatacggcaattggaaacagcattgagaaaaaagaacttttttatttatttaagaagagaattatcgaaaaataatcatcaaaacgaaattcaaataaagacaaattattgttgctaaaaaattcttttgcttatttggccatcgctgttggttctgtcccgaaaacgggcatttttaatgggccgatccattagattggggggaggaggaccgaaaaaggagcgaaaaaatgagtgggcgggggggggggagagaaaggaatagagaggggagcgcggggaggggggaaagtggcgatgccaaaaaatgcaaatcaaatggggcaacacggggaagcggcggataaaagggaaagaaaggagaattaaggggggggggcaatagataagggatagggaaaatgggtaggagagatgggattggaaaagcgagaaaaggaggggcgacaaaagatatggaaaatatgcgagggttattggagggcgggggggggggataaagaaagaaacgaggggaaagatttgagcctttctaggatgatgcaataagtttttattttcattttccggaaaaaaaaatttttttggaaattttattttaatgggaaaaagttttaaaatattttcacatattttgataattgagatagagcaaatttgaatttttattttgtgtatatatataattttattggtttagaaaatgatcgttcacttttcgttcaaaaaatttaattagtttaagatttgctaaaaaggtggaaaagcaaagaaaatatgagactcctaaagaaatcatttaacatcgggaagcaaagaggtgaagaatagagttgtacgggaccgggacctggtacagaaaaacacgtacaactgagtacctaagtcccggttttgactgtgaaaagtcacggtttttcaacccaaaaagtcccgatttgcccaaaattcccggaattagtttaagatttgctaaattggaaaaggccccaaaatgggggacacccctttgcatcacgggtgggcccgtgtcaaagaggtggggggggggggggtcgtagcgaaggggaaaagagggaaatttctgaaaaattggtcatttcttaaagaaaattcattaaaaatttctaaaatttttccgccgacccccccccaaaaaacctctttttttcttcaaaaattagctcaaaattgcaaatgataatatttttttttattcagaaaaaatgtaatgaataaaaaaatgtcgtctttggtctgaacattttaaatttttttaattgttcggtctctgaaaaatggttgtgtttttttatgttaggtaattagaaaagtgataaatttcttcgccagaagtacccagctggtttttatgcacagtttgttgttccatttgggccagacaaaaattgtggtgcgtcaatgtattggcatttctaaataacacttaaaaacggttttaaatattttataaaacacttttgcgtccattcgttcgccgtaaaccgacaaatacatgacaaatgctttaaaaatcatttgtttgtaattggtcttctctctcctcggtgtgatgcttctgctcctcgacattcgtctttcttcatcgcaaacgctttcgatccgttgtttaaatcgccgcttttttggccgatcagaactttaaaaagctttttacttttttctcatatttttttcttaattaaactaattaccttttcctttttgtgtttcctttttgttgggaggagaaaattaattaacttttttttaaatttaaaattcaccttgtttattcgctttagaaaattcgcccataatttctttgaattttttaaccttctcctcaaactctgaatttgcttcttttttttctctgattgtctcggaacccgtcaattgggccccacacgtttgggccactgcatgtttcggatataactttttcttagtcatccaaatccaacattcttggtattattcgaaagttcttcatctagctctattagccttacaaaaaacaaaaagattttgtagcatataaaaaaattttaagaaaaatttcaaaagttttgactttttgcaattttctagttataactttttagcaattgtccaatcgcgaagcgatatattataataccttctaaacatgtagccttcgaatgataccaacaatcttggctttggataactaagaaaaaaattataaccgaaacatgctggggcccaaacgtgagggttaactgacgtgaccggatagtttgatattgataaatagggatgccaatcatatggatatccatatttttttcctggactgttgagggcctgaaacgcacgaaaaacatgtttttagcttggtttgaagcttctaggatgggtttccatatccatattttccatatttcgggatttatatccatatttccatattttggcatttttatgcatattttatgtccatattttggcatttttcaaaaaaacctctattagaacggcccccagcagctaaattagcctttttgagcccaaaaaccgaaaaatttttcaaaaaatcattttttcgccaaaatttctcgagaatattgaataaatttaaattttcttaaaaattaataaatttatgtcaaaaataagcaaaaaagcgaaaatttcgcttttgtggttgattttgcgctaaaaaaattaataaattttagcttttatgtttttttcttttaaaatgattgcacgtaattgccgaaaaaattcgagaccaattccgaatgttgaccgactaattgcgtctttgtcaaagcgccttaccgagccaaaaaatttggaaatgtatctcatatgcaatttcaacccaataaatttgaagaaattt

SEQ ID NO: 5384 - DNA, 3248 bp, Heterodera glycines
  unsure (1)..(3248): unsure at all n locations
aatagaggctggacagttgggaaattttgcgcaatttttggcaaatattaaaactacagttaattttaaacgtgagctattaaaaaaaatctntaaaagaagtcattggcctaggaaaaatggagcagcacaagtttttatcagattttattcagaattgccatttttttaaattaaaatctttataagttcaaggaaaatcatgataacattcaaaattttaggactattttaattttgcgaagttcaaaaaccttttacgttttttttggctcacctaaattaattttttaattaacaataaatcattttttgagatttttaaggacccgtaacttttgtcaatttcttttttatccaaaaattctttcgaattctttattagcagaccgtgcggaatcgatttatatgaattttgtcgcaattccatgcgtttaagggtttggacggttcagtcccaaagccattttgtcatttcagtcccgggtctgtaactcttcagcgattggttaccgccaaaaaattctttcggattctttcattagagaccgagcggagtcgattggtatataatttatatacattttccatcccgtcagtatccttcacttttaccttttatagtcatgaaaagggagggattgatgaagtttgttgtatctttttgttcatgtgttataaatagggctatgtttttaggtttttacatattttttcctgagctccgcgtggcctgaaacgcacgaaaaacatattttttttggctgttgttaagctacttttcgagttattagggcctattttctaggtttttattttgaaggaatagaccccaaaaaccggtcggggtcgttttcgcgtggccattttcgcgtgagtacctgtttaggactgaaattggtcggatttgtgcaaaacatccatgtttcgaatcccgaacccgaattcggacaaatttcttaactttttaattttttatttcttacggctagtatcttctacaataatttgtcagtttggtcggatgtgcgtcaaacggaaaaaataattaaaattggttctagtcggttttacgcgtcccatgacactttacgcgtcccatgacattttacgcgtcccataacattttacgcgtcccatgacattttacgcgtcccataacattttacgcgtcccatgacactttacgcgtcccatgacattttacgcgtcccatgacactttacgcgtcccatgacattttacgcgtcccataacattttacgcgtccgatgacattttacgcgtcccataacattttacgcgtcccataacattttacgcgtcccatgacattttacgcgtcccataacattttacgcgtcccatgacattttacgcgtcccatgacattttacgcgtcccaacaacactttacgcgtcccatgacattttacgcgtcccatgacattttgtgtccatggcagggatggcattccgaggccccaaaaattttcggaaatcgaaattccgtgccatccctggtctcatggtattatagttgtcctaataactaagagaaaaacttttttttgttaggtattcaataaagtttttaactataaatttcgttgttaaacctaaggttatcatgacaactcatacacaggcaactcgaacaatggcttattgttagactaggcctaagtttaggcttttgtaaatttttttttcttatattagttgaatttctgttgacatcaataagtgtgcttagagttgcttttgcacttctcttttatatgcaaccacgcgaaaacgtcctggcccgccaaaaacttacagaaaaatattttttcgtaaatatttctggcttttttatcaaaatatttgtcccagccctagtgattagtagggcttccaaaaatatggatataaaatttcggaatatggcaataaaacctaggaaaaatcgcgaaatatgaacataaaatagcaaaaatatggacataaattttccgaattgaggggtaaattttcaaaaatattcttcaaattcattaaattcaattaaaatacatctaaaatggctaacaaaatatggacataatcgcgaaatatggaaaaatatggatatagaaatccatcctagaagcttcaaaccaagctaaaaacatgtttttcttgcgtgtccaggaaaaaaatatggatttccatataattggaagccctagtgatcagtgatcccggaaatccctgcctgaaaagtcaatttttgttgattattttgtgcaaatctcaaaatttttgtgtttcgtacatatattttttgccatttttatatgtccgatttatttaccgaaattgagaggttttcatcataaattgcatttgatcactgatgaattatgatcggttggccattcttaaataattcatttcttcttccactaatcaccattgtttcgttcttttgtccgtcactcattcatcgtcagcagaagacgccacttttgtgatgctttgtcccgtttcttctgccggtggcggagacaatggccttaattaagcgcaatttgaattatttaaacaaaattaaatgccttttttatttgctcacccaatgcaattagtgtcactatcaagccaaatgaacacattgttacaattgttgccccaatttccgtctttccaattgaccgccgctgtctccccaataattttgcatcgtttcattatccaaatgtcgtcccattcattttcgtttgccttggccaatgtcagcttttccttcgtccattcgttcaccaattcaaatggcaccatttgtattgacggcacatgaacagaaaaatgaatttcgtaactgacggaagaaatggcattggcacgaagaaaatgctaaacaatttgaaaacaaaaatcagtgatttttcgagattatggccacacctccttgaaattgttgatccaatcagtgttcgtttgttcgttgtgatcttcgcaatgcaatcgcttgggttggccatcttttctcggaatgtgcaaccatttggacaatgcttggccagaagaaattgttgaaattggcccatcaaaatcatcaccaaacgcagcgggcgacagaccaaatgaatggattgaaaccaattggttgagatcagtgagaattgtcggcgaaatgcgacgaagcaaattgtccaaatgatcaccattgtaaaagcccaaatgacgaatgtttgccgaaaaaaagggccaaatttcgcgaa

SEQ ID NO: 5385 - DNA, 2942 bp, Heterodera glycines
caacgcaatcgcttgggttggccatcttttctcggagagtgcaaccatttggacaacgcttggccagccgaagttgttgaatttggcccatcaaaaccatcaccaatcgcagcgggcaacagatcaaatgatttgattgaattcaattggttgagatcgatgagaattgtcggcgaagtgcgacgaagcaaattgtccaaatgctcagcatttgaaatggtcaaatgaccaatgtttggcgcaaaaatgggccaaatttcacgaacaaaaatgtcccaaattggttggccattcgtggcgtttgaataaggaatccacaaatgtaaatcgatgcctcttttgtcaaaaatttggtgattggaacgaagaaaagcgatgacgaagtgatcaatgtaactgcaaaaagggaatgaatgcttttattgtcatagctctctgatttttaattactaaatctcaaggctcttaaaacggattttgctgggcaacggacggtcgttgggcattggaaatggcacaaatttataatccatcagcacagatagtttcggttctggtcctttgtccttgctaatttggatcgttctccaaattgtcaattcgcttttgccatcgaaatgtttgtccaccaacgcattgaaacgtggcgaaagaagtgccaatttgaggccgagttgagcatggtcaaaggatgggaaaatgtccatccaaacgtcgttgcaaatccaactgaaattatggaaaaacagtttagtcaaataaatgactaatttgtttgacttttaaaatattttaccgtcggttcatttttgaggcaattagcacaatttggccgagctacgaatgatgtcacacaatatatagcagaagaattaattgagttgggtaaagcttggatttttagggttttcctatttcttgacggatattatcagggaacggatttatatgtttttatatatttttttatctatcgcatgaaaatctcaaaaatagcatttttacctgttttcctttcaatcagagcgagtttttagcacatatttattttgggctttttgggaataaaaacatattttggggtttcggcagtttttgtcacatattttggcgattttttggaaaaattaggtttttttttacaaaaatgtcttttttggcactcaaattcgtggtcaaataaatgcccaataatttttcaaaattttctttttttttgtatttttttgacccttttcatgactttttcacttttaaggcaaaatttgatttttagcgaagaaattccgaaaaatgagtaaatctttgagagcgaaaaaaaatttacgccaaaaagcattacattaagctagcgaaattgataaaaaatgagacttttttgagaaattaacttattttttgagcagtttttttcaatttttggcacatattttggccttttttttgggttttagcacatattttgggggttttttggcacataacacaaattgcagagaattaattgcgttggaaactttatttttatggtactaccgtagagttgagcggaccgggaatgttgggcaaaaccgggaccgggacctgagaagccgggacgggaccttggttttccgggaattttttaattaaaaaaaaaatcaaattttaatttatttcaagtgaaaataacacaaaattaatttttattttgctatttattttataaaatctaaaagttaaagctaaattaaattaatgaaatttttaaacgaatttacttcagttatttcaaacaattaatcattttggactaaatgatcgaataatcttagaaatccagaattgcttttcacataatttttcggcacgtttttccaaaaaactttttgggaagaaaggggtccggcggtgcagttaggcgccgccgggaaaaaattttgaaaatttcagtgagatttgtttacgaatttcaacaaaaaggctggttttttggactactgggctcaatttgtatggattttctttaaaaaaattataaaatatgcgcaattaaaaaaaagtatgaggaagcatagcttgtcgatatgtaggaacccatgaacaaaaagaaaatcaaaatatttgaatttctgcagagtgattgaaccaagggaaagaagtggaaaatcaagaggattccatattcgtgatcattgatcagcgacctcggaaacccccggcggatacttgttttctgaactttttaaaccaaaaaaagaatttgaaaaaatgttgaccaaaaatgtggatacaaactcctgtagtaccatttttataattagagaacaaagcggaaaacaatgaaaacaaaatttgagaagctcgaaaaacacagaaaaagggaacgcaacagaagaggagaggaggaccaccaaagagaatattttgcaaaatgatgaccatttgccgggcgttttaccttatccccccacccacaaatcaatcgatcaaataatcaattggacggatagagggaaaggatgaaaatagcattggggaaggaggagagacggaagagaaagagaggaaaaggaaaaattcgaagcaagaaggagggggagaaagaggaggaaaaggatgaaaatagcagtggggaaggaggagagacggaagagaaagagaggaaaaggaaaaattcgacggaagaaggagggggagaaagaggaggaaaaggatgaaaatagcattggggaaggaggagagacggaagagaaagagaggaaaaggaaaaattcgaagcaaggagggggagaaagaagaggaaaaggatgaaaatagcagtggggaaggaggagagacggaagagaaagagaggaaaaggaaaaattcgaagcaaggagggggagaaagaagaggaaaaggatgaaaatagcattggggaaggaggagagacggaagagaaagagaggaaaaggaaaaat

SEQ ID NO: 5386 - DNA, 1790 bp, Heterodera glycines
ttaaaaatttttaaaaaaaattaaaaaaaccaaaatttgtttaaaaaattaataactaaatccgtataatagtttttgcaaattgcgaattgtttaggaaattcagtgtccaaatttctcccccatagttgcaccaccatgatcaccacacctgtatcaagcgccaaattttcggttggatttgttccgcttcaactttgtctgcatcgtatttgagcaccttcgggcactctctatcggcattgggccagaacttggccatccgacgcacttgttgaattgtcagccggaaaatcaggaaaatcagcgtcaattgaaacgacaaaaacaacagtagacgagaaaagttggcatataatttcgaattcgctgcaaaacgtccggcaaaatgagggcaaaacatgatcacagatcgatggccaaatattttgcgtaaaaagagcagaatattcttttttgttgcttccaggtaaaggtttattggtcaagtgaaaaatagacggtgaaagtggtgcatcacagtgagcacgttgttattaaggcacctaaattatataagaaagtggagaaattttaaaatattttagcacttactcaaatctgacacttataacgcggaccaaattgtccggaattggagttgaaggaattgacaatggcgcaagcaaacccataattcgaaccatgtcgggcatttcttggaaactttaaacgtccgccaaaaccatttttgctcttccatgaaatgacgcaatgcatttctaaaatttacgcggcggcagcaaagaaaacaccgccagccaatcgtcggcacaaattgggctaaaatttggcatttttaataaaattaaaattacaaaaatcgcgaaaaaggcactataaaaggcacaaaaaattgaaaaaaaggcatgaaaaggcacgaaaacctcgaaaaaggcatttaaaatttttttattgaagatttttaagcagcaaaagacgtaaagccattcaaattaatgcttttcacattcacacaaagattagtttttggtctttaaaagataaaaataaaattattatataataaatagggatgcaatttatagttttcactatttttttcctgagctccctatagcctgaaaagcacgaaaaacatgttttttaggggggttgttaagctacttttcgagttattagcaactattttctagttttttatttttagcaactaaaaaatagtaaatttttgaaaaaaactattttcaactattttggcgttttgccaaaatttgttacgaaaaatgcataaaaacgaaacttctttacataatataaagaaaaaataaatccgggaattgcacaattaataaagattattgttttggattatttagtgattaatatataatattaagtgttaaacatgccaaaagaatcttcatctcgcgcatttcttttcaagaaatggatttccaacaatgttcattttgccaacaacgtataaaacaacttatttttaaaatttctatcaatttttgaaaatttattttagcgggaaatatcacttgggagaaagataaggtaaaatgagagagtgctaactttcagtcccagtcaaacaaaacatttttgatgaaggagggtagagaaaataattttaagagagaatgcaatgggaagaaagttttgttcccttctttgctgattcctttgggcatagacggagaattatcattatatttctattgtctctatgtctttgaatctattcacgataaccctctctattaaaattttttctctgt

SEQ ID NO: 5387 - DNA, 4158 bp, Heterodera glycines
cgccggtgaacaacggatttgcagtgacgcgtcgaaaaggcccccttttggggcatttgcgagtgaagcgcccgcttctgtagacggacgtacgaagaagggaaaagcgatgaaaaactattcatttgagcaaagtgctaaacgactaattaaaagaaaagcataaattgtccactaacttttagaccatttctttttgaacttcttcaaaagtttttgtctcatttgatcatcccgtcattataattcataccagacaggtacaaaataaggtagaattaaaatacatataaacgcagaaattggatctctatctgtttttacaaaattgcattaacaaaaacggtttggtctttttatgtgcccgtaaaacaaatgtaattgaaaccaagtcatacaaaaacaaagcaaaaataaagcgaaacgtctgaagaaagtctccctgagaaaagcaacagcaacggaatgctcaaataaataataaatacgccatttcttcccctcctctcttctcattggcaccgaacttcgtccgcccggtcatttccatccctctctattgcgcacccgcaataccaatgacacccaaagcaatggctccgcccgcgttcccagtcctttggctctccgattgatcatcaccaacaccacggcctaaatggcatttgatgaaatccgataatggtacatttttatagttacccaaatcgtcccgaaattggtgaacgacgagcgctcggccgatgacattgttgaagccatcgaacagcgaaatgagaccattggtcttgttgatgatcgaaggaaaatttatgctgctgccgccgtcgatatttcctaagtcgccaacatggcgaacatcatcctaattagaaaaatggaaaaggaagaaattcagatattataaacaaaatcgtgggggaaaattaacatttttaacaacaaaacaacctcaggtccaccatgggcttggttggtcggattgaaatggccacgaaccgtttcgtaatcaccagacaaatcgccaaactctaaaatgttatttggaaatgaaaaagacattaaattgaccatgtatggtgaagccatgctgagtcgaaccactaaggcctgaaaggtttccgctaatcgtaacactggtgtccctcgtatcctggggatgaaaatataattgatgaatttttggatcaacagacctgtttgaatgtaatggcccccttcgtgtccttcattttcgggcatgccaaccaacacacagccttcctgggacccgaatcacactgttgcggatgcttaaacagagaatgtaaatcaatttaatttccttttcttgtcaaaacttaccacggggagttccatgagctgttgaagcgatttgatcagagctccacatttgtcgtcaccactcgcacagcccaccaccatattccaccttttagtcgtctccgcagctctgtatgcctgggtcagttgaaggaactccttaaaacaaaatgcatcaaaaatttgtaaatttatgacgtaaaaatttcgacaatttttggacaaaatctgttaactaatttaactcaaattttcaacaaaaagtttcccggcggcgcctatcggtaccgcccgccttacgccccacttattcccaaaaagtctgaaaaatctgattttttgagctgattgaattcaaataaatgatttgcttatttcctcaccaaaattgttaaaaatgatcataggaggcaaaaaatatgaaatttgatacatattaattgattaattttcgatccgcaccctgctctaatacggcggtcccaataaaacttacgcgctgaaaatcctccgaacgagttgacatgttcgtatcaaaagcaaggccaatgacaccacacgacaaaatgggaccggcatttccgctctcgcggctccttatcacgtcctgtgtcccctcccctaaaattgtaaaagcaaaaaataaatgaattcactggaattgttaccaaagtcatcctttcgtgcatgtacagcgactgagcgcccaatgatgttattctgcccatacagtgagatcactttgtcagaccaattacttttggcgactcccttcggatcagcggtgatatttccaagatctccaacgtgacgactgacggcctgtaaatatttcaaaacaggttacttattaaacacatcaaagtgaagtttgagaattgtcgctgttcacgaattaaataatttgacaaaaaacctccggtggcccatgtttttggccaggatgactgaaatgctttccaactgaatggaaattgcccgaagacacagaaaggtcgccgaactctgaaaaaaacaccatttgtcagaaaatctaagaacaaattaacgattgatcgtcagcgcatgctgctggtccggcccgaggccgctgattacaaccgtaacatgcacatactctccatctttctaaattttagaatttattttggattattttaataaaagcaaattgcctgctgaaacacgacggttcccacaccctcttttgagtctgcccggtagtttgcgagcacgcaaattgccttcttgtcgggtgcctgttaaggaaaagtgttaaatatgaaaacaattaagtctccttttcagtgtcgctttcttagaaattcatgttgatgcgagtaattccctcaaactgtacgtacttgcggcacatccatcagtctgtccagagccaccataacgttgttgcatgcgatatcatcacgcgccgtctgtctcacaatgttccaatcttgtccagctgctatcgcgtcttgatagttctctttgagcttgaaaaatgcctaaattaaattgaatttcaaataaaccgtctcaaaaaggctcaaacagcgaacaccgaacacaaaaggaaacgcacaaaaaaaccaataaaaactaatggaaatgagaaaaggaaggaagaagagttaatcaccacattcagacaaaaacgtttaaataaataccaaaaataaaataacagaattgttagtgcaaaaataaaaagacaagtccaaacagcaacaacgaaaatttaaaaaaaaaagcggaaacatccaaaatcatactgaaacccaaattttccgccataatgaagcacgaggtagcattaaattgcataaaacaagggacgagaggcaaatgctcgcgtgggcatgttctcttcgaacacagagaacaatttcgaacaaaagttcggctgggagtttccttcccatttggtcgtcggccaaaatgttctaccctgtgtttcagtttcaaaatccatatcaatttttgaattcccctcccacaaacttggaggatgaatttttgggaatttacagctgttaatcatacggaaatagaaaaaaattatacagaagattggatgaaatttttagaaggagaagtcggaagggagccgtcgagaggataactgtaaacgaacggaacagactaattttactgtcataaggggtggacggccacccaaaagcaagatttattatgctaggaaaaccaaccgaatcatccattgccgtttttcagttgattgtgatggaaataaaggtcaaaaacgaaacgaataaatctaaacaagaaaataactaacgccgaaataaatattattaataagaaatttaaatgaagacaaacgaagacaaagcggaatgaagagaagaacgactgatgagagaatgggctctgctgaagacagaacaatgcccgggtaagaagggaatcgataaatggagtatgcgacgtgcatagctgcccgatggggtcaactgggcgtcgccaactgggcgatgggaaccggtcacttaggcgcggccacttcggcgcggccacttcggcaccctatataaaatgactatttcggcgccgaaaaattttcaaaatttttttttcaaaaatcttgaggaaaccctatcaaaagcaaaaaaaattctcgctcatggactacatcatatcgctgaagagattcgcaaaaagacgtcgacgaattaatttcttctacgaaagtggtgtttcgcaaagcgccgtcgcgcgttgctttctacagaaagaaattgccctcagttcctctggttcccaaacccattatcacacgatggggcacttggcttgatgccgtcacttttactc

SEQ ID NO: 5388 - DNA, 1853 bp, Heterodera glycines
ttttattattatgcaattaaaaaaataaaaagttttattcaaatgaaaattaataatttatttgttgtctctcatttttttaagtaaaaaactataatttgttgagagatttttcatttgttgagctttgcatgaccccacattaattaaacaataaaacagtgaaacaatggtgaataacgggcagcagaagaagggagggaggtcaattaattatgatttaattattctctaatttttattttacaattttaaaaacgttacaaaattctggctaatagcgaatttgttcactttaaaataatttacaaattgaattatatccaaacataattatacaataagtttactaattagtcagcggggacaatgaaatgttggccaattaaagtgtgttaatgatccatggatttgttttgcttctgtcagtctctccgatcagcgcctccgccgccgtcccccgagggtcaatagtcctcgccggtttcaatgtaacggaccaaccattcggagacaaagctgaaaaatgaaaaactttgaaaattgctcaagaggcacgagatagtcgtaaaatggccaacactttgtaaaattatgacaaatcgatctaaccaattaacttttaaaatcaataaaataatggacattttcgttttcaataaattctgattatcggcgatggataagcagcgatggcaacaacaaatcctctcaactctttctctcgccggaatttctgtgctaattttagccaattttatgctcctcaaaattttgttgcattggccgatgcgcaaaacacacaaagacaatttaaagtgggtgatttgaaaagtcattgaagtggccacggtggtcattttgatcattttggtcgtccgtccgtccgcgccgccccggggatttaaagagagcaaataatacaaaatccgacgagctaattgagctgtcttcgtggctctagtgaattttaatgatcagtgccgattccttgtcgatatttggcaacatttttttagtaatagccaaattaggaattctcaattaaaatttcaaatttccttgctaaatgtacggtttttcccgttccaatgcggggaagggttggggagggagaacccaatttcataagaaattggatcattttccgcctcgcgtccatctcttaaaattccaaaaattccaaccccccgcccccgcccccttttttttgatcacaaattatttttactccaaatgcccttctttttacttcgtcgtcccaatccgatgccgtcgttggacgagtggtgggagccgccgccacaatttcaacagttaatttaattggaaaaaaatatatgcctcaaaaaattggctacatgcgtttaggcaaatgcaaaaacaacgactttggcctcaattggcagctgaagatggacaaaatgcgaaatggcgcgtggatgtaagccttttcaagaacgagtcatcgtcacaatgttttggcatttccgcttcgccaccccaattcttcgggctaattaattgccggtcactcaaatcggcacaggcacactgtgggatgtcaaatttggcaccgaaccccaagcacttttttgtatattcttagctggacttgtacttgtgacttgtaaaattcgggactagcgaccgaatgactcgaagaaatttctcgagaccaagaatagaagagaactctgcagagttgagagggtaaaaacccaactcgtactaggccaactcgtactgccccaactcgtacttttttcgacaaaaaaatcgtcataacttttgttaaagtcgggcaaattaaacattcttggtatcattcaatagcccttaaaattctctat

SEQ ID NO: 5389 - DNA, 4859 bp, Heterodera glycines
ttgaattttcatttcattccttttttcagagtgtcgtcgatgtgtcaagtttgccgtggttttccgaagatgtctctgaacgttctgggagttcttctgatgtgagtgccacccagtgatacaccgctccttaatgtatttacttgctctgtttgtatatttctgtgtatttgtgataacactgctccttaatgtatttacttgcctctgtttgtatatttctgtgtatttgtgataacaccgctccttaatgtatttacttgctctgtttgtatatttctgtgtatttgtgataacaccgctcctcaatgtatttacttgcctctgtttgtatatttctgtgtatttgaataaatttcatttaatttgttttgactaatacgtccatgcgtgatgaaatttggccaaatttattgacatttccttccccattcaaacaccgaaaagtccttgccaaatgatttgcaactagaggcgaatgaccttttgaaggcgggggccttaaatatcaataaggctatacgccttatgacaagcgagatttctgccagcactgatgcttggaagtcatcgcacgtgcgaaagaggccattgatttgccggaagacatcactttgtggtaaattttggaagtgcggcaaaagtggggccgacttttaatgattcattttggtttccaaaatccattggtatttccaattactatcagttttcatttttggcacttttggaagtacggcaaaagtggggccgacttttaatgattcattttgggttccaaaatccattggtatttccaattactatacatatttagtaacctttcggacatcagacaagattttgacctcacgaccaaactggcaaacccagtgtttgaccagacgatggtggaaaagcccaaggacgcagccaaccaggttttggaaggccccaaggactcagccaatccggtttttgatggccccaaggactcagccaatccggttttggaagggcccaagaactcaaccaatccggctttggatggccccaagaactcaaccaatccggctttggatggccccaaggatttggatggacccatggacgcagaacattcggaatttttggtaagactaatttttgaattttttttgaacttttgaattaaggaaaaattgaaaattatcatcgaccggaagacgtcgcaccaagttgatatggagaaagttcatatcttcaacgaaataatggacaaaaaaaaaaatttcgcgccgtgctgtatgcagcacattcaggaaaaaatttgtgccgcgtgaactctccatttggcgccagttggaccatccgaacaccgtccgcatgcacagggatttccgagagtctggctatctgttcgaggtgctcgactacgcacagaaaggcaacctggtgagttcgatcaacgcggtggtaatcactacactggactgtttgaaaatttcagcatacctacctggaacgacacggcccacttgacgagacgatctgccgggcgtggatgcggcaactgaccaacggagtgtcctatttgcacgaaaatcgaatcgcgcatcgggacttgaagccggagaacattttgctcttcgaacgtagcgttctcaaaatcaccgactacggcttcgcgaaacaggtaatgaatgccacgcttcaacacaaacgttcaatttcctttttcagtgcgatgatggcgacatgtcttcaaccttttgcggaactaagctttacaaggccccggaactgctgcagaaacatgaatatgacccgttcaaagcggacgtttggtctgtttttttttcgtttccattcgctgcttttttcatcttcccttttcatttcaggtcacttggcgtcatttgctttgttatgcggaccaacacaatgccgttcagcagaggcgtgagccgaacacacatggtggaggaacagcgaaacagtcaatatcgattcccttctcacttggtcatcagtttgcagtgtcgcggcgccattgacacgattttgacgtttgatccggagcagcgtccggtgagcactttttttgtgttttttgaattttcaatttcaattccttttttcagagtgtcttcgatgtgtcaagtttgccgtggttttccgaagatgtctctgaacgttctgggagttcttctgatgtgagtgccaccagtgatacaccgctccttaatgtatttacttgctctgtttgtatatttctgtgtatttgtgataacactgctccttaatgtatttacttgcctctgtttgtatatttctgtgtatttgtgataacactgctccttaatgtatttacttgctctgtttgtatattgctgtgtatttgtgatacacctctccttaatgtatttacttgcctctgtttgtatatttctgtgtatttgaataaatttcacttaatttgttttgactaatacgtccatgcgtgatgaaatttggccaaatttattgacatttccttccccattcaaacaccgaaaagtccttgccaaatgatttgcaactaatttatcgaatttttgtctgctgcttgaacttttcaaaatttttttgtgataaaaaaaccgttaaaatttgtttctccgtggttttaagggtcgctgatcacgaatttgacatttattttgaccaatttctaatcccgaacccgaacaaaaatcgaaattttgaatttttcggcacttttccagttttatacaccccgaagcttccagtttatacactcccgcaaaaatagtggaattttataaaaagccaaaggggggacccttttgttttgcaaaatttttttgtcataataaatcttttataggggttttcggtgtccctgatcatgaatgtgccactaattttgatcagttccgaaccaaactcggaaaaagtagaaaattcaaatttttcaagttacgactttttttgttcacgtttgggttagggtgttttatcgaaatggtaccaaatcgaagtcgttcattggagttgcccgtaaaagaaccgtgaacggcacaatttatcgcagttaccccttggagcgttaaattgtataaatgcatgtctcaaaattcaatgctgacggtaaaattaaatcagtttaacatagggcccggtgcggggcgggatcccgcgctagattaggcgcaatcccgcatttttttgggggaattgcgggattaatccagcgggatgaagtcccacaaaaacttgagttccaatccacagcaggatccgcaaatttgtttttttttgtgcgggatcccgcaggaatcggcattgcattttttgaaaattcattaacagaataccaattttctgaataaatttaaaataaattcaattaaatttaaaacagttttccatcgtatttcatccaaaatttatgaaaattttcccggcggtgcctgttggctcgccggactaacctttaagctgattattaattctttaaatattctcaaaaagctacatttggccatttttggacaaaatctattaacaaagccaaaaaatttcaaaaaattttccaggcgacacctaattccaaaaagtttctaacaatttgaaaatgggttttttgaaaggccatggccaaaaatatacgaaaaaacaatgtaataagttttcttaaaatttgattattaacagaagatggtttgattttggttatttatatacgctatttccgacaaattgttgttacctatttttttctaaatttgacttcccctgtgtttagtgtatataaatggcgcttttccacctttttctccattattctattctttttcttccgccctatattttgacccctcggcgtcggcaccaccctaagtaattaatattctaattgttttcttttttccaattttaattttgttttcccccctcattaagcaaatggccggtgactccgaacgcgacacgggcaggcatcatcaccacaggcatcatcgacatcgtcattcagcgcgcaccgttttgagaaatttgggctaccaatcaccgcacaaactgggcagtggacaatacagcaaagtctacaaaggtggttcacaattccatgtgcttttccagcaccatttcccttcccttttcagtgtttgatgccgaacgacctgccgggcgtggatgcagcaactgaccaacggagtgtcctatttgcacgaaaatcgaatcgcgcatcgggacttgaagccggagaacattttgctcttcgaacatggcgttctcaaaatcaccgactacggcttcgcgaaacaggtaatgaatgccacgcttcaacacaaacgttcaattttcttttttcagtgcgatgatggcgacatgtcttcaaccttttgcggaactaagctttacaaggccccggaactgctgcagaaacatgaatatgacccgttcaaagcggacgtttggtctgttttttttcgtttccattcgctgcttttttcatcttcccttttcatttcaggtcacttggcgtcatttgctttgttatgcggaccaacacaatgccgttcagcagaggcgtgagccgaacacacatggtggaggaacagcgaaacagtcaatatcgattcccttctcacttggtcatcagtttgcagtgtcgcggcgccattgacacgattttgacgtttgatccggagcagcgtccggtgagcactttttttgtgttttttgaattttcaatttcaattccttttttcagagggtcttcgatgtgtcaagtttgccgtgttttccgaagatgtctctgaacgttctgggaagtcttctgatgtgagtgccacccagtgatacaccgctcctaatgtatttacttgctc

SEQ ID NO: 5390 - DNA, 3231 bp, Heterodera glycines
ggacattcgttcgctgcacgtcttcaggacgggccattcgcggcagttattatattctatgggggatattcggccgcttcgcggcctcaggacgggcgcttcgcgctctttttaaattttgtgggggacattcggccgcttcgcggcctcaggacgggcgcttcgcgctctttttaaattttatgggggatattcggccgcttcgcggcctcaggacgggcgcttcgcgcttaaaaatcgaatgcattttagtttaaattttttttataataaaatactcgttttattaattaaaaacaacgtcgaaaattaataattgaatatttgtttaatttgaaatgaaattaatttttttgcaaattcaaaaaataaataatgaaaatttttaattaaaaaaaattaatttaaataatttacatcaaaactattttaatttattaaatgcagtgaaaattacccaaaaaatgaacagaaaaataatgtacaccgaccggatccgaacttgccccccgccccctcaaaatgatgcctcagaatccccaatcacacagggattctgaggtcttaacgatgtcaaaagtaaaatctgattgcgtattcgtgatcagcggcccaaataacccataaagacatatttttggatgatttttgatttttaattaataaaaatatgtaaaaacagcaaaaaatacaaagaaaataatttacacagtccggactcgaacttcgcccccccccccaaaaaagatgcctcagaatccccaatcacacagggattctgaggtcttaacgatgtcagaagtgaaatctgattacgcattcgtgatcagcggcccaaataacccataaagacatcttttttgaaggtttttgtgagaaaaatttttccactcaaaaatcctggtcacccaacatgatttaaaatttaataaataaggaaattttttttattaaatattaaaaataaaatgcattttaattttaaattattaataaaaaacaacgttgaaaattaataatatttattttatttaaaatgaaattaatttttttacaaattcagaaaaatattaattgaagcaaaatattcgatattttataaactttaattttgaccagaagcagtttcaagcaaatatgaaaagatgtttatcttattatttgttacatgaatttataaaatgaatggtatttttaatattaaaaaaaatgagtacagcagttgattcataaaaaaagtattaattaaaataaaaaatgttttaattattactaaaaaatttaaattaattaaaatcattgaaaataacacaaaaataaatagaaaaataatgtacaccgatcggatccgaacttcgccccccccaaaaaaatgatgcctcagaatccccaatcacacggggattctgaggcctaaacgatgtcaaaagtaaaatctgattacgtattcgtgatcagcggcccaaataacccataaagacatgtttttggaagatttttgttgaaaaaaatttttcactcaaaaatcctgtccaccccctttggtcccgaatgccagaatcacttttatttttgtatctttattttaaaagatgataaaaaggtcaaataaaatttatataatagagcaaaaaattgcggatttttgtagtattttactcttctctaatgacttttcagaaccgagatataaatttttttctgaaaaatcgaaaatttccagaaattctggaataactttttttgtttttgaggtataaatttcaaataaatctcataaaattctcccgattttttgctattttttatgctttaaatgagctgaattggaccattttgaggcgagttatgaattttcaaagaatcacttaaattcccaaatccaaaaaattgacgatttttcaaaatttttttacctccctccaaaaaatccaaaacgcaatataaagtgcatattcgtgttcagcacctcaaactaccccagaaaagtattttttggcaattttaggagcaaaaaaatttctcacgaaatgcaaatccatggggtcccccctttggttttgcatttaaaaattcatttttattttatatctttttttatattaaagataaaaataccggacaaagcacattagatagagcttaaaattctctacaaaactgctctaagacaatttttcgctaaaatcaaccgctgacgagttataggcccgggactgaaatgtcccggtcaggccaaaaaatttttctatttccggacaaaaatggaaattttttcaaaaatgccaccaatcgatagagctcgaaaaacggttgcttgaaagtggtctccgttttcctgggaaaaatcggcaaaaaataataaaattcaaaaacgaaaaattttcgagggggcctagctcgaaaaattttgaaaattttcaaaatctgaaaacgccatcggatgcagctttaaaaactacacaaatgctcaagcggcgccaacccgctccgcttaacccccagcgagttattcccgaaaaacggaaaatgccgaaattgggtgccaaattttgccattttctgcagcattggcatttacagatagccccgccaaataagcgccaagttttcccaaacagtccaacttaaaatcctacctccaagcattttccgctcccgcttcttcccgcaaagttacaggccaccaaagacggacaaaaaaaatttcacgccgtttcagcgccgccggcgctgaaccgtccaccggatcggaatgccgatagttttcctgaatgcgcctcaaaaagttgtaagacccttccaccactttcagacccatcccgacagccgttcgactcaaattagtttttaagacgaactgcaacgtttctctatagtagtataaactagcgtgttgtggcgcagtaattgctcggtgtagacagtatgctttgcacagtaattgctcggtgtagacagtatgctttgcacagtaattgctcggtgtagagtatacttttggtatatatgggcgggtgctgacatgagcgcttcgcgcaaaggacttcgttgctagtgcatgcgcgtttgataagtgatgagcaagtgcattcggctgcttcgcggcctcagacgggcgctttgcgcttctaaatattgtggactcattcggccgcttcgcggcctcaggacaggcgcttcgcacccgttttttaattttttggggggaattcggccgcttcacggcct

SEQ ID NO: 5391 - DNA, 1120 bp, Heterodera glycines
  unsure (1)..(1120): unsure at all n locations
aatattttaaattaattaaaatcattgaaaataacgtaaaaatgcacagaaaaataatgttacaccgcccggatccgaacttcgcccnccccctcaaaatgatgcctcagaatccccaatcacacggggattctgaggtcttgacgatgtcaaaagtaaaatctgatcacgtattcgtgatcagcggcccaaataacccctaaagacatgttttttgaggattttgggtgaaaaaatttttccactaaaaaatcctatgctcactcacccctttggtcccgaatcccaaaatcacttttatttttgtatcttttttttaaaatgtgataaaaatgtaaaataaaatttatattatatagaaaaaaattgcggatttttgtagtattttactcttctctaatgacttttcagaaccgagatataaatttttttctgaaaaatcgaaaatttccagaaattctggaataacttttttattttttgtggtataaatttcaaataaatctaataaaattctcccgaatttttgctattttttatgctttaaatgagctgaattggaccattttgaggcgagttatgatttttcaaagaatcacttaacttcccaaatccaaaaaattgacgatttttcaaaatttttttacctccctccaaaaaatccaaaacgcaatataaagtgcatattcgtgttcagcacctcaaactaccccagaaaagtattttttggcaattttagaagcaaaattatttttcataaaatgcaaaaccatggggtcccccctttggttttgcgtttcaaaatttatttttattttatatctttttttatattaaagataaaaataccggataaagcacattaaatagagctcgaaattctctacaaaaaagctcttggacgatttttcgttaaaatcaacccctgacgagttatgagcccgggactgaaatgtcccggtcaggccaaaaaatttttctatttccggaaaattttgaaattttttcaaaaatgccaccaatcgatagagctcgaaaaaaggttgcttgaaagtggtctccgttttcctgggaaaaatagagaaaaaataataaaattcaaaaacgaaaaattttcgag

SEQ ID NO: 5392 - DNA, 1299 bp, Heterodera glycines
  unsure (1)..(1299): unsure at all n locations
ttcaaagaacaaggtggaaatantcgcgcaaaataaactccccccccggatcttttaagttttgttttgacggggaaaatcacatcggattttttgtcagatatttgggttaattacatcatgatttccagggcaatttgcgtgattttctacgttcccatcgtcctggtgcggaagagaacaaacaaaaccgctctctgccaaccgctgaacagtatttcaattgggctgctcaaattgcggacggaatggcctacttggagtcgttgcggttttgtcacagggatttggcggcacggaattgcatggtaagccaatcccaagtgctaaaaagtgccaagattattttgatttgttttccaggtccatgctgacgagtctgtcaaaattggcgacttcggaatggccagggacatttattaccacgagtattacaaaccggccgggaaacggctgatgcccgtgcgatggatggcacccgaggcgctcaaagatggcaaatttacgctgaaatccgacgtttggtgagtgtgggttggctaactgtgtccatttttcacacgattttcaggtcctatggaattgtgttgtacgaaatgttgacacttggtaagcgataaaaatttttcaacaattttacggaggaaacataatgcctccgctcaataaaaagtgtattttattctaataaatgggtttttcattaaaggacagcaaccgtacgctgggcttggcaatgaccaggtgttcaactacaccggtgtgcaaaggcacgtgttgcacagaccgacggattgcccagacttttggttggtcaatttgaatgcatacgcaaatttcatttcgaatttttataatttatttttaaggtatgcgctgatgctgtcgtgttggagatacgacccacgagaagtaaataagactcccaaagcaatggcgtggtcaattccgtgcctctgggaggcatccatggcgacgaattttttctatatacaaaaaataaagaacttaaggggtaaagcactgtgcctataggcgtagccggaaaactaagatttttaatccattttaaaatcctcacaattttcaactttgttttctaaattcaagacattttttgggccccaaatcccctgacaacgccatttgtcataacagccatttaagaagtttaacaaacgaatcacatttatttttaaagcgtccatcattccgtcaaattgtcagacacctcacaaccagttgttcagattttattgatgaagagttcaaagtggttggtttttatctaacttttta

SEQ ID NO: 5393 - DNA, 1740 bp, Heterodera glycines
acaaacaaaaacttgtctcatttcgtttcaaacagtttctccaacattctgttccaatttcgcaacgcaattgcggcggaggaaaatccggaccgttcaatgatggcgacaaagagtctggaagtgctgatcagtcgggtggacgacggactgatcaacgaagtgagcagcagccacaccgaaaacatgcgtccgctaattgttttgttgttgctattgcctttcagaatgcccaaatccttctgatcgttttgaaatcggccgtcggtgcgaccggcgaactgtgcatttccatgtggttgaaatttgtgcagaaattgcgtgccaatgtttttgctaatttggcatcacagggtacgcacctgactgactattgaacacacttgaaaatgatggtttaatctctgcacttcctccctttttagtgcttgtggccatctcaccgcttatgaagtttgacgtgtcaaaagcaatattcaacgagctttttgtggtcagggcgacggaattggccagttcaacaacgtaaagatgaagcgaattattttttaaaacaattaacaagatgtctgatgctttttttgtagcgaaagtgccaaagtgtacagcattttgctggcaatgatcgacaacaaagcgtacaaattgggccaacaccttcccgaccaaatgtctctcaaactgtccaccgaatcgcattttgccatcgttaaaagtgcgccatcgtccgctgtttcatctcttattttgtcatttttcgcttttgcttaggctgtgccgaactgctgctgaccggcatggtcgacctgtaccaaattgtgatggaacggctgctgaaagtgctggacggttgtgacctgttacagattgattccagccaattggtgtgatttgcgaagatttaaaacaagtaaataatctttttccatttttaaaactaaggcaagggcactcgtcttcgcactgcaccgaacacaaaacagagagctgagggaaatgattggaaaatgtgttggcaccatcggactgctcgaccttgacggccgaacagcatcctctcgacgaagcaatcccattgatgatgatgcaaatgcgactgcaatggccgaaattgtttctgttgacaacaaagtgcaggttgcgtaacggtaaatgccaaaatagtttaaaaaatttcgtttttcagttcaccgtcaacttcatccatggcattttctcaagattggacgaatgcgaacagtccgagacggccgtcaaactgcacgccgtcatctcctacattctattggtgccgctcaaagagcacgggatggacgaacaaatttggaagaagttggcatcgaatgtcgtcgaggcattgaacgcgtcacggcaaaatccgttccaagtggaccaatcattcaaaattgacgacctcttcaataaaaacattccaatggggggacaggagcagcaacatttgtacgcactttaatttaaaatgtcgccgggttctttcaaaaagccaaaattttcgaattttttgtaaatcaaataaaatatacgggtcaattttttgttgaagggcgattattgaccagtcgtgcaattttcaacaatgggtccgcggtttgtacttcttcatttgtgacaaggtgggaattataatagtgtcacagaaaaacaaaacggtactctgtaccaggggggtgtaaggggggaacaatagcctaataagtagttcaattttcaggagggaaa

SEQ ID NO: 5394 - DNA, 3956 bp, Heterodera glycines
ttctcgggggggaaacgagctgctcccgtaccagggatggttccatgatttggcatggggaagggttgtatcaaagtgcgaacgggcgtttccccctcatttcaaaatttattaaattaaaaaaataacgtgtttttctacaataaagtcccaacccccttaattaaggaaatgctttcagattggcgacccacttttgcgcactttgttcgcctctttgtgctgtgtgaagcacgacgcttcaattctgggcagaacaatgtctgtccgctttactatttttggtgttttatgtgtaaattttatggtggtttccttttttgaaggtgcaaaaacatcccccacatgatcatccaggctttggtcgaacaaaacgacgcaattcttgacaaagtgagagagaacacaaataacttctgattaagaaaaagtttgatcgcatggcaaactgctgcctcaaaaatggctaattcggatagctaatctgccattttcgagttttttttttcagtttgagcaggaggcacttgcggtgttttgcgcggtggttggaggccaaatttgttgggccaacgacgcgatggtcgctatttgtgccatagtggacgcaatggaacgcttctttgttggccgcactgctgctgcaattgttggcacgaggccaaaggacaaagtgagttttggacgaattttgatcaaaagtgaatgggactgatcagagaataatccgcaggactttttctttcatcaggcttaatatttcagtaattaataatactgaataatgcttttcataaaaatccaattttaaagttgacatgtttcttccaggatgtcctttccgaacggtttgatgcgttgatcagcaaaatccttgcccaacccaacccggacagtctgacggtggtgccgttgagtgtgttggccgcccaaaagtgcaactaccactttcggtcattgcgttggcttgaacaattcgccgcgtcacccaaaaacggcacagatggcgacaacggcaattttcgacatgacttttattttcttttggaggtgcttccactttgaccccccccccccgtcgtaagaggcctcggacacccccctcccccctgtcccaatcgtccgtcgtatggtccttgggtgagacaccccttgtacatgtatgttatagcatgagaaatgcaaattgaatgggtccaacacatctccgccggaacctcgccgcaaaaaaaacttgctttttcattgaattcttagttaaaaaaaaaaaaaaaaattaaattaggcttgataactaaatttttgatttttccttgatttttttcgacgacgatatgttctttttgtccagctctcaaattgaatacaattgaaaattcatgaaagaatccccaattttattcacccttcatccattcattgcccatgttcttttatttttttgacattctctctgttcagcgactgtattcccacttgggcaattcggacggagtgttgggcaccttccaaatgattcgcaaccgaaccatgccggagccatttgagcaaattctggcactgaaagtgcagggcaattatgtggacgcgttgccgttgtgccaacaattggtgggacaggaagtgagtggaaaagaattcgaaactcgggataaatgaatctttgggcgtagaatttaggagaatttacctcccaaaataatattcagaccaattcgaaaaatcaaaaattattggacaaattttgtatttgtgccatttaaacgttaaatatttttgcctgttccagaatgagatagtcaaatgtttgttgcgctccaaccaaccgttgttggctcaaacattcattgagcgcacattgcgacacattgaacaacaacaacatccgaaccatgaaaatggggaggcaattggcgccactgacggggaaaatggtgccgtaaatgctggagatgatgccaaaatggccgcaggcgattgcagcaaaagtcggcgactgcgcgagtatcaaatggaggcggtgtgcaagttgggcgactgggaccagctcgccatgttgcatcacaatttggtggaggaaggtcgaaacagaaacaacaacaacaacggtggaccatcccaaaatgtggaaagcgatgcgcaaaacggtggcagtattgagaaatggggtgcaaaaatggcagcaattttctgtaatttgcgccaattcgacttgaaaagctttggtgacggcattgaacgggcacgcgcttcgctggtcgatgcgttggagcgaaccacgctggaggactcgagcacaattgcgcaggcgcaccggaacatcatcaagtgattggacgcaaaataaaattttttatttaatttattatttgcatgttgaaacgtaattcaaacgccattaaattttaaaaaattctaaattgacaagctgcttcgctatatcccaccttatcttcttattgcaaactgatagactttgattatttgaaaatgcaatttgctatttcctatatttagactgaggtcgctgtacgaagtggagagtgtgcgggccgtgctctactcgggcggtgacaaatcagcattgttgcggaagaccatcgccgattgggaggtgcgtcggggttggggatgagtaacccaatggacgttgagttttacctctgtactacttcaactttttggccaccaccgctttagcgccagtccgacaattcgctgtccttcgccggtcgttcggagcgtgtgctttcactgcgtgcggaactgttgcgcgtcatcgacttgccaaacactgcgctcacccaatgccgtctgctgctccggtgctccgagttggcacggcaggccaactatttgcaacggtcgtggacatacattgccgaggcgaaggcactccgccgaacgtcggcggtgatggaaaacaccaaacaaacggagggaatggaagcggacacggccattgacatggaggaggccaaatatctgtttcaaaaggcaaaaaatggcagaaattcatgaggattttttaaacatggagcagttcaattttcccatcaatgaatttttaatttttttaactaaacaactcacatgcatttaaatttaactaaaattagtaaaaattgggttttcttttacaaacttaaggaaatttaccaaaataagaaaaatattttttccttcaaattccttttttgaaaaatttcaacaacattttaactttaaatttcttgttgatggggaaaagttcaattgcccctgacaaaaatatgcatttaattttcgacgattatttccattttcgaaaaaaactgttttcagggtgaacagttccaatcaatcaatttgctggagaagaccattcacacaaattttgcggaactgtgcaccgaactgaacgcacttaaagtggacatcggcggggggatcagcgacggcagtgccacggcgaaaaggcttaggaaatgtgtggtgctacaacagaatggggaacaggacggaggaggagcggacattgttgaggttgctcaaccgcaacagcagcagcgcagggaaaattttgttgaggtaactgtcgtcaatttaatgtttttttaaatttttttttaatttgacattggcctccactactttctctaaattttgtgaagaatttgcagttttcagtcttattttgtaattttaaaatttgtgtatgtaaagtattttgttggacgcaaatgtggaatacctacctggaaaagaataccgtttcaacacctaggcacaaatgctgctggccgagttcaatgagcgcgctagtgccaaacaaatggacgacttgctcaacacgtacaaacggttggaaaagtttgggcagttgaccgagtctttctactaccgatatgcgaccttctacgacgtcaagggcgagtcggccaaggaggtccgtgtttgtattttgttgacctgca

SEQ ID NO: 5395 - DNA, 1758 bp, Heterodera glycines
  unsure (1)..(1758): unsure at all n locations
caaagtgatttgntatcattataaccaaaattgttagcatttacgaatttgatgtttttgtgtgttagagatgtgaaaatagtacgccaacacgagaggaaaagaaatgcatttttactttttgaactctactacaaaaacgggatgtctaacctaaaacatttgatatgttcgatgcagaattttctgctatattttctctgcacagtggagttgacccatagtgttcttgcaaactaaatattgattaaaaatttaaattttttgattctcaaaatgaatttatgaaaagtttagttttttaaatcctaactttgaaattttatcattggttagataaaatttgaagcaattaaaaaatggctgatcgtgcggggttccaaagtggatttggtggtgctgctccaccgtcggcgcgtgggcgtggtgggcctcgcggtcgtggccgtggcgctgccagagggcgaggacgtggaaaggacgccgagaaggaatgggtcccggttactaagcttggccgtcttgtcaaggatcgcaaagtccttacgattgaggagatttatctccactcgcttccgattaaggtttttactttcttttctttttataaagcttatctactatttttttatcattttaggagtttgaaattatcgatcttttgctttctggactgaaggacgaggtgctgaaaattatgccagtgcaaaaacagacgcgagcaggttggtgaaattgcattgggggcatagaagacgcccaaattaaggacagcgaactcgcttcaaggcttttgttgcaattggtgaccacaacggccacgtcggactcggagttaaatgctcaaaggttttgccattcaatcattaaattaaaccttggagatgaagctttgttttcctaattcaaaatccaaataaaaatttctttgttgatcttccggaaaaatttttgctgcggttttaatactgatcaacaatcaacatcctttttggttaatctgtacactacccaatttgaataaaaaaagaaaattcgattgtttccgagccggagtacgtaattaaccaaagtggacatattattcctaattcatcgacccttgctccatttaaaaatattctaatttaggaagttgccactgcaattcgcggagcgattatcgccgctaaattagccatcattccagtgcgtcgtggctactggggcaacaaaatcggaaaaccgcatacggttccatgcaaggtttctccttcatattcagtagtattctaatctgcaatttctttttgctgaagtttaaattcattagtccaaaaaaccgctccatagggccaaatataatgcggatttaggtattaaaaattatgcttttcttcaggtcactggcaaatgtgcatctgttctcgttcgactcattcccgctcctcgtggtaccggcattgttggtgcgcctgtgcccaaaaaattgctccaaatggctggcattgacgattgctacacttccggtgggtgtgtgtggttaaggatctgtaatcggtacgggtgagaggcaatttctgtggcacctattggcaacacgtaccccagctcccccaccggacccctcataccaaacttttggtttactccaccccatttcattcatcttccttggaaagcacattttcctacattgtgctacatttaccctttttagccgttggccaagacggcaactctgggcaacttttgccaaggcgacttactacgccatcc

SEQ ID NO: 5396 - DNA, 3789 bp, Heterodera glycines
cagggtaccgggtcttgaaaaagccgggtatccgggtctggacccggtcgggtacccggacccgtgtaaccctaaaagaaagaaaacaaaaaaatgaaattaaaaaaaacgctacgccaggaatttatatgaaaagtcacttttttttgtcccgggattcccggcacggcggggttccggtctcgtcggtgctctaatttttaggcagaatacctaagtaaggctggaaatgatgtttcacagtttgaaaaaaaaaattccggctcgtgtgtagtttaggccccatacacaaaaatttttacatttcagaataaaaaaagccaatctataggttttcggggtcgctgatcgcgaatccggcatccatttcggccaattccaaatcccggacccgaattcaaacaaaaagtcataaaattaaaatttttgtatttttcatttttagtctaaaaatggtttaaatgatttttaattgaagcactgatgactttcagttcgtttccgtgtattttggggcctaaaccacacaagagccgggaaccctacatttggggatttcaatgaaaaaaagttaattaatagggattgtttttttatgtaaatacatatatttttttcctggattctccatagcctaattagtaggaaaaacactttcttttttgtgtttgcgaacaaaagttgggacttctatttacatattttggactttttcgtacatatttcacaaattttcgtatatattttcatttttttttgcatattttgaggatttgagaatttatagaaaattttttgctaaaaattaaaaaaaaatttttgaaaatgtacagtatccctaagaaatctttttttttcaaaatggatatcaaaaataatttttaaaataataaaaagtgattctaagccaatttaggtaatttttcaggcattttgtacctgtttcaccctttactaggaatttttttcaaattttgggttttttgtacatatttcttaaataatttagcattttctatatatattctatttgcatatttcgcgatttttcttacataaaaaaacaatccctattaattaagtgttaagccccaacgtctgcttttgccagagttaattccattttgtgaaaaataacaatcgggcgccccactactgctctgtcttcgcatgctcgctatcggcgggggctctccacgtcctcagaaatagattcctgccaattataaaccgcgaggaaccgattgatgtatattttttgttgcatttttgtacgttttgaggcttggatcagtcccaaagccatttggccacttcagtcccgggtccataactccgtccaaagtgctttccgccaaaaaattctttcgtttcatgcattacagaccaagaagcgtcgattgatctatcatttgtgagaaatgatttagtgcaaaattctagacctttaccctcggtcaatgtgttgtaaagttgactcaaatccaaaactttttttgaattttttcgcctgtaactttttttgcaacttaatataattttgtgctttataaactggtggtttacatagttattaaaaaacatttattttaattgcccattttcacagcgactcaattttgggctttctgttcaaaatttcatgaacggaaatcggtaattaaccgaagtcaaaaaattattttgtaaatgccaaatttaccatttttctcattactgttttttctctgtttctccggaaatagaccagcaacgaatgctaaatggataatttatcgcggtaaagcacttatcttagcagaagagtgaatgaacaaaaaggaacggccaaaagcaaagggaggggaaaagaaagggggcgatcgatacggcgggggcaagggaaaagggtggcaaaagcccataaatttcaacgccatgtcaaagccattggcagtcccatggcctttttgtttttgttttgaaagttagcgatgttttgctgcttccaaaattgtaaatatgccgaggctgccgaaattgaaatgccaatgacgcaattccatccaaattatgtggaaagtctgtgggaacttttgtcatttgttacatttcaaacacaaaaagggtgtagtgcatgatagacccagctattcaaccccccgagctaagcatggaacaatatgtcgcgagctgcgaacatgccaaaaaaccgtcctaaaactcgaaaatgtgagagatttcgcactatctttttttcaaacgatcgaatcctgacaaatttggtaccatttgaaagctcttgacgagcttaatctaaaaatcgggaaataaagtcgaaccgatgccatctgaacactgggacagctgagtcccagtgaaaatggacacttcagtaccaaaaaataataatcgggaaataaaaatttaaaagcaaaattcgtaaaagggagcatgcgaagacggagcaagtagtggggcgagacgtatggcggaggaagcagtctgacgagcgccacaggcggttgattttcactgggactcagctttcccagtgctcagatggcgtcggttccaatttataccttgttttttagacagctcatttttagttgctaaaaataaaaaactagaaaatagttgctaataactcgaaaagtagcttaacaacagccgaaaaaaactcgtgtttcgtgcattttaggctacggggagctcaggaaaaaaatgaaaaaactataaatccgatccctactggcaatgaaatcttccccgcaatgaaagcgctggcaatgaaaccggacaataaaagcgcggcaatccgacgataaatccgttccctgataattatccataaaaaagattggttctagtcggttttatgcgtcccatgaaggattatgcgtcccatgaatgaccatccccagtttcttaggccaggacttttttcttactttttcaatacccatatccttggtaccaagcgaaagataaaagtctcgagattttataaatgcaagaaacgagcaaataatggcattaaaaaagaaattacaatgaaaaaatacgaaattcaacttttacgagtataattttttgtctattgccttcagctaaaaataaagttatataaaagcttctatagaccttaagcttttgtttaataccaagaatatgggtattgaaaaagtaagaaaaaagttatggcctaagaaactggggatggtcattcatgggacgcataatctgtcatgggacgcataaaaccgactagaacccggtttttagtcctaattttaatttaaccaaatctgagatcgtttgacaaaaagtattcataattttgctcgagagcaaccaaatttcgaattctttgatatcattcgatagctcactcaaagtgtgtcctcttctgttagcctacaaattttcaaaatgcatatctttcctttcatggcgtgccaacaatgccaataaaaatgaaggataaaaagaattttatgctttccaataataaccactaaattcgggaaaatttcaaattgagattgaaaattttgtgtgtgtttgtttatcctcctcctctcattgtcagaacaggtcgtcctcctccgccgccgcaattcgctctacgccacccgtccggtccaccaatccgtccatcactttgtcctcctcctccccctcgtcggccgaagtgtcctcctccgcctcgtcgtctgcgccgactgctgccgaatgctcatgcaacagcacatactcacgcgagctgaacccgaaccgcagcacgtccttctccctcaactcgta

SEQ ID NO: 5397 - DNA, 1012 bp, Heterodera glycines
tttgtcaggtggaggaattggtccagcggggcacgtcggcgaatcttcaaagtgtttttgtgaaatcggacgcacagaaagcatcaaaaacagtctttgcccgcgctggaacaaaaagattcgaatcgcttatttcttcgagtcgaagcagcgattgcgcttcaatgtgtgcgtttcgtcacttcaattggccctgtctgatcacaactttgtcccttcccttttcagctatgatattgattcgggttcggatcagctttctgatcacgactttttgggccggtgcgaatgcgaactcgcggacattgtctccgcgcccgacggcactctctcactgcctttgaagtcagtgccaaattcaatcgatcagtcattgatagcatttggacattgattgatcagaaaacccaacaatatgatgttttccgcgcagttatttcagagatttgcccaaccaaagcggacaactcacaatttgttctgaagaaattgacgaggggcagcgcgagtcggtccatttcgtatgccatggggtcggactgaaacggtcgcactctctgctcaatgctttttgcgtgggccgaggccaaagaatgtttttggagttttgccgaccgatggacaacggaaggtggagaaaggggaggaaaaaacaatcgaatggcggagtgttgagcaaaattatgccattgttttaagtcgtcaaatggtccatcggacggagaatgcccgcggggctcaccgctcggcggaatggaagccattcgaagtgagtgttcgccatttgtgcgctggcgagaagggccgccaattcgtcgtcgaatgttacgaattgagagaagggacgggaaagtgcgcgaatgaattaccctatttattattggcactgttttcagtgccgtaatgccatcgtttttcattttgcgattgcttttacgttttttttattttttccctttcttttagccaccgtttcgtcggctcttttcgcacttcggtgaacgctttgctc

SEQ ID NO: 5398 - DNA, 2061 bp, Heterodera glycines
  unsure (1)..(2061): unsure at all n locations
aaaattggcttaaaatctcaaagtttggtcattgtagacaaaatgtgttaacaaatcacatgcaaaatttcgaaaattttccggcggcgcccccccccccttttatatgtatgtttatctcgaagaaagattctagaatttggttcaccacatcccgaaacgggacacacaaatttgtttttcctttactttcaacaaacataaaaaatattcattcattgtaaaaatataattggtaacaaattctgtgttgcatcatggaagttttatttttattgacaacattaaaacttgagaactttctttggtttgtgagaattttctgggacgagacgatttattggggagaagagtgagcgacaacggctaaacaaaatctgttgcattgaacagcgaccggaggaagggcactcggaagcgatggtcccttccgaatttgcaaattagcgcagttatttcatccgccaacgcacgccgttgcgatttgggagaaagggcaatgagtgggggacgcgaggaagtggaactgaaattggaataagatggaagcaaattaaaagggtaagttatatgagagcttggctaattgttagccaaaaggtcagtccccggacgttgactctctcacatttcattttcgccgccgctttcctcgttgcctccggccaaattccttccgtccaccaaatggagcaaatggaattgcaaagggatgggcggcaaattctgggaagaaaacaacaaaaattgcattttacatagccaaacgaagtgagcacccaatgcgatggcatcggcgaagggacgcgcggagtgttcgccccaccggcgcccattaaattcaatgcctttgagtgttttcggatggtcaacaaaacggtgagatgaaagtggagcgaatttggcagatgagcgaaaaaagtgcgcgagacgaaattgagcagatcggaatccgattcagaattctaaaaagggaagaaaaagcattgaaaacaaatctcaaggttaatacagtcaggagcaagattataaaactaattaaattgacaaagactaattcagaggggataggcgtacaatcggctctaacaattaaatactaattgttttttgttgctcccaccattcttcggccaagtgtcccggccgcactttccggggcacccgccattttgcgcgcgttcatttcctgtgaccagcgaatcacaatttggaaggccaaagcgttcagcgacaaatggcgaagggtcggaggacagagacgacggacgagcaaagtgcggacgaagggcgaatcgcgggagggcacctgacaaagagaaacaaatgaaagaaagacaaccgatcaatgcgctgaattcggggggaccaacctcattcatcccaccgtagaacaacaacgtatcgggcgggaggagaacggcacaatgccaaagtcgagggggcaattggtggtcaattgggggcacttggcgccaacggtgaatgattctgttgaaagaatgggttttccaagaaaaggagtaatcttttttttaaattttactaaaataaatttaccataaatttcccccagagcgtctaataacactggcagatcctattttttctgaattttggtcccaaaatagccaaatttagcgaaaatagctaaaaaaatttcctattttcccattgcgttgaaaactaagaaaattaaaccggataaaacttcttgactggaacggaacaggtcgctccccccccccaaacaatttttttaaaagaagctcttcgggtgcctctctccaatttttttttctgtataaaggcctagtttgttggtttacctttcatctaaattgtttttgtcgatgtgtcgctgctgcttcggactattcacagccgaacgttcgtaaaatgccgcgatgtccaactcccaaaggtcgctcaaaggccttccggcggtgtcgagtccgccgaaacaaagaatctaaaaaagaaaacaaccttaaaacatggaaatgcattcattactcgacctttttctgcgcttccacaagtgtaaaanngtgacctgca

SEQ ID NO: 5399 - DNA, 3619 bp, Heterodera glycines
cacggcatccgtttttttttaaattttagtttgacatttttatatttttaaaaaatttagtttttggcaggagaggtttggcattttgacattgctaagctcccattctcgggtggaattggttaaaaaagcatgttctcgctttaattaatacagcgattgtttgccgaaaatttcgcgacagatacggtagaaaaacaaaatgccaaacatttgaataattaacaaatgaatgtggggacggatgactcacatttctgtgccacgcatcaaattcgaattggccctccagcggaattggcatcgaatgcttgacaaatgcgtccacaactgcggtttggccgggactgaagcggacggcgtgagtttccgccacgggactttcaacctcaaacggaaaaacctatctatcaatcaatcaatactaacttgatcgagactctcgacactaaggttatagccaggggggagtaaagactcgttccccgaaccgaagaatttttttaatggaatttataaaaaaatatctcttttttaataaattttgtcaaaaaatttctctggcggagcccaaagccactgccggaccccagcccttccggcagaactttttgtgaaaaaatcggtaaaaatgattaagaccgatgagcaaaaaataaccgtcgctcatgagggggaagggggggggcttaatcgaaaatttcggaaaaacttaggtccaaaattgtgcaccaatataaaatagtgtgtccaattggtgccgggtgttggctgataagccacttggccatcaagttggcacagaaatgagccgtggtagacaatttcggtgtcatatttggccgaccgttcggcgattggttttggctgaaaattattttttttgaaattcaattattttacacggcttttctgtctcacattttcggcaattggaaaaatgagatcattgccatgccaagtgacctaaaatttggaaaacttgctcatattttctttattttttcccaagggtgtgaccgaattaaatttaccaaaaacttcgaaaatttttcaatttccaagtgggcctgcccccaatctttgtttgctgtaccaaaattcgttcggccaccacttcgccaccgaatccgccctcagggcaccgacccttgccgtggcacacgcggggccaaggccgtcgtgtcagctgagacgggtcgaacctaccaaagttttttaatttgcagtgatggttgagaaaccgaaaatttaactaagagacgcaatacgatacttaaaaaccctaagccgagactttccttaagtcacagattacaggctacgcgtccgtaaaaaccgtataacgggtccggtcgtattaaatctctctactcaaggccccaaaagccaaaggccaaacaaaaaacgaaaggggagaggtatgcattttataaaacatttttttaagattaagggttgagagggttggacttgctgaaatatttgaaaaaacggagaccggggcaggtcgagactctagacccggatcctgcacgggattttgcgggatcccagtccgcaatcctgaattttttgaaaaatgctggatttgtgggattaatcccatcggatgcggtccttcaaaaatttttaattccaatcccgcagcggaatccgcaaatttgaaatttccggtctctagccgagagcaccggaccggtaaatactttctcgctttggacccccttcctttaattatgtgcaaatgaacacaaaataacacctgtccaccgatttgattccgtcgggaacacatcgatttgtgaagggcgtaaccgcaatttggaaacgacaatcgatgctcatttatttttgtttgttctcttgttttatgtacactgaagtgagcgggggcggttaaaaattcaaatgtaaagaaaaaaatttttggaaaatttgtgcattttatggcattaaaatttgtgtgtcaaaattgagagcaaaaaaaactaatcggagcatggaaacttttttattattaattagattttctaaaaagtgttgttttcaaacatttaaattattattaaaatattattttgaaatataaaattaattttaatattattattattttttaattaaatgtaaattttatagtgtatttgagcctatgtaggtaactttttggttattaaccacaaatgtatgggtaatggacaatcaatccgcagcaaattgtcggggcgaatgcaaagtgatcggccgtcggtggaaaatgcaggcgagaaaattcaacgcattttgagttgccgccgagaaagtgtcaaaacaacaaatttgttttcaattgtttgattcattttgggttttagcggcgtatggaaaaggaagggagagaagggaaaggaaaggaaaggaaaggaagggagaggaaaggctaacataaaaaaggccgatggggaggaaaaagaaaggaaaaagggaggagagagaaacggaagtgcacccgggaaatagcaaggagagacgagagcggtggaggaatagacgtgggggaagagagtgttgtgagagaggagagagagagaaatggagagagtgagagaaagggtggggaggaactagaaatgggggaagagagtatagtgaaagttgagagagagagcgagagagagaggagcggaaaaggcccccgaaatgtcggggttttatgaaagccgttaattgcacttcaaataaaatggaagtgtctttaaatgagtttttaagacttttttgtttttgaactttttcttttatcttttttccaactttttataaaattttgtccccgacaaacgtgtctgtctgcccccgacagagtgagtcttttaaaacattgccgaaagaattaaaaactaaaataattccacatttttatttcaaatatggcatttcatcacagcattcaggtaagagaccagacaattggggtcggatgtaaattcattttttgatcggtcaccaaataaatgtcaataattttgcccttctgatcaatgccatcgccattttgtcaacgccaaattcattgccgatttgccgccgcctcagcgtcaaattttttagcatagtcctcaaagcaatcagcctgcgtttcgagcactaaattgttgttcactttatcactgattacctttttggttacatataattagcgttaattaacttaattgttatttatttttacccctttgtgcccaggaaatgtatttgaaattgttgtggtaaattgtcgcgagaatggtgtccaattgaatcccgaaaatggccagtgtcatttccccataaaactgggattccgtcgtcagccctacagagttttcgcagtcgaaaataacagcaagggctgagaatatgaaaaattatttctttgtcataatggcataagcaaattacggaggaagatactgtaaactgtaaaaaccaaaaatacggtagtactgtaaaaaaagaaaaagcacaagtaactgggaaacttgcaattcctcaggttacgaagatggatcggaagcaaacggaacgacattgcttcaattcgatgttttgcttgcgcaagccgacgtctctaaaaccaaaaatttgttaatttaat

SEQ ID NO: 5400 - DNA, 3451 bp, Heterodera glycines
agctcactctccactcggcataaattcatggcccataaatggattggcaaatgccaagaaaagaattccctcttgcaaacgcgaaattgcgtatttagtcatcgcataatcggcatattcattaatggaattaaatcattgaaaattatttttaaaaaattgttttctttttgttaatccaacatttgccaagtgtatgttttgtgagattttatttgtcatttataagcagcgcaacgttaaaggaacagaagaaaggtattgtgggtcgattagcaaacaatttgagaaatttatgatcagagcgacggttttgcaccgttagtctgcatttacaccactaagaaaatgctaaattttaattttaaaataacaacactgaaaattttaaaaaaatcgttttttagcattttcatgtcaacaaggtcacatcaaaccatcttaaatttgctactgatttgcctgcacatattcgtccacatagccctcagagtaattggcaagcgtttggatgacttaattatccacattatcgctcattaattggcatttttttacattgttgtgcccaggaaatgtcctggagattgttgcggtcaatagtcgcaaaaatggcgtcaaattgaattccgaaaatctccggagtaagttccccgcgaaattggacttctgtcaagccaaaagagttgtcgagacggaagtgagaggcgatgtctgaaaatatggaaaattatttctttgtcataatagtaatggcaaattacagtcgaatgatactgtaagcagtaaataaccaaaaatacggtaaaagtgtactgtaaaaaagaaaaagcactggaaaacttacgatccctcatgttgcgcaagcggttttcaaacagacggaacgacattaatttaatccgacgttttgcctgtccaagccgttgcctctaaatccaaaaaaattgtttaaataaattaaaaattaattgaaaaaacattttcttccacaattttttgtctgatcaattcatttctgatccattgggcttgttttttgtacaaaaaatggtcaaatgcaaaagaaattcgcacatttgcccagcgaatatcaaagggaagtgccgccacaatttcgacatttaattcggtcggcatttttctttttggcatttttgaattgaatttttggcataaattttgtaattttgggaggaatttggcgaagaatttgtcgctgttttgggtggagggcgaaatgaaagggcaaatgaatgagtgaatgattatgacgcccacttttgcgcactttgccctccgagcagagactaaaaccaccgctgagaggagggtggagggggtcaaatgtttaccaaaacgaaaccatcttaaggtgccgtttaaaaagttagttactgatttgcagaatggcacccgttataatggaaattttttaatattttcctcgggtactcgaagctgaaatcccgtttatttttcaagggcatgtaaaaatttccgataacaaatgaaggccgaatgtatcgggtcggaccaaaaacaaaattggttttgcatttcagcgactcggcaccattttcacgataatttgtgtggccacttttttggcatgttttaatgggtgcgcaatttggcacaaactcaaaaaggtcaatttttacaccaaataaaactaattcgtacaaacccaactcatattttacaaaaacctaggcctgacctaagcaattgtacaagttgtcatgacaccgttaaaaggtcagtgggttttcttgacttatacgatgtttttttctcgtggaccaatctcgacgaatatggtaccaatcgatagctctcgatgagacagatcgatctaggggtgggggaagttgatccgacaagtataaaccggtttttgaaccgattcaaaacacaaaaagtgaagaaaattgggcatttttaaattcctgcagttcattaacaattttcaaacaaattttccaaagtaagaaaaatttccacgatattccttgaaccatttgattgatttactagctcactctccactcggcataaattcatggcccataaatggattggcaaatgccaagaaaagaattccctcttgcaaacgcgaaattgcgtatttagtcatcgcataatcggcatattcattaatggaattaaatcattgaaaattatttttaaaaaattgttttctttttgttaatccaacatttgccaagtgtatgttttgtgagattttatttgtcatttataagcagcgcaacgttaaaggaacagaagaaaggtattgtgggtcgattagcaaacaatttgagaaatttatgatcagagcgacggttttgcaccgttagtctgcatttacaccactaagaaaatgctaaattttaattttaaaataacaacactgaaaattttaaaaaaatcgttttttagcattttcatgtcaacaaggtcacatcaaaccatcttaaatttgctactgatttgccgccaaatattcgtccacatagccctcaaagatattggcaagcgtttggatgacttaattatccacattatcgctcattaattggcatttttttacattgttgtgcccaggaaatgtcctggagattgttgcggtcaatagtcgcaaaaatggcgtccacttgaattccgaaaatctccggagtaagttccccgcgaaattggacttctgtcaagccaaaagagttgtcgagacggaagtgagaggcgatgtctgaaaatatggaaaattatttctttgtcataatagtaatggcaaattacagtcgaatgatactgtaagcagtaaataaccaaaaatacggtaaaagtgtactgtaaaaaagaaaaagcactggaaaacttacgatccctcatgttgcgcaagcggttttcaaacagacggaacgacattaatttaatccgacgttttgcctgtccaagccgttgcctctaaatccaaaaaaattgtttaaataaattaaaaattaattgaaaaaacattttcttccacaattttttgtctgatcaattcatttctgatccattgggcttgttttttgtacaaaaaatggtcaaatgcaaaagaaattcgcacattggcccagcgaatatcaaagggaagtgccgccacaatttcgacatttaattcggtcggcatttttctttttggcatttttaattgattttttggcataaattttgtaattttgggaggaatttggcgaagaattttgtcgctgttttgggtggagggcgaaatggaagggcaaatgaatgagtgaatgattatgacgcccacttttgcgcactttggcctccgagcagagactaaaaaccaccgctgagaggagggggggagggggtcaaattgttaccaaaaacgaaccatcttaaggggccgtttaaaaaggtagttactgatttgcagaat

SEQ ID NO: 5401 - DNA, 1772 bp, Heterodera glycines
ttcctttggcgaccgcttcacaaccaacaaaattaaaattgcatttaaacacaatgccataaacaggctgattgatgcgttaagacgatgaatttgaattagagtagagcgggaccgggaattttgagcaaaaccgggaccgggccttgccgggacctgagaagcctggaccgggacctcgatttttgtccgggaccgggaccaaccgtgaaattttaaaaattcaaaaatattcaaaaaatttaaatttaaatttatttaagtaaaaataatgcaaaggttgtgaactttcggatgcgtaaactcacaatttgtgttctaaaatgagttttttgagttcattaatccatagagcccggttcgggacgggattccgtgcgggattttaattaaacgaaagcaaaatacattttttgcgatgagaataagggcaaagcatctctgtatttaaatctgttaaattctcaattttttgcgaaaatttaaacttttttctcattttacaaaattttgggtcaaaatctggtaaaatttcattaaaattttcagttttcctccgacgtcgccttccaggcaacgccggacttcaaaaataaattcatcaaaaattcataaatttggagttctagaaaaaaatccaacaagtttcagcaaaaatctcgaattttccagggcggtgcctattggcaccgacgcttttcataaagttaattaaggtgaaaaaacgttcaccaaacacaagaaaaagctcgaaaaattcataatatttgaacaaatgaatatgagactttatgaagtgttgaagtttactttgaatgcataattattccgcttatgtactttgaaattggcttccccatactttaacagtaagtttattttcagctgtcggcactgtttatcacctggtaaaatgtacttcattgaatatataacaaacattagggcgcctaaggcaataaaataattattgataattatttcgctccttttatttccgcttatttgctcatttggagatttttaattaatgtttgggtgttacctgtcaaaatgcactttgattataataaaacattagagtgcctaaagcaataaattaattattaataattatctcaatctttttatttcaacttatttgctcattcggagaatagtctggcaaggttttaagcaaaatgtattaattttctttatattagtgaaaatcatataattataagtgggagtgttaaaaactcaaataaaaaaattgtaatgaatcttcatgtaatttcattttcaaggctaaggataaatttctatgtataaattttagtttttaatttataaacaaaaaatttcaatttatctttttgcattaaattcttttaaaaattattaggaaaaatgaacacgcacactttaaaaactgcttttttaagggaccagagcgtttgggcccccatttttgggcccccgtttttgggccccggggtcgtttgggcccccgtttttgggccccgtggtcgtttgggcccccgtttttgggccccgtggtcgtttgggcccccgtttttgggccccgtggtcgtttgggccccgtggtcgtttgggcccccgtttttgggccccgtggtcgtttgggcccccgtttttgggccccgtggtcgtttgggcccccgtttttgggccccgtggtcgtttgggcccccgtttttgggccccgtggtcgtttgggcccccgtttttgggccccgtggtcgtttgggcccccgtttttgagcccc

SEQ ID NO: 5402 - DNA, 3797 bp, Heterodera glycines
ttggcttacccatactttaacagtaagcttattttcagctgtcggcactgtttaaacgtgttaattaatgtctcgcgtatcaccttgtaaaatgtacttcattgaatatataacaaacattagcgcgcctaaggcaataaaataattattgataattatttcgctccttttatttccgcttatttgctcatttggagattttttttattatcggattcttctcaagaatttgctttatctggagataacctaaaattctgtgtctgacaggtcgggccgaaacagaagaatgtttttgaggaaggagccaggtgatagtcgaagagttcagttgcataaaaaaaaatttctttgacaaattggcatttgttccgttaccttttgtcgcagcgattttaacagtaaatttaatttcagctgtctaagcgttaattaatgtttgggtgttacctgtcaaaatgcactttgattataataaaacattagggtgcctaaagcaataaattaattattaataattatctcaatttatttcaacttatttgctcattcggagaatagtctggctaggttttaagcaaaatgtattaattttctttatattagtgaaaatcatataataattataagtgggagtgggcgttttaaaaactcaatgaatcttcatgtaatttcatgttcaaggctaaggataaatttctatgtataaattttagtttttaatttataaacaaaaaatttcaatttatctttttgattaggaaaaatgaacacgcacactttagaaactgcttttttaaatattcacccttaaatttttctgttattcaaataaagaaaataattgcatcgaaattccttaaattctcataaacgaaatttttgaaaatattagggacgtaaaaaaatatcgagttggaacttcaaaaagtgcgaccaaaaactcgagagtcatgaccaagacgcaaaaaccggaaacttttctcgagtcgagactgagactctggagcatcaatcactacagtggacaatttgtcagcaaatttattttttgagcaaaaatcaaaaatcttgcgaaagtaattgtccacgcatggccttacaatttaattcaaaggaacacgccggagggcaacggcatttcaaaaagcacttttttgccaatggagcgccaaacgacctttttccagggtttctcagacgagcttttcgtaaaaaaactttatttcaaaggattggatacaaatataattttttaaatatgaatgttaaaatgagacttttagagattttcaaattttttcaacgagagctttttgaattagtgaaaaatgccctgttttgcaatacctctataccagtgaacccttccgggcattatttaaatttggcctccatgttcgttagttgaatcggtcaaggttaaaaaaatgattaaattagtaattgtaataaaaaaattttttagtttcgcgctagctttgcaaaaaagtcaatatcaccaccgtgatcactccatcaggtcggagtgatcagaattttagcaccccaagggactttaatctgttcaaccaatgtcgaacattgtaaaactgcattataattatcaaaccaatcaataattgtatagtcaattaatataataaattacatttttgctttattcactgtaactttgcttacgtcagtcattggcattcaatatgatgccacattttttctttgttaatgccttcatcccctatttgcgcgtatttcatttatgggcatggcattttttattttttccatcagtaagaaactgctttccgcaccaatgctttggtttggcctttttctgtcgctgtttgcggcaataaacttatcgagtggtcaattgggcacaaacgatgaaagcaaaaaaggtttgaacaatattttcaatagaattttaaatattattttgttttgtttttaggtctttttttgatggcaaacgaatttctcgaatccgggaaaatgcttctcgacgaactccaaaatcaaacaggaaacaaacaggaggagaatgaatctgatgatggacttaaatcacaaaaagcgaatggaaaggcattggaagagaaaagtgacaattttcagcaaaaagcctttgagtttttgtgtggaatcgaaatgaaagcaaaaaatgatgagaaaggaaatgagaaaacaaagaaagatgacaatttgttagcttttaaagaattagaagaaaagcgactcaatttttgtcaaaattggaaaaatggcaaaagcatttggaaaggatggaaagaggcagggatttcaatagtaacatcagtgaacaatttgaaactgaatcagcaaatatacggagaaagtcttcgaacattggcgaaaatggaaattttcaacagcaaaaacaaagaagaatttggaaattttgcgaaatttggcatcgatttgctaatgaaagtaactgaaattcttaaaggtaaccaattaagttattctaaacaaagaattttattccaaatggggtaattaaacatttaattgaagatgcgagaattagttcactggctctggctgatcagtctgatcataaccaaaggaaaggcaacaacacatcacgacgaaggaaaagggcttttcatgggatttttcgccgagagtttagcctggaaaagtgttttctgtacttgctgttgacttgcatgtccgccggccttggcactgacatggtcgttcgtctcgcccagcacaaagtgcgggtcgtttcatttggcaattcggcgcctccgcctcccttttctaccgaaggccatcacacaaccccgcttgaaggatttgagattttcgtagctattttttgcttccttaccactttgattagtcttccaatgacaatcattgaaggctttaaaatccgtcgacactaaaaaggcgcgccgcctttgatttttttttcagttgccgagtgccgtgtcaaaaataacaaattacctaaattttgttgtgatctgtttttggcgctacaaaattagcccagtttattaattaatgccgttctgagcataaaatttagtaaaaaaaaactcagagcaaatttttatttataaatggcacggcattggaaaatcatttggtgatcatcaactaattttatcttttattcaatgtaatgatcacaagggttatgtttttttctattttttgcattcctttaacctttcctctgttcagcattccttcatttccttttctaatggagattttttttattatcggattcttctcaagaatttgctttatctggagataacctaaaattctgtgtctgacaggtcgggccgaaacagaagaatgtttttgaggaaggagccaggtgatagtcgaagagttcagttgcataaaaaaaaatttctttgacaaattggcatttgttccgttaccttttgtcgcagcgattttaacagtaaatttaatttcagctgtctaagcgttaattaatgtttgggtgttacctgtcaaaatgcactttgattataataaaacattagggtgcctaaagcaataaattaattattaataattatctcaatttatttcaacttatttgctcattcggagaatagtctggctaggttttaagcaaaatgtattaattttctttatattagtgaaaatcatataattaattataagtgggagtgggcgttttaaaaactcaatgaatcttcatgtaatttcatgttcaaggctaaggataaatttctatgtataaattttagtttttaatttataaacataaa

SEQ ID NO: 5403 - DNA, 3183 bp, Heterodera glycines
aacacttgggcgacgtccaaccatacccaatcaacacataaaatacaattcattttgttcctccgcccgcccttttttcgttccaaatccgggggaataaagacggggggagggcacaaaatgtgggacgatggccctccaatttgtgtgccatatggcggcggccgtccctgctcccaccaccgcttttgctgctgatgagccccccccccccccccgctccattctcattgggctttttctctgtcacgggagaaaggggcactcattcactcttcacaccgccccaaaaaagtgatgagctggcaccatttttagctccttttttcttgaaagccaaagggcggaggagaagaaaattttggcaattaaatgccaaagtgcttttgcattagagaaaagggagtgaggcaattagtgaaagtttgagaaaaagcacaaaatgccctacttattttactgttgttgttgttgttgtttttggatttagaaaatttgtggcttcttaaaaataaatatttgacttcaaatagccaatacgtttggcgcattacgccatcgaattaaattaagcgatttttctattctttggacaaacaaagtgtgacgaaaatgactataatcgtgaaaaggtgaaatgttattagaaaagggcttacaattgggtgacatttgtcacttttgaatcgcaacaaaaatgacggaaaaaaaagtttataaatgacacataaagcagcagagaaagggagagaaaagttgtgaatcacaaataaatgtgtgaagtaatcacttaagcgaacaaagagctggaggaggagagaataaaatgcagaaaaattggaaggaaaaagttacgataaaaagggagcgaaacgggcgaaagaaagccaacacttggccaaaaagtaggaataattattcacattgtccatgtaaaaaagtataaataatgaggaaaaggagcaaagagacacgcctgaacaagttaaataattagattggatgacaaaataagagctaaagttattttaaccccactcaatcacgaattcaaatttatagtcgttgctagggtaggtcacgacgcttattaaccgggggtaccgactttcggttagaccggtttaggatccccggttttcggtttcggttcggttggacgaccgggacttaacttagtcgttaccttacaacccccacaaaccatgaatttttttttattatcaatgacacaaaaactgatggaaacgcttattcatccaaagtccggaagaaccgcctccacttttccccatttctttttgggatgaattgaatgaatcgggggggggggggagaagagaaaggtcaatcgccgcgaggctgggacaaccaacagcccaaggagcaagcagcacacatcagctgcctggttggccacttctgctcttcctcacggtcagtcacaatccggaaaaaggggtggagagggaaatgaaaggggaaaggaggccaaaacatatggccaaccgaactgatcctacaataaaatattattaataataatggggggggggtaaaaaggatggccgcagcaatgcaaaaagcgattttcagcagtaggagaaactccgatagcaagacaaataacttttattatttaaaaaaattagatggacaataatttgtcaaattggctatttgtttatcacacaaaaacaaatggtaaggaatgaacctgttagtgaattttaaacaattcattagatatttcaagaaatgattttggtcagaaaatggaagaatgccgtcattttttcttattaagtttaaagtagttggcaaacaattttaattcattgtgacttaacaattctgagaagagcttacctcattaattagttcagagtaaacattcaccggcaatcacaagaacacccaaaataatgacaggagaaattctgaattaataatgaacacaaaatccgcttaaatgtttgaacttgtctcttcagcagtaaatggtggagaatgaggaaaatgatgagaaagaatatttgcttaagcacacaaaaagcgtaccacacaagcagcacaaaacaaacgcacattctgctgatggtggtgttgtgaaaaacagaaataactcaaccaaaacattcgccagcatttattggcacacacacaaaaagcacataaacaatcactgatgtgctcaatgggatggaagaatgatgagaaggcacaacaaaatgatgagccaatatcgtcaaaaagtcaattagtgatgagtgacaagcaaatgtgatggcaattaagctcatagctctcaaaaacacgcccatcattcccctctactgcacctaactaactgttgttgtattctgtagtgtgttttacttacagtaaatgctaatatggattctattgcaaagttaatttaaaatgggagttttttgtgacatgtttatgagtaaggaaacaatgtataaatggaccccaatctgatccatgattatatatcagtgtacggatgttgccgctgccgcggttggggtaatgtgctttgacggttttagttcttcccgcaacactccaacccccaagcatatttctctccgttttttgcacattccttcccaccaataagcaattatcagagtcagtgttgctcctcctctgtgctaattgcgcattgattgatcagatcagatcaacacgagtggaagacaacaaactctgccggtccctcacgctctctaccccctccccattactactgatcacatttatttcttcaccaccacaatcaacactaccactcactgatcatccgaccaaaaaggggacacatttggcgaattcaagtggaaaggaatgatggcacggatgggttggcggcggtgaaaagcccgcgcagagaaaagagtgcgccgctgcacacacatccttgtacaacaaccaacaaaaatggtacaagggataagcaaagggaattaattacaaattagcgtgttgttggatgtcattatcgggggctattagtaaaacggacactttaggcattattcttccaaaaagcaatcgcagttgccatcgcttaacagaaatgcactgttgtgtgagctggggaggcagtcaatcatccgtatttaattgactttatgcggcatttgttcactcatttttagagggggggggggg

SEQ ID NO: 5404 - DNA, 2415 bp, Heterodera glycines
taaaggaagtggcgatggggaggggggggggacactgatgagtgatgaaggagcagcggcacaaaaagcccctcgggggcatttggagagagataaaaggcggtcaaaattgaaagggcaaagtgctagtggcgttgccaatgggtcattcaaaatggacacgtcaatgttggcatttggcacaaaacttttgtagtggtggaaatcattaaaaatggtcatgggaaaaataaataaattattgcacattaagcataagatctatcatagttgattatttaattactcttttccagctcatttcctcatttctctggtgttgtaatgttaggaaataagtgaaggaaatgcgtaaaatatgccaaaattccaatttatttttctaaactgtcggtatgtgcacaattttttaaatatcagtgcagcgtttgacgaacttgctccgaccctccgcccaatttaagggttgttctgctttacgttgcatgtgctattttgaggtgttttgcaattcggcgaattttggacacactttatattattgtaaagggaatgaatgggggaccgaagaagtgcacacaatcatagggagaatgaatgaatgaaaggaatggagggggaagatttggccactcactcagttagagcaatgaaagcgcaaccaaaagcgaataagcaccactcgtcacaaccacaaacccttttcatagcccagcaaggcttatcccatcaaatgtttgttgaggggataaagggatgtgcttaaagtgaggaggataaaatgggggaatggcactccaaaccagggtttttctggagtgaaacagtataaaacgatgggtgttcagaaaattggtaaaagccaattcagaaaagggtgatatggaattataagccgtgttcgggatcagtgaaatctcaatcccgtccgggcttttgtgttcaatgcatataatataaaagcaaatgttgctgtagatggcactgggaaaaagaaattggagaatttcatcagcgagggggaggagatatttcggcatggcaaagcgcgcaaacatatgagcggggaggagtaagtcgggatgggtcaaattcatggcggaatcatccatttcggatgagggtcagccggacggtggaggctgagcgggaaggcactgccacacacactccatttataattaccaccacacaactcacagccaaacgaatttaaggcccaaatacagcaaaatatgcgcgattatcttgaggaggaaacatggaaatgcgaaaaaattggataaaaattcccacattcgaataacaatttgttttgagaggaaaaatggctgaaataaattatatacacttattatattccaataatggcaatttaataaacaaaatttcatcaaaaaccagcagcaagcaataataaacaatatgcgccgaccgacaatcatcatcataatcacccacacacacttcgccacccttaacgggcggaaatggggccggccggccaaatgccgcaccgccccacgcagccatccataaatgaaatatcattcgtcggttgtggagggggggggggattgggatgggtggtctcccctctctccacctgcacatgcacacccaatcaaattcatacagcagcaaccaacagaagaagagcattaagccgtccccgttgtccgtggaggtgaagaggaagcgacccgtgtggcgggcgctgcacgccgagccaccacaatcgacgaccgccgccacacttccgcttctacccgccgtcctccccatggttttgtccgctggcattgccccgtcagaaacactttttgttgcacatgataagcacagagggggagggggagggggggggagaatagttggaaacgtgctgagacgatcctaaaatagtatcaatggggcgttcctaaaaaagtatcaatgtgggcgatcctaaaatagtatcaatggggcgttcctaaaatagtatcaatggggcgttcctaaaaaagtatcaatgtgggcgatcctaaaataatatcaatgataaaattaattaaaataattattattcaatgaaacaaatattttgcaagtaataaaaattgttttctacataaaatattattacgtcggaaacgataatcaatgtatgtcaatatttttttgccatataataacaaatttttaatttaaaaatatatttcccttcagtgttaaattcattctttagattgactaaaaaatgaaaatattttttattagttttatttttcccttaattttacttgattttttaaaaatttaatgtttgttttcccacccatttttagcatttcttttttttcgccgcattttttcgtatcttattacgcaactaaaacgatgacttatttctaatggaagccgaaatttatgcaa

SEQ ID NO: 5405 - DNA, 2434 bp, Heterodera glycines
tcctaaaaaagtatcaatggggcggtcttaaaaaattatcaaggggggttcttaaaaaagtataaagtgggcgatcttaaaaaatatcaagggggcgttcttaaaaaagttcaatggggcgttcctaaaaaatatcaatggggcgttcctaaaaaagtatcaatgtgggggatcctaaaaaagtatcaatggggcgttcctaaaaaagtatcaatgtgggcgatcctaaaaaagtatcaatggggcgttcctaaaaaagtatcaatggggcgttcctaaaaaagtatcaatgtgggcgatcctaaaaaagtatcaatggggcgttcctaaaaaagtatcaatgtgggcgatcctaaaaaagtatcaatggggcgttcctaaaaaagtatcaatggggcgttcctaaaaaagtatcaatggggcgttcctaaaaaattatcaatggggcgttcctaaaaaagtatcaatgtgggcgatcctaaaaaagtatcaatggggcgttcctaaaaaagtatcaatggggcgttcctaaaaaagtatcaatgataataattaattaaaataattattattcaatgaaacaaatattttgcaagtaataaaaattgttttctacataaaatattattacgtcggaaacgataatcaatgtatgtcaatattatttgccatataataacaaatttttaatttaaaaatatattccccttcagtgttaattttattcattagattaacataaaaaatgaaaataatttttattagttttatttttcccttaattttacttgattattttgaaggccataaatccggatttgaaggattcgtaaaaaatcctcaagcaatatcacttgtcaaaagctatgaaaaaaaggaaataaagacacttgatgaactacatggacaacttatgcataaaggcatacagatttctatatgcactttgaaacgctaatgtttgttttcccacccatttttagcatttttttttcgccgcattttttcgtatcttattacggaactcaaacaatgacgtatttctaatggaagccaaaatttatgcaaaaaatttaacaaaatgttaaaattattcactgtaatttgacattatttaaaaataatttaaatttaataattttaattgaataataattattttaattaattattatcattgatactattttaggatcgcccacattgatacttttttaggaacgccccattgatactattttaggaacgccccattgatactattttaggatcgcccacattgatacttttttaggatcgcccacattgatactattttaggaacgcccacattgatactattttaggatcgcccacattgatacttttttaggatcgcccacattgatactattttaggaacgccccattgatactattttaggatcgacctagcacattgatactattttaggatcgcccacattgatacttttttaggatcgcccacattgatacttttttaggatcgcccacattgatactattttaggaacgcccacattgatactattttaggatcgcccacattgatacttttttaggatcgcccacattgatactattttaggaacgccccattgatactattttaggatcgacctagcaccagttggaaaggtggtggtagtagatggatgagcagagcaaagaaagaataggaaggcggggggggggggaatccccgttgtcctccgttgatgatgtccgtccaccgccgccaccacacatcccctcggggagggaaaggccaaaaaagcggaaattggaagagcaaaaacaaaacaccaacgaaagcagaagcacaaaattgggctgtgcatgagtgcgggaagtgggagggaattgttcattgtcagtctcacaggggaacattccgagctgtaactaagaaaatgcatataaatgacatatcattggatagagcagggtcgacttctattgtgaatttttaattttagcggtgcattttgcctccttcaaaagttacagggcctcaaatatgcgaatttcattgcctcggggcacattacgacaaagggaaaggatcgacaatgagttgcacggttggttaaaaatggttttttggtccatgggttcaaatccacttgcctgtaaaaaaaaattttaaatttatttttaagttttttgggccggcaatcgtgaattttgacatacattgggcccaattactaactcctgaacagaatccaaataaaaacaaattttatgggtcgagctactcaagaaaaataaaggttccaaaagtgaaaatctgagtcaagtaattttcgaatcaaaaatttaattcgaattttcccaattgggactctgatcagagagagggcagaccctctgatcagacagagtcaagaaggtatgatcaaagtaaaga

SEQ ID NO: 5406 - DNA, 1405 bp, Heterodera glycines
cccggcaagtgatttgaaaacctaaaaaccccattctgcggattttaattgaatgaaattgatgttcaaatttccttttttctcgtattttcagtgccaatttctcacaaattcccgactttccaatgttttgaacgacacataattaaccttcgaaattaaggaattatttattggaatttaaataagaataaattatggttttcggtgcaaattggatgatttttcttctcccacaaatggaaatttggtgaaccgatttgtcaacaaaaggtccttcactttcgtttccctccgccctttccttctccgtaattattaattaatttagggttgcgtccccgaccccgccccgaccccgacttttttgcccatttttcggggttaaccccgaccccgacgctcccaaccccgacgcaccccgaccccgacccttaaccccgactcggggtcggggttaaatatacacccctaagaatggcatttttgtgggagaaaaagcaaaaaatatatacaaattttgaattttttaaccattttgccaaatttttataaaataaagtaatttgcttttagcgattcctatgcagtagtggcgtagtggttagtgtgttaacactaacacaattcttgtcgtgttcgatcctggttgacttcttcttttttaattatttttttttgtaattaatagggttttttaaaataaaaaatacccataaaaattggtcatcattggcataatttattgacaaattaaacccaattttcctttcgttgaaattaaaaaaatttaattttccttgactaaatcatgaaaagtaaatattttacaaaatataaagagaaattcataattttttggtgaaaactgttagaaaaaagagcttaaaatttaagattcgcccggcgttgcctatcggcatcgccgaccccccaaaaacctgaaaattttgctcaaaatcaaaaaaatttataattttttggacaaaatctgttacagatctatccaaatttcaaaatttttcccggcggcgcctatcggcaccgccggacccctttctcctaaaagtctttagaaacgcgccgcaaaaaaaatgattttaaaaacaaaaaacttttcgggaacaagggttcggcagtgtctataagcgcggccgcgaaaattttttgaaaattagagaattagaatgcaatttattaactgatttcaccaaaaataaccaattttttcgactttgagccaaatttttttagaaaaaatttgtttttggggcccggcgccggaggaaaaatttgaaattttgactatttttacagattttcactaaaaattgttcattttaaaatgccttatcgtttttaataattctatacaaaaataattatgaataaaagaaataaaaaa

SEQ ID NO: 5407 - DNA, 1386 bp, Heterodera glycines
tcatgactgattatggactcacgtcgtaatgacggattacgggttatcctatcgtctggtttttcctgcgcctttccgtcatgacggattacgtaggtaatgactgatgatccaatcgtcatgcttttcttaatccgtcatgactgattactgacctaccccccccccggtcatgaataatggagtacggattagtttcgtgatcagcatttgctgatcacttcctcttcctgctctccttcctcaccattgtctttctttctttttcctcattacgcttttttatgatttctttgaccatgttgatcggtctgaacacatttctccgcttccacttctcctctgccgctaactcttccttggctttctccagtttggcctgggttggcccggctaatatgccgtttctgatcagtctgagcacattctctacggttttctcttccgcgtcggcaatttccattggaatcattgcggccgatgtggcggttgccaactaattaattgcaaaattgtagaattttcaaaaaatgaaatggtcgcggatgtcgctcgggaccaatggtgtagccaaacaccattgttttcggtcggatgtttttagctctattagcaaatttttttggagagggtccccccccccccctgggaccagccctcctctggtgcctgcccgcgccgctctcctcacaatgttggctggcagcataaatggtattgccatccatgtaaaattgctgagcggatgatgcttggcaatgagattttctatgtccaattcggccagcttcagtgcattggttttaacttttcgcgaattacgataaattgctgcaaaatcctttttgaatgcgccagtcagcagggtgtcaatttcctccaacgcattgttgggaattgagccgaacgctgccaatgtgccggcagccatcgctgctttcaagttctgtatcagcaccgcattcttcgggatgaacggtgcaccgcgtgacatggcgagggcccgcttgatcaccaacgagtcaaatgtttcggcgaacagcggcgtgatggagtacagtgcgatggacaacggtatgacccacacatggatcaagggtgcagcccatgcttaacatattgtaattagagctagggcttttaggtgctaaaattgcaacttgtcaagaagacaaataaaaacaaatttttgagataaatttttgaggaaaatttttcatttcttaggggaatatttttgaaattttggtcaatttttagggtatatttttttaaatttttttgatttcgattcgtagagtttatttttcgtttttattccatgtttgctatgaattttggaaaaagggcaaaatggttaaaacctaaaaatccgtacgctaatga

SEQ ID NO: 5408 - DNA, 5239 bp, Heterodera glycines
atcggcaccgccggaccctcccccctcgcccatttcccaaaagttttttggaaaaatgagccgcaaaaaattcttaaaaatctgattttttgatcccgagtgcactgaaatttacgatttgttaatttcctcaccaaaatttttaaagatgataattggaggcgaaaaatataatattaatgatttttgattaaattaattgtaaaaataaaagatttgaagcaattttgcaaaatgttctgatttttgaccccaaaatctgattttttgggcccgatgtcctgattttgaaaaaaattctcgatcgcatccctgcataaaatggcaaaaatatggacatacatttttccaattgagggtataatttcccaaaagttctttaaatttgttaaatataaagtaaaaccttcaaaaatggctaaatatggtattaaaatcattttagaagaaaaaaacacgataaagataaaatttacttatttttagcgaaaaatcaacccgaaaagcgaaattttcgttttttttttgcttatatttgacataaatttattaatttctaagaaaatttaaatttattcaatattctcgagaaaatttggcgaaaaaataattttttgtaaaatttttcggtttttgggctcaaaagggcaaatttagctgctgggagccgttctaatagaggttttttggaaaaatcccaaaaatatggacgaaaatgcgaaaatatggacataaatcgcgaaatatggaaaaatatggatatagaaatccatcctagaagctccaaaccaagctaaaaacatgtttttcgtgcgtttcaggcctcccacagtccaggaaaaaaatatggatttccatgtatttgtgggaataaatccatattttttgcaaatttcgaacccctgacccggactcgaacaaaaataaaattagaaaatttgtatggatgatagatatcctcattggcatcttgccaatgagggtaacattggtaaatgaatcataaaattctaaatttgtatggatgatatcctcatgggcatcttgccaatgagggtattattggtacagtaagcctataaattctttgtccttgtacagctcttgtagtgaacggtagtgctgatctgagcccggatgattcgtgatcagcgacccccaaaaccccttaaaacttattttcactaatttctaaaacacatttataggcatttgaaaatgtatgtgaaatctgtcaggtaaactgcaaaagtacccgacattttaattcacactaatcagtagtgatcaattcaatgataaatccttactgataattgtaggccacaaaaagagatcgaagaacaatgcgattgctgatgtgccaatgacgctccacatcaactgcttcagcaacccgactgtatccttcttattgatcacatagttcacaatttgcgcacccaaacggccgcgcaattcgacgccctaaaatttgtacaatcatttaaaaatcttttaccaggaacaggcctaaatttcaaaaaatacatatatcccctccgctcgcccgtatctttttcgcccgaaaactagtgaaaaaaaaattcccaggtccagtcataggtacaacaggctttaacaaggcaggatttactgagactgtgtttttccccaggttcaggcctgggtacaggctttaacaaggctgttccttggcatggaatattgctggaattttgtctagaaatcccagtccgggtccaacttggaatccagctccatgtcaggctttttttaaaatgccaattctatgcttgactgttttccattttcaaaattctttgatttttttctacccacttgcgggtcgaccacaccgttgtcatctatgtacagtgtctgttccaccaatttggccaatgcttggcatgtctcattctcactctccatcgcttctttggctctcggcatgtctaacatttccaaatatttcttttcattgacgctccgtccgcttattttgtgccgtagtccaccaattgggattttactgcctttcttatcaatgccaacagtgccgaccaaaaagtcgaacgggtgcaccttctgcggccgtagaaactccatggcctttctcaactttttttgctcctcttccattgtttggtgcactttttccaattttttcaaagtttcgatttttctgtgaaaagttttttaaattatgaaatttttttggaagctgccacccgaaccccgacccaatattttcgcgtctcaaagcccgacccgagcctttttggacgttcacatccgaacctcggcccgatattttctcgtctcaaatcccgacacgaactttttttttggaagctgccacacgaaccccgacccaatattttcgcgtccaggaccccgatcagaacttttattcgtcccctcccgaaccctgagccgatagtttcacgtctcggtcccgatccaccgacttttatatctttccctgtctctagttgtggttctcccatctccgccgccgaaattccgccgctgaaattccgccgagacataactccgccgggcaaaaaattttcaaacttagaaatttttcaagaaaaaaatcttagaaaaattttttcacataaaatccgaagataaaaatattttcaaagaattttccaacgatttttttgaaatttttttgaaaaaactttgtttttcatcattaattttgaaaaaatcgctggaaattttttagaattttttcttcgaattttctaagaaaaaatttttctaatatttttttcttaaaaatttttggcggaatttcggcggcggtgttttgccctgctccgtgtttttttgtgcaaaattttgggcatttttcaaatgtgttaaattgttctactgatccttttttgaggaactgaatttttcggctctcaatttctatgggacaaattttctgttcgcgctcacttgtccgctttcatttcaatttcatttcttttctgttcggtcagcatttccggatgctccttgattacattttctatcaactccgcattggactcattttttgtgtgcgtactccacattgcacttcctctgtgaaatggatggtgttttttaatgaaaaccgtaaggggggggggggtaattttttgaaaacttattggtatgtttcttcctttaatttgggtacttactatctgttatgccgttgagtggcaaacaaataaatcaatatttatggagcaaataaaaagaaataacaaaattggggaaaatgatgcgaatgagacaaatgacgagggaaggtcaaaaagcgggctatttatggacggagggagagacagagataagggggacgagggaaacatacaaaataaataaagtgaggcggacatttgggtaccggcctaacaccttcccccttaaaaaaattgatccgtccatccgcttcatccttcggcggtggctcatcggtcgtcggctgtcaggcgatcacgttttcacgctttcgctggtcacaatcaatgccgaccaagcccttcgacgtttttccatcgaatggtgcctctcttaggtccaaaccatcaaaaatttcttcgtccgagtccaaaacacatgcctctacacctttttctgggaatttgccggttgttccatctggaaaacggatttcgtacatcgtcccttgacggttaacgacgtatccagcgcgccaaggttgcagtcccaaactagcaatgacctttgctcccaaagcaaattttggcttatttccgcggtgtttattcttcgggttttcactttgagcatcagttgaatcggacttcgtgtttgcttctgccacttggacattcccttccaggctcttcctgaagctatccaacagtcccaaactgtgaagcatgtctatgccaagcaaattctttgttcctttggcaacatagaattgtccatcgcatgagcgatcaccgatcgagaactttgcctgcccttttcccaaaagagggcgagtggatccgtcgtggtattttgcccgttcagtgcaacggctcaaccatggacttccgatttggcggtgtgcgtccttcgtgaccacagttctttcagtgccaaaatcagcaacaaattccacttcagtgccatccatcttcagcgggatctcgatcaattttctccgactttctgagtccggcagaaaaattcctccaagccgaaatgtgtttacggcttttccatcctttttctccccatttcttttaagccaagccttgtgcttctcgcacattctctccaaatgtccaatttcattgcactttcggcaggtggactttccatgcgaacaacgcttgggagagtgccattttccgcatcgccaacacttcggttgcgatccatggctcctttggcttgctgacgattcgctgctccctttcgacgagtcggaattctttcgaattttatgcttctttttcaaagcataaacatttctcgaagacaccggctgctcaagcgctttagcctcggcaatggtcgacaggtacacttgcaggtcttccaccatgttgtcgtaccgaacgaggtcaccatctgctgccaactttgccaaaattcgctttctgaggtccgcgtccttcggcgatttcattgcgatcagaagcatcaggcagttaaactgctcctctttcagcttcttgaagttgaaatcccttaacagccttttgtgtcggttcacaaatgctctgaattcctcgtcttccagtttggatgcacgcaggcagtcgtatctgtcaatccaaatggactgaggcctggcaaacaaactcttcagctgctccacagtcttcgcgaagtcgaagtctgtcacatttttcggtatgcaggactttttgtattcggcaaacgcttccttgctgagcttcgtcatgagaagcttcaccttcagcatatcttgcaaattcggtgcggcacagtcaagagcaaagtcgaattgctgcagccagtcctcgatgtcggtgctttgctctccaaattcgaagttttccacattcggtagagacggcacattggatggttgctggcctgctggtggcgcattttgctgtgcttcaagcagttgcttaaccatgtccatcaattgctgaaccgatggatttgccatttttaagtgtcgttcaccactctattgataatagcgccaacgataatagcagagtgggtgcgcgtggacgaactgaaattatgt

SEQ ID NO: 5409 - DNA, 3169 bp, Heterodera glycines
cctttggcacatagaattgtccagtgcaagagcgatcatcgatcgagaattttgcctgcccttttcccaaaagagggcgagtggatccgtcgtggtattttgcccgttcagtgcaacggctcaaccatggacttccgatttggcggtgtgcgtccttcgtgaccacagttctttcagtgccaaaatcagcaacaaattccacttcagtgccatccatcttcagcggtatctcgatcaattttctccgactttctgagtccggcagaaaaattcctccaagccgaaatgtgtttacggcttttccatcctttttctccccatttcttttaagccaagccttgtgcttctcgcacattctctccaaatgtccaatttcattgcactttcggcaggtggactttccatgcgaacaacgcttgggagagtgccatttttcgcaacgccaacacttcggttgcgatcggtggctcttctggcttgctgacgattcgctgctccctttcgacgattcggaattctttcgcgttttatgcttctttttcaaagcaaaaacatttttcgaagacatcggctgctcaagcgctttagcctcggcaatggtcgacaggtacacttgcaggtcttccaccatgttgtcgtaccgaacgaggtcaccatctgctgccaactttgctaaaattcgctttcgaagatccgcgtccttcggcgatttcattgcaatcaaaagcatcaggcagttaaactgctcctctttcagcttcttgaagttgaaatcccttaacagccttttgtgtcggttcacaaatgctctgaattcctcgtcttccagtttggatgcacgcaggcagtcatatctgtcaatccaaatggactgaggcctggcaaacaaactcttcagctgctccacagtcttcgcgaagtcgaagtctgtcacatttttcggcatgcaggactttttgtattcggcaaacgcttccttgctgagcttcgtcatgagaagcttcaccttcagcacatcctgcaaatttggtgcggcacagtcaagagcaaagtcgaattgctgcagccagtcctcgatgtcggtgctttgctctccgaattcgaagttttccacattcggcagcgacggcacattggagggttgctggcctacttgtggcgcattttgctgtgcttcaagcagttgcttaaccatgtccatcaattgctgaaccgtcggatttgccatttttatttttgtcgttcaccactctattgataatagcgccaagatattatcagagtgggtgcgcgtggacgaactgaaattatgttgccaaaacacaatatcagcggcgcaaactttacaactgttaaacagtgccaaactgttaacagggaacgacgaaaatgtttaatgtcgcctagacaataaacaaagcaatccacaatcggcttcaaacaaatgccttcgactctttcccaaaaagaagtcgaaattggaatgatttattggatgctgaaagcactccaataaattccaaaagcagctttaataaatattcaaatcagttgaagggggcccgcagagacgtaatttcaaattacaaacaaacaaatatctgctcgggcgtcgccaattgttatgccgttgagtggcaaacaaataaatcaatatttatggagcaaataaaaagaaataacaaaattggggaaaatgatgcgaatgagacaaatgacgagggaaggtcaaaaagcgggctatttatggacggagggagagacagagataagggggacgagggaaacatacaaaataaataaagtaaggcggacatttgggtaccggcctaacaccttcccccttaaaaaaattgattcgtccatccgcttcatccttcggcggtggctcatcggttcatcggtcgtcggctgtcaggcgatcacgttttcacgctttcgctggtcacaatcaatgccgaccaagcccttcgacgtttttccatcggatggtgcctctcttaggtctaaaccatcaaaaatttcttcgtccgagtccaaaacacatgcctctacacctttttctgggaatttgccggttgttccatctggaaaacggatttcgtacatcgtcctttgacggttaacgacgtatccagcgcgccaaggttgcagtcccaaactagcaatgacctttgctcccaaagcaaattttggcttatttccgcggtgtttcttcttcgggttttcactttgagcatcagttgaatcggacttcgtgtttgcttctgccacttggacattcccttccaggctcttcctgaagctatccaacattcccaaactgtgaagcatgtctataccaagcaaattctttgttcctttggcaatatagaattgtccagtgcaagagcgatcaccgatcgagaattttgcctgcccttttcccaaaagagggcgagtggatccatcgtggtattttgcccgttcattgcaacggctcaaccatggagttccgatttggcggtgtgcatcattcgtgatcacagttctttcagtgcccatatcagcaacaaattccacttcagtgccatccatcttcagcgggatctcgatcaattttctccgactttctgagtccggcagaaaaattcctccaagccgaaatgtgtttacggcttttccatcctttttctccccatttcttttaagccaagccttgtgcttctcgcacattctctccaaatgtccaatttcattgcattttcggcaggtggactttccatgcgaacaacgcttgggagagtgccattttccgcaacgccaacacttcggttgcgatcggtggctcttctggcttgctgacgattcgctgctccctttcgacgattcggaattctttcgcgttttatgcttctttttcaaagcataaacatttttcgaagacatcggctgctcaagcgctttagcctcggcaatggtcgacaggtacacttgcaggtcttccaccatgttgtcgtaccgaacgaggtcaccatctgctgccaactttgccaaaattcgctttctgaggtccgcgtccttcggcgatttcattgcgatcagaagcatcaggcagttaaactgctcctctttcagcttcttgaagttgaaatcccttaacagccttttgtgtcggttcacgaatgct

SEQ ID NO: 5410 - DNA, 777 bp, Heterodera glycines
ccaaaagcagctttaatcaatttcaaatcaattgaagggggggcccgcagagacgtaatttcaaattacaaacaaacatatatctcacgggcgtcgccaattgttatgccgttgagtggcaaacaaataaatcaatatttatggagcaaataaaaagaaataacaaaattgggggaaatgatgcgaatgagacaaatgacgagggaaggtcaaaaagcgggctatttatggacggagggagagacagagataagggggacgagggaaacatacaaaataaataaagtgaggcggacatttgggtaccggcctaacagtttgaaaacaaacacggcgcctatcaacgccgccggccacaatttgggtcgcaaaattggtaatttttggtagatatctactactaatcgtatttaaaacctcaaaaaaaaaattcgatttatattgttttatttaataaattgacatctcttaaatttttttgcttttaaattgctctttttgtggcgcggttttccaaaaaattttggaaatattgggggagggggtccggcagtgccgataggcgctgccggaaaaaatttggaattttgagtgcgatttgttaaaaaattttgtcaaaaaatgattttgactgaggatttttcgaaaaaatgtttaagatttgaagaaaaagttcaaacgttttgccaaatatacctatttttcaaaaaaatggtgcgtttattgtcacttttttatcaaaagaccacaaaatattttaaatttctcaaaagacca

SEQ ID NO: 5411 - DNA, 4949 bp, Heterodera glycines
cttttcagaaatcaatgaagttgtcataatccatgatgagaccccaagagcaatgtggaaaacaggaattattaaaaatgtcataacaggaaaagatggtatcataagaggagctaatgtcgagttaccaaacaaaaatgtcattaaccgtccattaaaattgctatatccgttagaaattaacaaaaatgacggtgaggagaatgagactctcacaaatttaatcactgatcacgaacaaattggtacagttcaaaagagaaaacaagcaagtgtcttatcatcaccaaaattaagcaaagtatttttaaacacactcacgtttcttctattatttatgcaaatcttaccgtgcttatcatacccatacgaatgtccaagaaataatgaaaaatggagaactaaatatacaacattttgtgtaaaaaatggatttaccatcagacaaaataaattaacaatggaattttgttaccgtaaaatattttgtcacaatcaacacatcataaaaaatcatccaccctattgtggaccacaatgcaaatgtcctgattggacaattttttgtagttttgcctcatatcaccgaataaaaagagaaataactgatcaggagaatattcaaaatattatttcattctttaaaccaaacgtttgttcattcaataaaacggtaaaatgctccctaatggataaaaatatatttagttcaataatgctttatgataatagcattcattcagttaaaagtcttaatttacttcatacacaagccaattctcgaattgattatcgttgccttggggagggcaatctgacgattggtacacaaaaattctgtcaagaacacgaatgcactgacaaacatggaacaaaattttgcttttacgagccacacgaaaaaacttatcttgtgaaatcagaccgagaaattatcccaataaaagcatggggaagcatcgaaagaattttttatttggctaatgacacattaatggatgaactcaaacgtaaaaaaagagaattcgatccgttcgaaaacgaacaaatatccgctgaatgtataaaaggtggaataaaaataaacccaactcatgctaccacggaattagaaattttggttgataaatattttatcctaaaacgaagtccacagagtgaagaatttatttctctacctacaaaaattactatgaacgagtataaaccagtcattaaatttattaaaggcacaagctcacctgagtacaaaaacttaacatgctctccatcaccaatctgtgaattaattatatgtcgtttctgcatggaatacattcgaaacccacaatgcgttggtcaaatgcattgggctctgatactaatcatgataatgctcacactttacgtcattactctttgtcttaaaattataagaatactataccgcttcatcgtttttatttttctatcagtctacaattgctgtagaaaaagaaaattaaagaaaataaaaataattaaacggaaacaatttatttatttaatcatgattagccttttactcaattcaccgactattttttcatgtgatgaagtcactaacatggtagcaggaacaaacgactgcgcaattgatcaaaacggaaagattgaatgtatttacgatcaaacaacccaaatttcaatcacaccggaacacaaaacgtgtctaaaacttgacaatgaaaaaatgcacagtacgatagagacaattgaattatctgttgaaagtctgacaataatttgtgcagagagatctgaatattttatgcgagattatgaattactatcgagttcgcaaaagcgatgttcaggcgccggaaaatgcaccggtcaaatatgtcaaactttaacaatgaaagaaaaaaatcctgaaatcggtgaccatgccaataaacaaccaggatattcctattgtgtgccttcctgcggtggttggcactgcaaatgttttcttgtcaccgatggatgtttattttatagaacatataccgagccaatcaatagaaacatatatgaagtggtcaaatgtccgacttggacgattttagctacaatcaaaatttcgcttgatccaaaaaccatacatactgtggaattaaaacctggtgtcttaacacatgttaaagactcgaatttatctctgacactcacctcaacttcaattccaccaacgccactatttggatcaaaatttataattgatcgttcaaacgcaaaagctgtaatagttgataatgagaatttacttaagaatagcctacggtgcgaaactaaagaaaaggcgacaaaattcagttgcacattcccaccagaagcttgtcaatgtcacggaggtgactccgttgttcactgcgaatgtgagaaaaacccgctcactgaaatgttcacaagaaaagataatattttgcctctcgagacacaaggaagccaagtattcttcgacactttattaagggcaaaaataaaattaacaacttcactacaagtgcaagtcacgctaaaaggtcacaaagtcaaagcaatttacgacaaaaataattgtactgtaaaaacaaaatcgttagaaggatgttactcatgcaccaatggagcagaatttaaatttacatgtacaactaactttggtaccgcattggcaaatgtaaaatgccatagtcagaattttcaaataccctgtgacacaaaagggaaccaacagcaaattcagctttcctttaatcaaccgagtgtaaaagaaaaatgtgaagttatatgtccagatgaaaaaagtgaaataacaattgaagccactctgaattatgtgagccaacaagaaaaaataattaacccttcgaataacaaacaggaaacacccgtacttggaacttccctagaacaatttacagatatatttaatttcatatatactttaatcaaaacaaatctttttaattttttaactataatttttactttgattgtgacaataacatttataatttgtatctgtccaatgatttacccactgctttttaaatactttcctttccgtcgcgggaatgtcgcgaccacgcgaaatagaaaattttatttaaaaattaaaatcattaaaaacaaaaaacatttaaattaattttaaattaaacagataaaaattaattaattaaatgtgaatggaatgaaggaggaataaatgaaggaaaattattagtcatttttagtcacaatttttccattagaaaaattgtcaaatgttaaactttaattatgaataattggaacgttaaaagaaataacagattttaaacaaatgttaaaatgggacaaattgtgaatgatattaaagaaattgtaaaatgttagaaaattggtaaaggctaaagtggcacaaactggaaaatgagaaaaggttagaaaaattggcaaatgttagggacagaaatttggacatgccaagttggcaaacaatcgttcaagcaggaactgccggtataaaaggagggcccaaaccccccacaaatcagtacaccaacggtttcctgagaggcattgcctcgtcctcctttccctcccttccctttccccccgtgccgacaactgctccgcctgcccgttcgtgccgccgactgttgtgcagaaccgtgcgccgcccgttcagtgccaagccgatccgtgcgccacccgttcagtgccatgcccgatccgtgcgccgcccgttcactgccaagccgacccgttcgccgaccgttctgtgccatgcccattccgtgccgccgccccgcaccactgatgccgtgccgtgtcgccgacgttttgtgccgtcccccattttccccccattgtgccgtccccatttctgtgccgtcccccattttccccccattgtgccgtcccccatttctgtgccgtcccccattttgtgccgtcccccattttgtgccgtcccccattttccccccattgtgccgtccccatttctgtgccgtcccccattttgtgccgttcccccatttcttctcccttcggtttaattacccaagtttgaggactctaataaagtgcattttcatcgcttttcccgcctcacttgacccccagcaattccaccacccccgattgaccgccaagcgtccaccccaaaatttcgccacaaccagtccctctcctggtcaccattgcgcctgccgcccccaccccgccgactcgcactactcgtccacaactcaaagcccagcaccaccaagcagcgccggccctctaccaaccactgaactcatcagcacccccacatctcgccaaattcctacccctcccatttgtgcgccatcgaaagcgtacagtatttctgggatttttttcagaatgtggtcatagaataggtgggttgaattatttgtattttttatgagtattatgtaaggatattttcgacaaaacataaccaattccgagtttcatgaggcatcaacttcattcttttcttgtcctgcccaattgtctcaaatgtatacctaaaaatgcgctaaaaatgatcaaacccgtttttagccgaatatcctgtcaatatttccctattagaaacgatactgtgaattctttcgcctctttaattcattcgtgctttgcttcggattagtctaaaaatttcaagacgccaattttacatattagccattttttattttatttgtgaccgcaaatttttacatactagccattttttattttattgtgaccaagcatatctttcctcgtatttctgggatttttttcagaatgtggtcatagaataggtgggttgaattatttgtattttttatgagtattatgtaaggatattttcgactaaacataaccaattccgagtttcatgaggcatcaacttcattcttttcttgtcctgcccaattgtctcaaatgtatacctaaaaatgcgctaaaaatga

SEQ ID NO: 5412 - DNA, 1598 bp, Heterodera glycines
  unsure (1)..(1598): unsure at all n locations
tgtcaaatatggacataaatttttcaaaattgaatgtaaaatttcttcaaatttattggttgaaattgcatatgagatacatttccaaattttttgactcggtaaggcgctttgacaaagacggctttcgttttggcaattagtcggtcaacattcggaaattggtctcgaattttttcggcaattatgtgcaatcattttaaaagaaaaaaaacataaaagctaaaatttattaatttttttagcgcaaaatcaacaacaaaagcgaaatgttcgcttttttgcttatttttgacataaatttattaatttttaagaaaatttaaatttattcaatattctcgagaaattttggcgaaaaaatgattttttgaaaaatttttcgggttttgggctcaaaaaggctaatttagctgctgggggccgttctaatagaggtttttttgaaaaatgccaaaatatggacataaatatggaccaaaatgccaaaatatggaaaaatatggaaatatggacataaatcgcgaaatatggaaaaatatggatatagaagcttcaaaccaagctaaaaacatgtttttcgtgcgtttcaggcctcccacagtccaggaaaaaatatggatttccatataattggactccctagttatcaacggcataaattttctaaaaaaaactattttttgaaaaattctgagtgaaaattatctactcaaaaacaacgtgcctccccccgtggtcgaaattcgaaaaatcgttttattttatttcatacataggctaggcataagctttagacctaggcttaggcctaagctaggcttgtttgggcctacataagattaggcattatttagtaaaaaaaaacacgaatacacatatttattttacatatatgcaaccgcgcgaaaacgacccccgcgcgaaaacgacagcgcgaaaacgaacctggcgcgaaaacgtcagcgcgaaaacgacggcgcgaaaacgaccccgaccgcctcctttcgtccctaaaaacgagaggcgagagtccaaaaaatggcgagagttggcaagagacgagaagcgagagttgtcccgcccctgttatgatgtacatatttttatacattttttggagtctttcgtacatattttcattttttacatattttgagatgatacatatttctggatttttgtacatattccatatatatttgtgggttttttttatatatttatattctgtaattttttttacataaaattcccatcccaataataatgctaaatgttttcttttctatttttaatcagtttatttaattatccttttcaatttgatattttagtctcaaagcgaaactttgtcagttgaacatttcgccatgctcaccatgtacatcagtgagaatacgtttanatttgtcaatttcattcaaaatacacgcggggcagcgacgcgcgtncaaaaactaattggagcagcgaaaattaaatcaaattttatggaaacatttcagaagaaacttcgaaatccattatgtaagaagcagtacaanatgtcattatatttaatggaaactgcaaagaaaaagctaaaagattctcga

SEQ ID NO: 5413 - DNA, 7019 bp, Heterodera glycines
  unsure (1)..(7019): unsure at all n locations
ccacagaaaaatgtggcacaaattttggaactgtcccgcctcnacggtggggcttaaaagcagggtaaagccaatntaaaaatttcagagaattatttgttctaaaaattacagtntaatttcttaaagccaaaagattcgaaacagaagcattatttaaaatcaaaaataattttagtaaattttttacattttagtttcaaaaaaacaaacaaaaaaatgttcccaattttgaaaatgaaatagtgcacaaaaaggggggatggttagacgaaaagagaaatttttagaaaagtccgcaccccatctaagggcgttatttttaaatgcaaaggtgccgatttaaaaaaattctcacattttccttaaacggcgtcgttttatattgcggcaattatatagcagcagcacacttttgtcgtaagttgtgattgcaacaaatgtcaaaacaaaaaatgatgtgcaaatttttgtgcttttgagtgagattcgatggagtataaaagcgatgcatttgttcccttttcccattattcattctccgcttcgttttccgccagtgctgccgccccccattttcggcaatggtaacagaattttttttctttaaattcttttgaatgcaaattattttttctttttcaactttaaggaaaatgttgttgctcctgccgatgctgcggtcgacaattttgagcaacgcactcgccaattcttcgccttcgtcaacgagggaaacatcggacaattgcgtgcgctggtcgactcgctggatgcggacgaactgagcaatttgctgcggatgaaccaaccgaatgtccgaccgcctcgacctgctctcattaacgcaattttaaagcagcacacggaaacggtcgttttcttggtaaaagaaagggtttagtcttattcggcagcgattgatttcccccatttttcattcagttggagaagggcgcagatccgcatcagactgtgcttggccgactgaacaatttggacatgagtgagcagcaacaaaagcggaattccgcctcatttataaagttttgtccccaattttgcagatgtgacgccgctttggactgctgtcagtatgaccaatttggagatgtgccgtgcgctgatcgcccatggtgccaacatccacttggggacggactctggcgagtcgacgctgctctgcgcatgtttcgaaggcaattttgagattggtgcgtcaaatgcatggatgatgctgccgtgtaattgccaatgttttcccatttctcagtcactcttctcgtcgagaatggcgccaacgttaatctcgcggacagcgacggaatgacgccactaattgccacttgttactttaccggaaaggtgtgcaaagttgttgcataatttgtgactgttttttcgcgttcttagattgacattgtgcacctgctgcttttacacggtgcaattgttggacagacggatttcacgggtgcaattagtctaattgccctaaaattattggattaatattcccttttttcaattttagggatgaaatttgctcttttgggagccgccagggcgggctatttggaagtgtgtcagctgctggtgaacggatgggcagcggatgtcaaccagcaaacaatccacggcaccacagctctgatacgcgcgagcggtcggggacacgtggacgttggtgagaaaaattgtggcaaatttgaaatgtttcctcattttcagtgacttttctcgtcgaatatggcgccgaccttgaccacaccgacattgacggatacaacgcgttgatgtgcgcagtgaagaacagaaggacggaaatggcacgtcatttggtgaccatcggcgcgaacactgaccagattggcattgatggtgagcagaaaagtggttaaaccgcacggcttttatgtaattttctcgcatttacaggcaaacgggcgcgcgacttggctgaagaaagcggacttgccgaaatgattgacattttccgtgccgcggctgagcagcgggaaaacgccgatgggtaaaataggatgttttttgatcaaaaaaacaacaacaaattttcaggcatcagaacgaacactaacagcggatgagagggaatcgcggctcaaaagaattggacggatgtgccattcggaggatattctcatgcacttatgtattattgcagtgtatttgttcatatttgaattcacttgtcgtgtttgtctgctctgattgtgtacataaataacattgtttgtatgataaatagggatgcaatttttaggttttttttcggagctcccgtggcctgaaatgcatgaaaaacatgtttttttgggctgttgttaagctacttttcgagttattagtgcctattttctaggcttttatttttagagcctaaaaagtagagttgagggtaatggtgaagatcattggtcccataaaaaagggaaaaaaagcccgattttaatgattttgcacttcacccgggggttatcgagggtgctgagcaagaatatggtcatatgacgacatcaaatctatgatttttcgacatgtctatgatttttcatcaagtattttttccaattctaactcaattatttagctcaaaaatgagctcagcttgtttattgcacgaaaaatgcacgatatttaagcattgacaacataaaactgaccaatatggtcaaaaatattttcgaacgccaaaagcgttttttccccataaaactggcgccacatatattcgtccatgtatcctggcaacaaatcacgttgtgtgcccgacatcgctttattcttcattttcaaattcttccaaaagttttccacgtgattggtgtgagtgccggtcaatggatcgacaaagttttgagcatggttaacggactggtggacatacggcgggacaacgggaattgcagctattgcgcctcccatataaggagcccactggtcggagtgtattgtggtgccagggaggacatattgttcaatgatagggaggagagtgttgcgcgtacgatctggtacaagttgcacaacaccgacgtgggcgtgcacgtcgtacatgccgaacacccattgctcacgcaccctccggcccctatgatatttccggcgagcgacgagactctcgtctatttgaacaatattcccaataccacccaaacttaaagatcgccggttacggtagaaatacaaaaaagtataccggatgggatgcgcaagcaaccatcgactacaatccattgataatttaaagtaaatgctaaaagaatagcaaaattcttaaaataattttgtggtgaatgtcggggagatgcagtatgttgtgatattcatagtctcatttgcatgtaaacaacattcattatttcaacattccattgtttaccttttatgggaaaaaaacgcttttggcgttcgaaaatatttttgaccatattggtcagttttatgttgtcaatgcttaaatatcgtgcatttttcgtgcaataaacaagctgagctcatttttgagctaaataattgagttaaaagtggaaaaaaatacttgacgaaaaatcatagacatggcgaaaaatcaaagatttgacgtcgtcagatgacaaatctgatggcatattcttgctcagcaccctcgataacccccgaatgaagtgcaaaatcattaaaatcgggctttttttccatttattatgggaccaatgatctccaccattaccgggttttcgcaggcgttgaatattaatatgacatccatttcgacctatttcgaatcctgaacccgaattcgaacatttttttgtaaaattttgaaaaattgtcaaaaaagtctctttggttttcggggtcgctaatcactaacctaacatcagttttggtcaattgcgaaccccggacccgaatttaaacaaaagtcgaaaattaatttttcaccaaatttcttgaactctgcttatacatatctgttttagcgtttatgaattttcttttatatcgtcgtcaacaattacttgctgaaattttggctgcaacccgccgactcaatgtgtttgatgctaacttggcgactgggaacatgggcacagaggaacgtgagcaagccatcgccgaccgtgaacaactgtttgaattcgtccgcgaacttttgcgacaactcgacgctgttcgggactcagaaaggcagctgcgagagagtcagagagacaacgacaatgacaaaaattctgaggtttattcacactggttttgggttcctctagtctgactgacttaactaattgtttccaccctttttttgacaaaaattagttgtatgaaaattcggggttgtccaatttgcttggccaaagactgttgcgatgagtgagtcaataggctctattcaatttacgcgtccaatcagtgactatcctcatggacaaaagcaacatacaaaaagtttttcctgaactaacccaaattcaaacaataagtcgaaaattcaaatttttgaacttcttaatattgccataaaagtgattaaaaaagctaaaaaataagctatagttagaaaacttcaaacattttaaatgttgtttttttcaacagggaggaccgggttcgttacgacgaagcaggagccattcgcaatgaagcggcgacagaagcgacaaaattgaggtttgttcgcattattttgaagcaaaatgccattaacagtacaaaacagagcaaattgacataattaaaaagttaaatctatcaaatttgaaaaaaatatttaaaaaaaagcgggcggttgataaaagaactgtaacgagcaaatttgggggcataaagcaataatagtaaccaaaacatgtaaataaaagtcccaactttttttcgcaaacacaaaatgaaaaattttttccttctcattaaaattttagagctatttacataaaaaaggaagccctaataatgaatggtccgagactaactgtctcgggaaggaaaagtcccgcattgattgacttatctcgatttgagcttaaagaaaaataatttctgcaattgcagcaatcggacgggcacaaaagagggcgatgtgttcagttttgcgactatttgtgtggagatggtgaacagagagacggtttggaatgggacggagagggacgacgacgtggacggtgggcaatggcattttagggggaattattgggagctgaccaaagtcgagttttcatcctaattacggaccacaattctaaattgagtttattggatttgttgtgccgtgcccattcattcctttggctcatcgactttttctcactcctcagaaatcctttatcggctcaaacgcaccaacaacacaatccctcaccgtcctcagctccgcccccgcgaagacaccaatcaaagtttggtacgatttgttgctgctgatcgccttttctttccaattcatttgtgcttttcctcaggtccatttgatcagagactgttgggctgaagtgccggccgaacgcccgcgcatggatatgatgcggacgatgcttaagcagatggtccaggacgggtgggagacgcaggagaagaagaagcattgcccttttgatgttcagaaaccaaaacctgatggactacgtgttcggcatgctcgagcagtacgccagttcactggagcaggaggtggaggagaagcgcaagagcgacattctgctcaatcggatgctgccgcggcaggtggcggacaaactgaagctgggcgaggcggtggagcccgagtccttccaaatggccaccattttcttctcggacgtcgtctccttcactactttggccggcaaatgcacgccattacaggtgacaaaatcagtgatcactgtctgatcagactggggaagctgagtgatttgggcagaagaaatgtagttggtgataacgaatgggattagtctgactattgtgatcaacatccattctgatgataatatgattcttacgtcctccccctctccgccgtttaggtggtgaatttgctgaacggactgtacaccgcctttgacggcatcatcgacacccacgactgctacaaaattggtcagtcagcggccgatcacttccattttgatcattttaccaacgcatttccccgcacagaaacaatcggcgacggttatttggtgtgttccggcattccgaagcgcaacggcgaccaacacgcgaaggaaattgcggaactttcgttcgctttcctccgcacggtgtccaacttccgcgtcgaccacctcccctccgaacgcgtcaatctgcgcatcggcttccattccggtccctcccctcccctcccatttcaaatttggcattttcagggccagcagtcgctggcgttgtcggtctgacgatgccgcgctattgcctttttggggattcggtgaacaccgccagccgaatggaatccaacggaaagggtaaaattgggggggggggggagaaaacaaattcatttcccattttagccggcaaaattcacatttcatcaagttcaaatcgcttcttgaccagcgtaatcggaggatatgtgacggagccaaggggcgaagtgattataaaggtaattagggggggggggggaatttttgttaataaattgcctgattaattcattagggcaaaggtgtgatggagacattttggctgttggggcgaattggcgaagtccatttgccggaggggccatccgtgtcggaaaatgcgggacggaagagcccagcggaaatgcgctgattgacgggaaaattaccgtttaatttgcaatgcttttcctttttcttctttgcccattattctccaattaattgcttcattttttttgttgttcgcataatcagttaaaataacgattgttggcagaggactcttaaagataaaaacatcggaagcttaatcttaattaaaggataatgccatcaaatttgtcagtgacaaattgtgtctcccgtgagactcgtacaataattcttcatttgtggact

SEQ ID NO: 5414 - DNA, 2297 bp, Heterodera glycines
  unsure (1)..(2297): unsure at all n locations
gggaaacaacgtttcgagatgggatacaatattaatatataataatgaatatacctattttaaaattggagaaaaatcaaaattgaagacgatctttcagcgcgaccgagcattaaacaaaaaacttttaaaatgaaaagattataagcaatgctttttattaattaatacatttttgaaaaattttcattaaaaaaattaataaaatttaaatatgtcaaagaaaattaaacattattaataagaaaaataatatatacttaactaaattaaaattttagagcaaactaaaaaggtattgaatattactttcacctaattggattttaattaaataactctaaatatttcgaaacatatggaagaacaaattttacgcaattataaataaaaaataagcaaattttttcttctcattaattacaaaattctatcaacaaaaattataaaaaatgaataaataaaaatagaggcaaatttaattaaagaattctaatgagaattaatgaagggaaaaattatcattgaaagtgtcctaaaatggaaagcaaattctatgaacaataaattttgtggaggataatttcacatgggtaaagtttttttaaattttaattaaaaataacaaataaatgtaatacttttcaaatctagaatataaattgcaaatgagctccaaattaccaacgtcagcttgcatacagttttttaaatttaataaatgtaaagtaaattaacctaaaacgcatacgcttttaattggtaataaattcattagtaaacatttaaaaataacaaattaaatattaacatttatctgaacaatgaacttaaataaatttccgctgtttcgttaaaaaaaaaattgttcatttttattggataaacgaaaataaatttaaaaattcttttacgtaattaataaaatttatagtctcattaagtgatgcgacatttgcgccgcgcagtcaaaaaataatattttcatttcaatttcactaatattaataagatttactaaaaaccaacgacaaaaataactaattgaaaaatttcaaaaaatcactacttaaagatagacattattttttatttttatcattaaaaaccataacattgattaggttcatcaaagatatgaaaaatgaagaagaataacaactaaacagactggcactgtttgaattagtcctactcacagatttttgactgtccaaggctcaaaaaatagttgtaattgatgagcaagggggatttttagaatgactatttttgttttttattcaaaaagaggaaatttatgtatgtactttttcattaaaattgttgaaatttatttacatcgattttaattttgaaaaaagcacaaataatttctcgcacttatttcgcgatttttgagtgaatttcaatcgcttctaatttagaaaactttaggtcaatcttgtaaaatttttaatgagctgcgcaaatttcgcgacgcaaatggtgcggagcaaaagtcggctaaccgtcaaaaaagataaaagaataataataatattttaaaatttaaatattcgaacaattacaaggaatcaaaattaatctgtaaaaaattaaatgatttacttgaatcaatatataataaatatattgaatatatataatattttggattactacaattccaacgccgttggcagccataaattttggagatttcaaggataaaataatgctgattggtaaaagtcccactttttatctttttattttccaatgcttcgatcactttcgtatctaactatgaagatatagcataaaatctttttatactagttggcaaaacgtccggttggcgaaacgtccgaatttggcttagttggcgaaatgtcagttggcaagatgtccggttggcgaaatgtccgtacacctaaaatccgttttcaattagtgagatcgaccattttccaatataattaattcacttccgcgcaattagacgacatttttattgggcccgggtcgccgagaatgctttttcgtgcgggccgagcgacttacagctttgattttaaaaatgcttttaaaaatattatattattgaaaattaatgaaaaattttgaaaatttcgactacatgtaggaaattgccatttagcaaaagttatcaaaaattgtaaaatttttactgttcttttaggcattttgtcaattaaactatttgttaacatattttcaccaaaaattaccaatttttacgattttgaaccaatttctaagaaatttttttttgaanattacgagttttgata

SEQ ID NO: 5415 - DNA, 5966 bp, Heterodera glycines
  unsure (1)..(5966): unsure at all n locations
ttttggatatacattccacgccgttggcagccatcaatttgtggagatttcaaggataaaataatgatgattggtaaaagtcccactttttatctttttattttccaatgcttcgatcactttcgtatctaactcatgaagatatagcataaaatctttttatactagttggcaaaacgtcctgttggcgaaacgtccgaatttggcttagttggcgaaatgtcagttggcaagatgtccagttggcgaaatgtccgtatacctaaaatccgttttcaattagtgagatcgaccattttccaatataattaattcacttccgctcaattagacgacatttttattgggcccgggtgtcgtcgagaatgctttttcgtgcgggcctagcgacttacagctttgattttaaaaatgcttttaaaaatgttatattattgaaaattaatgaaaaattttgaaaatttcgactacatgtaggaaattgccatttagaaaaagttatcaaaaattgtaaaatttttactgttcttttaggcattttgtcaattaaactatttgttaacatattttcaccaaaaattacncaatttttacgattttgaaccaatttctaagaaaaaattttttgaaaattacgagttttgatagcatttatatcagcaaaataaatcattgagcaccaaaaatttttaaaaaaaggtttgggaggcctgaaaataaggacaaatcttagaaataaggacacttgggaaccgcataagaaaggttaagaatattaaaatttagcctattttaaatattttaaaaatattttattatattttatatttttttcaaaaatttgcgattttgaggacccgagcaaataatggcaacgccacggtcattgcttggaacaaaaggagttgaagaaactgaagttcatgtcgtgcttttttgcagctgttgaaagagaccaaccaactcagtgaggaaatgcttcacttgcatttgcttcccattatcaccttttctcaaattaatagggccgcaataattaatgagttaactatttttttttttgctcaatggtttttgtgaaagatgcccaaaaaacacatttatgcactgaaaatttaattttttaggggctgacggcatttttttacaccacctataaaataaaaaaaatgtttcaaaaattgatcgcaaaaattttatatttttttcttgaaaaattttaaaatttaaaacttttcattaaacgaaaaaattataaaataatttatttaatgatcatttaaatgaccaaaattaagtttttggttaagtttttcatgttctgctcacggaaaatctttaataaaaaacattttaaatgccttttttcatgcttttttcaggattttcactggggtcccgcaaaatcccgcgcgggatcccgttccgcgccgcactttttatcaagaaaataaaatgaaattttggcgatcaatttttgagtaaaagtcaacgtagaagactcaaatcaagtggaaaatacgttttttatacttaatatgtataaactagtgcgcagaaaaacggcatctctaattattatcaatgaatatctaagttttctcgactgttgactgagcatggcattttatattacgcaaaaaaaaatatttcaattattaatagggctggcaatttaagtcacaattaaactccaaaaagtcgactaatttagagtcagcaaaaaagtaaattaacttaaattgcccctaaattatcaccattcatttaacaccagtaaagaaataaatgtctttttatttgacaattctaattttaaggttcgcatggccaaaaatggacttcccatggcatttgtggcctcgttatgttgttcgtgtttttgtgcgcgtggtccgttttatgaaaaacaagaaccaaaaagaaactaattattattcttttaggtatgatggcaaatttaatggcgaatctgccatgccggcaatttgggcgggaattatgtgcgaattttttgcatacattgcattaaacaaaatgtgagataaaaacttgaattacttgcaaaaaaatattattgtaatataattaaacaattttttttttactttttcttcagtttatccgttgctgaagggcatcaaattgacgaattggtgaatgagataaacaaatccgagctcgatgtgaacgctcaaatcggaatccaatttagggaagtgctcggaagaatgcttatttcttatacttaatttatgtctccgaatcttcatttttaaattggtttatttctaagattgtgcttatgttcattcttaaagaaatttttgaaaagtttttcatctttgaacaaaattgtttcaataatattcaaattacccggcgggattcattcataatcgaggaaatattctttttttattttcatttgacggatttttattcaaaatcataataatttcaaaaaaaattttttttttgtttatttgttcttataaaatagcaatcattcgattcctctcaacatgtaaagcattaatccgaaagaatttttgacaaaaaagaaattgacaaaagctatgggtcctcaaaagcgttaacttgttgataaacaagttcagtcagaaaaatgataaaaagtcaagtttaaaagattgagttttgattattgcgctaaaaacaaggcatatgcctcaaaccccggtctttaattatatgcaatattatagtttcataccaactataaaataaaggtaataaataaagaaaataaaacagagataatcatttcattaaatttgaaaatttaaaggagtttgagataaaaaagttttttaaataataaaatataataaacaaaaaattaatttaatgaaaataatacgcaactaaaagtgcaatcgaaaatgactctcatcaaagcatgattgattgaggagaggataatgatatagttcgcgaaggagacatgtaaaaaacataataaaattaatgtcaattgaaagaggttcataattaaaaaagaagataaaattaaaataaaatataaagaatgcttacataattaacaattttaattagatgcgaagattatttctttaaaaattgttatatcaggcaaggatttttaggtgcttaaatcgcaaaaaataacggaaaaattccaaaaaaattcaaaaagatttttcctaatcagagtgattacttttttctcggcggcggagtcaaaaatttttaaaaattttttcaagtgaccatttttgataggatataattttgaatcatttagatttattgggctcagacaatgctaatcggtgccgcgaagaaatttagaggtttattgaattttcttaagaaatttttcgcgtccgaaaattctttaggtgctacccccaaatagaaaattttaaactttttagaattgactctaattttaaagaacccagccccggttacaaatttttgcataaaatatttaaaaatattttaattatatgcaaaatattttcttttacatttgccgcatcgattccttcacgaaagttgattttctcaaaattgctcccataaaatgtgttgattttcgaattgaatttgtccaaaacttcaaatgaacccgacaaaaacattttgctggccattttcagtttaaaaacatcattagaagaaatcaattgaatttcttggagaaattgacggttgttatcgtgcattaattgttcagacgaatctaaacgatttatttaatgttacaaaatgaagcaccaacataaataaatttttggtcgcacggtgccaggaattaaccgtgaatgtttttgaattctctgtcggcccagccagaatagatggcaaattattcgtacaataatatttttatattttggagattttttttataaatatttgaagttacttttttaataaaagatttaatgttaagatattttttaagattattcttgtattaaaattgtattacaaatatttttaaaatttttcttttttaaattaataaatattttttgattattgtgcgaatgtcactatgacaaaattaagctaattccggcactttgctatctccgggttcccaaaaattcacatcccactcaaaatttaaaaaatgattacccgcatccaacaacactttgccaatttgcactttcgtgttcccccgtgcgccaatgtaggcaattgccaagccaaccgcagccaattggggggcaactaccgtatcctcctccttagaccattcatagtgtttttgaaggtaaataaatgtatttgaacaaatccaacaaaaaattccgtttgatcaacagcttgaaaagcgaattattgcgaaaatgatatgtaaataatacgtctcagcacaaagtccgggtacatcagcgtgccgtctggcattccgttacgtttaattttgttcaaatcggtcggttgccaattaaggagtgtttgttttgcgtattcgtaaccaccagcggcgtctcgccattgcactgctccgccagtttgcaaatccaagtgcagtccgcgcatctcttgcacacggccctttggattaaaacaattattataaaatgcatttttttcaaattaaattaatttatttgattttttcgaacattggctgtctgaagcttaggcagtcgaaagggtgctacgtcatttcgcgacaagtgcaaaaagggcacttcgcgacagtgcaaaaattgggcacttcgcgaaaaatgcaaaaattgggcacttcgcgacagtgcaaaaatggtgtaaaaatggggcgtttcgcgacagtgcaaaaatgggcacttcgcgaaacgtgcaaatttaaccgaaagagaccgggcctcatcagtacggtgtctctttgggttaatttatttaaattaattattatttgtgtttcggccctaaaccgtatacacacaaagccacagcaatcaagcaaagcaaaataaattttattaagcaaactaaatattttatattggtttttaatttaatcttttaactaattatatttgaatatgattaatcaaccaattaaaaagcaaatcaatttactattttaataaaattatacttgattatttaaggagcaaatttttgttattattttaaaaaatttatgcaaatgcttttaattttataataagctagttttgctttaactccgcaggatctataattgcttggaaatgtcccaattcaaaaaatataaaaattgacttatattctctcgactggccaacaagcatctaaatatgcctaatattttgatttatcgtatttaaatggataccgtatccagcatatccggagtataaatattccatacatattgtattccaaaatcttcttttctctgagggtttggactacatacgataacattaatttggaataattttgcagctgctagaaaatcaacattgctgccccacttatgtctttcggaggcagattttgccggctccttatgattctggacatatgtacgtatactaattatctatagaaagatttcgttatcaaacttaaaaaaatactgtacctcattcccacttgaatcatataatgtttgtccgggatgaaacatttcccaccatccgtgccatggaattcccatttcgttaagctcaacctctgattcaatatactctgtaatcgcgcgtcgtataatcccagcattttctttcaactcagatccagtaagcaaaactgataaagaattataaaagcaattcccgtcagccgcaacatttattaggcggccttaaaatatttatttaaataaatttatcaaatactaaatacctggcccagtttctaaatcaaaaaattcccgttgagtgccaaaagaataagtcgggtgggctataataggaattatataaaaaaattaatttaaatatatctaccaaatcttaaatcccatgtgtttacaatttgttgct

SEQ ID NO: 5416 - DNA, 1010 bp, Heterodera glycines
atttgtaatttttcaaatcggaaattttggtcaaaaatagtttttactcataagaaaattacatttaaagaattcgtcaaaatgaaatgtgaaggcgttcgaatgataccaaaatcgttagatttggtgaaaacaaaaaaaagttaatagcccaacaggctggcgccaaaacgacccaagtccactaagacatttcgcaaaaatattagtaaatttttcaaatttgacgcagtttcactgataaaaaatttttccatcctttttcagacatttcgtcgaaaataatgattaaaaaataatacagtaaatacaggtgtttaacgcctgtatcttgtacctgaattccaaaaatggactgtacttgtattttctccgaatggtgtctaaaatattctcgaaatcacagagaccccaaaaacaaaaaatatttttttattttttttttatttagccaatttctgctatgtaggaaaatgagtttgttcaaatgtacaatataatgaaggatcaatcatcttgtcgaggcaaattttttattgcttttggcgagtgaatgattatgattagggctgggaatttaattcaaattacttttttttgctgattctaaataaccttaaatggacttaaaagtattctacacttgtttgaaccttctaacatgcatttttttttgactttttatactttttgagatttttatgccttatgggatttaaaaaatagccaaaaagtaaaaaaaaacgccaaaaaaagcacaaaaagtcctaaaaaattagacaaagcttaaaaaatcccatttttagcattttaatgaatagcattttataaatagaaaccggattatcaggtatacgcctttatttttttgcttacttgccacttcctaatacattcgcacgaaaaaaagtttttaacttagtttgcagcttcttgtttaactttttggtgcctttttacactttttcgtgcttttcttggctttttgtgacttttttgctattttttca

SEQ ID NO: 5417 - DNA, 1292 bp, Heterodera glycines
ccaggaaacccaggtccaggaacgacatggaaatatttctccttgaatttagaaaagttttttttaatatatatttttttatattttcagttgaaaccaacgatccaaatgccttttactttacatttacgttgcgtaaatatgtcaatgttaatgaaaaagaaaatcatgaacaaaatgtcgaatgtgtggactatgccgaagctaaggacccaaagttggagcagttgtttctggagatgaagaaggggttggagcagttgtatctggagatcaagaaggtcgagcagaagtttgacgcgtacatttatagcaaggagaaaatggaggaggagcttatccccaaaatggaggatgttgtgccgaaaacggaggatgttgtgccgaaaattgaggaggttgtgccgaaaattgaggaggttgtgccgaaaatggaggaggtagtttcaaacagatgttcaacagcagcccacggtaggtgagggtctggaggcaatttagttttgcagtggaactcggacagaactagcccaaccgcagtgggacatttgcgacggacatttgcggacaattttggggaaaaaaaaaaaattcgtaaagaaattttaaaaaatttctgaaaatatggaatgggactgaaaactaaataaaactttgtttttgggcttttaggcctaatattttatttttacatttcttagaaattaatttcactactggtattttgagtgattaaagtaaaattggtccttaagatcggggaggtgtgaatgtcgcctgttacactcaaattctgtgagagtgctattttcatctttagaaaaaactctgagacatgcttaatcgtgaacaaaatttgcttataatttcaaaatgaacagcctattattctaaatgcttgaacatcagctgtactaaaatccgattctcgatatttttgggcatgagatttccgatttccttttttgaaaatttttggggcctaaaatgctttcccggctgatgaaaagtagagcaagacttatgtgtcttgggttcttctccatcccgaacaaaaggaaaagaaaattcagggggcgagtagcaaattcccctacaagatttgtctgtatggctagagaattttaaaaaatgtcggtggaaaaatttcacatccccgatcttggggaccaattttactttaatcactcaaaataccagtagtgaaattaatttcttagaaatggcctaaaagccgaaaaacaaagttttatttagttttcagtcccattccatattttcagaaatttttt

SEQ ID NO: 5418 - DNA, 1288 bp, Heterodera glycines
ggatcccgatccgtatcttgatttttttttttgaaaaatgcccggatctgatcccgagaccaggatggaatccccggaagcctgtcctaatcaaaattcccaaaaaaaacccgaaattgatgccatatggaatgatcatcataagctggggccgggattagagggatgggcaaaaaaaaagaaatgaacaaactacccgaaccaaaactcggaaaattccccaaatccgaagcgtaaaaatcgccattccaacgacattcagaggaggatgaattgaacacgaaaatggagacgaagctgaacattttgaacaatgggaaacatggcttaaacaatatgaaaatgatgggaagaaaatgaaggagcacaaagaagaaaatgattagaaaaaagagtgcactgaagtgggggggggggggtagcatattttagggcataaaaaatgccaaatttgaacggcaaagacaaaatcctgttattttccatttaaaattcctattttaaattattgttttcgtttaaaattcgaattcttcattcttccctttaaaattcatactttctattttttttcgttaaaattctaatttttccgtttaaaatttctatttccaattttttttttattctaaatttctcatttttaaaaatttctaatccaatttttcagttaaaaaattgctatttttccatttaaattgcaaatgttcagttttttgtgttcttattttgtttgttgttgttgttgttgaataaattcatccatggaaaaaagcttctttcaaaagcattttccaatcaaacaattagtcatcagcataaaatttttgttgaatgaaaagttttttaattgaatttaaaaaggcaaaacaatttcacttttggttagcaaacaattaaaaaaaccaaaaaaatttttttgataaaactcagaaataaattaaatttgatcgtagtccaattataaattatagtaccgaaaaactgatcattatttgctatattattaaacaaaacaatggggatttcaagcctcgatttttcctggatccccaggtcaagaaggtcaattgtgaaaaaaacccaggcctaggttcaggttttagacacgaaaaacccggatttcctggacattattttaggtttttgttagtttgagtgaccgtttttttaaatcaaaaaatgtttaaatagaaatttaaaacaatattgttattgctccacttagatacttttagatttttcctaagcattaattatttatgtttactctttaaaacaaatttta

SEQ ID NO: 5419 - DNA, 3658 bp, Heterodera glycines
  unsure (1)..(3658): unsure at all n locations
tttagtttatataatnttgtttaataaaaaataaatattttttgcacatttttgccaatttaattgattttaatttaattttttgttccacatttcaatcacatgtccataaattatcacattttgtcaatttttgaccatttttgttatcatcattcttgccccattttattagttgcaatttttaataaatccaaattccgataattaaattaattaatcaatcatttcttcctatgtttccaaattttatgcactgattaaatacttgaaattttatttttgttttttggttattaatttttcggctataatccttcaataatgatcagtatttcactaatttttgcgggaacaggaattaattagcttaatttgtttccgatcaatttgccaatggcaattttaattttaatttctatttttattatttcaactttaaatgtttgttattgtagtgatgaagacgaactgttgctggtccaagcggtacattcattcaatattttaccaattaataataaatttttctttttttaaattgtccaaaaattttttaaaataattgttttaattatttatcgattaaatgggaattgcgattctttttcgatttcactaattatagggccatgggatataattattaaaaaaaatcttctatcaaattaattagcgctaatggctaataataaattgtaattaaatttggaattttccagaggcccttccaaattctcaaatccctgtatttgtcccgaacaaatgatcactcaccttgacataccatttcttgatcgcaacattttacagctgtggcgccatggcgaccgttccccgcttggcacattcaaaaacgatccgaaccaagaggacgcatggccccagggatggggccaactttcagcagttagtcattcattcatctattaattgtttgccaaattttttggcatttggcagtgccaaatttagacctaatcctggcagaaggaggatcaggtagtttggttatggcacagcaaaaacttttggcaccgccgccagttttctcgtgatcccgatcccgttattctcatgggttttgtttggttgcgaatcgagtccagaatttgaaaaaggcgggatccggatttgggattggcaaaatgctgcattgcctctaagtaccccataaagcctcgagaaggggtggcgggggggggaggggtgagtaaaaccataggaggcttagaaacaatacggtagcaccaattctttaaaaaatttctatacagtagcgcttaatttttaatggacacggtagaatcaaatcctgtacggtagcattaatttttatttatactttttaacggatatggtgcagcattattgaatttaaaacatttttttacaataattatatgcccattagtagggatgggatttttaggtttttacctttttttttttgcggcttagttatgatgagagatgcccaaaaatagcattttctcctaacaattttcgatttagagcgactttttagcacctaaaaacacctattttggcgttttggcacctaaaatagtttacaacctattttggcatttttcgaatttttagcacctattttgggattttcccagaaatttcatagtaaaaatgcaataaaaacgaaaaatacacccctaagaatcgatcccaaaaaattttaaaaatatacccctaaaaattgaccaaaatttcagaaaatattcccctaaaaaatgaaaaattttctcaaaaattcgtctccaaaatttatttatttattttcttgaccagttgcaattgtgcgggcgaaattgataaaaaattagtcacattttgaattgttgtacataaaaacactggattttttcaatttttaacacctattttggcctttttggggctttttagcacctattttgcacttttttagcacctattttagtacctattttgggatttttagcacctaaaaatcccatccctacccattaggcacctgaaaaaaatgaatgccttcagaaagggatggcccaacatgttaagcttggcgccaagctgaaagcacgttacattgacgggcttaactttgtcaaccggcgctatttgagcaaagaaatttatgtgcgaagcaccgatctgaaccgcacgctgacaagcgcaatcgcaaatttgatcggcttttttgaccgcggcattgccggcacggattacccgagtgagcggcaggcacagtggtggccacacgggtgggtgtgtatcagggatgttgctcgtcttgtgcctcatattctcgtgtttttgggggtgtctcgtctcgtctcgtatctcgtattttgtttttgtctcgtttttctcgtgtctcgtattttatttttctattcgcaacatccctggtttctaaataaagcggatatggaacgcggatgcggaacgcgcaacaacaaaaaaaacggggaatgcggtctcagtccccagaaaaattttaaaaattgattttttataatggaaaacattcaaaaaatttcataaaatttaaaaataaaaagatttttcaattttttaccggaaagaggatctgcttaattaaaaaattaggggacgcgacacgcgaaaaaaaaacacaaaccatatatgtaccagaaatggaacggtattccgatttccgatcgtttttaccgtacatttttcaaaaaaaaaaaaaattacgatacttagcaacttacagtttcacaccggtggccgtgcacacccgtgaagcctttaaggatcacatcatcccggacgtgccggatgtgccgtgcccacggcaaagcaaaattttgcagataatggcacggacatttgagtaccgacagctgacgaagcaaaagaaagtggggaaatttttggaaattttattaatatttttaaaattttacagcaattttttgccgatttgtccaatttgacaggcgaacaaattgacctgtttaacttctatttaatccccgacacacttttcattgaggtcaaatgcaccagggatagaagagaattataggggggatttaaggcaaattaaaaataataaaatattaaaaaaatgtaaaatttaaatcaaattaatacgattttcggactcagttttcggttcgagcaattctcatgtttttcaagtgtaggtgtcgattttttgcctatcgtactttcattgacaggacatctaccgtaatgagttgccagaaccggtgccggagtggacacaaaacaaaacgctgcgtgccgaactcaaaaagattgaaaacctgattgacagatggctcaatggcaaaggcatgccgattgaaataattaaatcctttaattagggtctgatctaataaactgatcagagtttgaacactgtcagaataagccaaaagcgatcagagtttgatcagtgattaagggaatggataagagcttgattagtttatgtaactgatcagagtctgctggcatcaatcaatagatgtacagaaatgttttaaactcaattaatagatcaaagagatccgataatttagacatttccgccttcgaaggtgtccaatttgacgtcgaattaccacggatccgtggcgtgccaaccctttggattctcattgacaacatgcggaacaag

SEQ ID NO: 5420 - DNA, 1837 bp, Heterodera glycines
  unsure (1)..(1837): unsure at all n locations
tttttgaaaaaaatagagcgatcagaaaaaaaaaatgggttggtgagtgatcagaaattgttgtgggtgatcggtcattttctcgtagggttgacacgattttctgnaatttttctattaaaattttttctaggttttttttttttgaaaattttcgctntgagccagtaaaccaaaagtaaatccagattatataatctgtgacccatcccccggtttctcgaataacaatgcttttgtgatcaagctacccgcactacactgcttgtgtaacggttgagctatggcggaatgtgacgaatggaggggagccatatgtgaaggtaagggcggcaaaaagtgcctccggggatttaatttgttagcatttttgccaaaaaattactttttaatttgtgctaatcgtcgccggggatttaagcaaaattcgttagaattttttccaaaaaaaaaacttgctaggcgccgcaggagattttttagcatttaaaaaacagctaatttttgaaaatcgcagctggaaattttgacaatttttgtccaaaaaaaattacaatacgctaaggcagacatgaatttgaaaacaatttttgttcttttttttacacataaaaacgaatttttgcgccaaaacgcaaaaaatatcaatttaaattaaattttaggtaatttaaaaccgattttttttattgtccattttggaattaattttaaagagaatttcaattaacttaaaattttgcatttaaaaatattcctttttattgtctttttagggaatttttcgttagaaaattttcggtaaaaatttcttatccctgaaatgccattttctctatatgcccacaggttttgtattggccacccgaattggccggcttcaaggacataacgcacaacatcaccgggtgcgaaacaaatgccacattgaaccaatttgtggcacgttcgcgcattttcaagccgatgccgtcgccggatgagtactgcaaggacacatatttcccatcaaatactattgttgatccaacatttgatcagcaactgtgatcaaaatgataaagtgtagggctggcaaaattacttgaaaatccgggattttttaaattggattttgggaggtctaaaacccataaaaaccgtgtttttagcttgacaaaaatttaacaaaaatgtaattgataaaataaccccataatatttgcaaaaatggtgaaaaaaagctataatattttgaaaatgttgaagaaaaacgaaaaaaaattatatatggtatatgtttttgccactttttggtccaaattttgctattttatatccattatttaattgccagccctaaaatgataaaagttgcactcgcaaaatggactaaaaatgaatacaaagaacggagaaattgttggacgaaaaattgtataaaataaaattgcataaataaactccaaacaaaaccaaaataaataaaaaaagcaatcaaccacattgctacaaaagattggatttaatgaaaattctgatcaaattgacaaagcggattctaggagtaaaattatttaaatattaaaaaagcgttacaaaatccctaccaaaataaaatgacattcttaaatcctttaaaattcctatacgtaatatttaaataaaaaatacgtacatataaaaaatttaaaaaatcaaaacaaaaaaaaaaggcttacaacaccttcgattcccaggacgtctccgttccaagtactaagaaggcccaacgttgcttaacagccagatcggacgggatggcgtgctttcaacgtggtatggtcgtaagcgaagaaacacgcagcgcagccatcca

SEQ ID NO: 5421 - DNA, 5150 bp, Heterodera glycines
  unsure (1)..(5150): unsure at all n locations
atttatnttattntatttattttatttattaanatntaattattnnaaatntaatntatttaaatttattttattttattttattntaatttattttattttattttattttattttattttaatttattttattttattttaatttaatttatttaattttatttaatttaattttatattttcagaacaattctgatgttttacagaattttcagaactgttctggtgtgtttcagaattatcagaactattcggacgcttaccagaattttcagaactgttctggtctgtaacagaattatcagaactattttgaagcattccggaacaatcagaattgttctggtgtttaaactgtaaaaattgcatgcaaaaacacaaagcaaaacacaaggcaaaaagttgtaaaaatgctcgaaaacacatgctaacatactgaaacacacgttaatgtaacgaaaacacacgtgaaatgttgaaaacgcatgcaaacgtgtcgaaaatacacgtaaatgtgaagaaaacacgtgaaaaaccggaaccggtttaaagaacgcacgtcgaaaacacatgtaaaccggttgaaaacacatgcaaaaacacaaaatccatccggtcggtcgaaattccggacattccggatgaatttgcaattgtaaacggattgtaaaccggaagaggaaaacacaaaaaaaatgggcttttttcgacctttgccggggtataactttgttcgaatttgtcgtagagctacgaaatttttttctcacccttcctctcgacgagctctacaaattgttcgcttactgcaaaagcgtagctcttacggttcccgagaaataaggtgaaaacacacattttacaacccatttttggccagttgtaaaaagccgggttttttttgttcgaacgcgattttctcgaaaatgtctgcttgtcgctaatttttccacacggttagaattgtagagaaaaccgagctctttcgaatggtaccggtctcggtgctcaactctcgatattcgcttgcggccaggtcgttttgtggttagccccccccttatttttatatatagataatcctatttcgcgtagtcgcgacattcccgcgacggaaaggaaagtatttaaaaagaagtgggtaaatcattggacatatacaaattataaatgttatcatcacaatcaaagtaaaaagtatagttaaaaaattaaaaagatttgttttgattaatgtatatatgaaattaaatatatcggaaaattgttcgagggaagttccaagtacgggtgtttcctttttgttattcgatgggttaattattttgtcttgttggctcacataattcagagtggcctcaattgttatttcactttttccatctggacatataacttcacatttttcttttacactcggttgattaaaggaaagctgaatttgctgttggttcccttttgtgtcacagggtatttgaaaattctgactatggcattttacatttgccaatgcggtaccaaagttagttgtacatgtaaatttaaattctgctccattggtgcatgagtaacatccttctaacgattttgtttttacagtacaattatttttgtcgtaaattgctttgactttgtgaccttttagcgtgacttgcacttgtagtgaagttgttaattttatttttgcccttaataaagtgtcgaagaatacttggcttccatgtgtctcgagaggcaaaatattttcttttctcgtgaacatttcagtgagtgggtttttctcacattcgcagtgaacaacggagtcacctccgtgacattgacaagcttctggtgggaatgtgcaactgaattttgtcgccttttctttagtttcgcaccgtaggctattcttaagtaaattctcattatcaactattacagcttttgcgtttgaacgatcaattataaattttgatccaaacagtggcgttggtggaattgaagttgaggtgagtgtcagagataaattcgagtctttaacatgtgttaagacaccaggttttaattccacagtatgtatggtttttggatcaagcgaaattttgattgtagctaaaatcgtccaagtcggacatttgaccacttcatatatgtttctattgattggctcggtatatgttctataaaataaacatccatcggtggcaagaaagcatttgcagtgccaaccaccacaggaaggcacacaataggaatatcctggttgattattggcatggtcaccgatttcaggattttttcccttcattgttaaagtttgacatatttggccagtgcactttcctgcacctgaacatcgcttttgtgagctcgacagtaattgataatctcgcataaaatattcagatctctctgcacaaattattgttagactttcaacagataattcaattgtttccatcgtagtgtgcgtcttttcattgtcgagtttcagacacgttttatgttccggtgtgattgaaatttgggttgtttgatcgtaaatacattcaatctttccgttttgatcaattgcgcagtcgtttgttcctgctaccatgttagtgacttcatcacatgaaaaaatagtcggtgaattgagtaaaaggctaatcatgattaaataaataaattgtttccgtttaattatttttattttctttaattttctttttctacagcaattgtagactgatagaaaaataaaaacgatgaagcggtatagtattcttataattttaagacaaagagtaatgacgtaaagggtgagcattatcatgattagtatcagagcccaatgcatttgaccaacgcattgtgggtttcgaatgtattccatgcagaaacgacatataattaattcacatattggtgatggagagcatgttaagtttttgtactcaggtgagcttgtgcctttaataaatttaatgactggtttatactcgttcatagtaatttttgtaggtagagaaataaattcttcactctgtggatttcgttttaggataaaatatttatcaaccaaaatttctaattccgtggtagcatgagttgggtttatttttattccaccttttatacattcagcggatatttgttcgttttcgaacggatcgaattctctttttttcgtttgagttcatccattaatgtgtcattagccaaataaaaaattctttcgatgcttccccatgcttttatcgggataatttctctatctgatttgacaagataagttttttcatgtggctcgtaaaagcaaaattttgttccaagtgtgtcagtgcattcgtgttcttgacagaatttttttgtaccaatcgtcagattgccctccccaaggcaacgaaaatcaattcgagaatcagcttgtgaatgaagtaaattaaggcttttaactgcatgaatgctattatcatagagcattattgaactgaatatatttttgtccattagggagcatttttccgttttattgaatgaacaaatgtttggtttgaagaatgaaataatttttttaatattttcctgatcagttatttctctttttattctgtgatatgaggcaaaactacaagaattagtccaatcaggacatttgcattgtggtccacaatagggtgggtgattttttatgacgtgttgtttgtgacaaaatattttacgataacaaaattccattgttaatttattttgtcttatagtaaatccattttcaacacaaaatgttgtatacttcgttctccatttttcattggtttttggacattcatataaatgggataagcatggtaagatttgcataaataatagaagaaacgtgagtgtgtttaaaaatactttgcttaattttggtaatgataagacacttgcttgttttctcttttgaactgtaccaatttgttcgtgttcagtgattaaatttgtgagagtctcattctcctcacagtcagttttgttaatttctaacggatatagcaattttaatggacggttaatgacattcttgtttggtaactcgacattagctcctcttatgataccatcttttcctgttatgacatttttaataattcctgttttccacattgctcttggggtctcatcatggattatgacaacttcattgatttctggaaaagattttacacaattctttggatttttattttctgttttatatctttctctcaggcttggtaaatattcttctatccaaattttccaatagtcatccaaaatttttgttgtctttttccataactctattgtttggtcataataagttggttttggtaaatatgttgggtcattagtttcatttacttccaaaattgggggaatgcatagatttttgtgcgggagtataaaatcgattggtctaagaatttggtacgaatttatttcgtcataaatgaatgtaattggtcgtgaatttactaaggcttcaatttcacaaataagtgtttgaaatgagtcaaattctatcaatttccttccaattgcttttttcattgctgattttacattttgatttaaacgttcaattgctccgttttgccaaggagctaattcgattgaaaaaatccattttatgttttccttttcaaaataatttttaatggattcgtctttaagcatttcctttaattttaggacttcaggtaatacttttgaggcaagtttcagttgtgatgcattgtcactccaaatatttttgggtgtcccttttcttgaaataaatctgcgaaatgcattgagaaagtgttgtactgataatgatgtcactaattcgaggtgtattccacgcgtggtgaaacatgtgaaaaggattatccaacatttttcagtgaaactttttacttgaagtggacccatgtaatccaggccaacgttttgaaaaggctctgttatttgaactcttgattttggcaactgcggcatttttggttgctgatatggttttgcgttatatcttttgcaatagaaacactgtttccttatttggtcaacaattcttcttcctttggggatcctaatatgttttacgaatttctgctaatgttgtcattgttccagcgtgtaaatttctttggtgatggtcccataataattaaatgagta

SEQ ID NO: 5422 - DNA, 2576 bp, Heterodera glycines
tcgctgcttcaattttgacatttgtcagaattgtttttcagtcaaaggactgccaaaagtcacaaattgtctcacccgatgcaggaatattgcacaccggtgccaatgagcatttggccaaactgagcaaatgccaaccattcgttcctttagacaagcgcgggcgatgacatgcgtgacttcacagtgatcatcaaaaacaaagtgcgccagggcaaaagtcgaattggctatttgccggtcgaacaaataaacgaaggaccgccgctcgaatgcaacgaccaaacgccacagaacgcggaaacagaggcaatgcaccagcgaatgcagctgatagccgcgagattggacaagcggcaaaccgaagcggccgaggcttttccgaatgccattgtgccgtctgaagaaggtcggaaaatggcaaattgggggaagcaaatcggcaatgatgacatatcagggaaagtgaagaacggaaagggggacgaagtggcggcgcaagtcggccaatttggcactcaaaatgcgcaaatgccaaccgcaataggcccaaggaatttgccaaatggctcggcatttgcatcggaaagccaacgagccaatttcttggcgcaccaacacgaggcgaagtcgcccaatcagttgatttcgcaggtggagcaggcgagcaaggaggagctgggacagatgctgcagaagctacaatacgaacatgagtaaaaagaaaagcacaccaaataaataagaaaattatcattggaacagcgaattgaaaagggcaattgacgagcggaagatggcactgaaagcggcgggaatgccattcccttccggaacgaaatccacgccgaatttattctatcaacgaacaccaatgatgggacaaagcataaacggaacagcgtaagaagaagcatttggtcctaatcacttctcttgtaatgaagaatgccatcggatggccatcagtcactcgaaatgggcgaagaatcgcggggaaggacggcggcctcaggtggaggatcaaactgttcagcgactgatcggatcatataaaattggttttcagtgccgcgcagtttgccgcctcagaattcgtcgtcggcttttcccgtccagcaacaaactgtgcttccgccgcccatccaaaggcaaatccccgcctctattcatcgtcaacattccctcgcggacgcttcttccacggcttttgccgcctccgctgtgtttcctgatgggcctcgttcgcaagcggaccaatggcaggaaatggccgtgctggcggaggcacaccatttgagacaacaccaaaaaaggctggaagagagagggattgtgctggaagatcaaaacagacaattgcaaatgcaattggaaaggcttcagatgctaatggcaaaggtggacaaacccaaaaaaggaagggagagaatggaaattggatgattaagaagggaaacgccctccaaacactgccaacaacagaagagcaacagtctcacaatcagcccggctttatctcctcaaccgacgcggaagacacggacatggaaatgcttgcgctggcgatgccaatcagagagattaaagcgatcggaataagttcaggccaattgggcacggaaatccgtcgcaatcggatggacaggtgaaaaagtggggaaatgagagaatggaaaagcattgaatgttaaggctgagagagacggtggacgaattgaacagggccatggagaactttgtggttttcacgcaaaattgtgcccagaaggagcagcagcaggacacggacgacagtgggacagcagacaatcaccagcaaacggtggaggagttggagaggtagcgagggaagcgggggaagcgaatggatgagaacgaagggggaagcggaaagattggaaagagccggaggaagtgaccgcatatgcacaaaagcacatcacataagcattgtctcattgcaaagtcgttgtttgctcattttttttttgtttttcattgccttttttcttttgctcaaatgtttttttccatttttccgtttcgtttttcccttttccgtccgttatttctccgttgcgtctccctttccgttgcttttcgtcttaattcgttcccttcgctccgttccttttccgttttgcttttatctgctgatccatcatcaccatcggttcgttcccatcgttcgtcaaaatttcgaagtttttcccattttcgatccaaaatcgttcaacgcatctgaagggaatgcgctgcctttgcaaatccctccctttctcacactcccgtgtagaagcaaatctcgcgggcgattgaactcgtcgtcaggccaatgttgatcaattgatttgggatgccttaggggtgacaaagtcaaaaagtcaatcccccgggggtttgttgtccattcgggtgaacctgcgattgttatcgcctcgacgtaagtcaacccatcagcttttcgcgttcccacaatgccggtgccgctatcgcccctaaagtgctttcctaataagacaaaatgtttcggatggattttatcccgagttttggtttgggcctctttgagt

SEQ ID NO: 5423 - DNA, 2047 bp, Heterodera glycines
cgtgtgcaccgattcgggtgattgcaaacagatcagtttgtcagagtcgcattctgaactttcgtcaattattgcgatgtccccatttttcgcacttttctttctttccgcgtctgcttcaatttccctttttcccagcagtgccattttgatctccagcaaatgtgccgatgggttcgattcgtccatttttctttctgatattagttccaaaggaaaaggattatcgttttgccaatttcctattttatttcttctttttttgtcattttgccggtttcccagctttccaatgcttttgctcaccttcctcgtcctgtgaattggttctgtccatgttcctctccgtgttcccccacccgtaaacattcattctctccgatagcttttcaaaatgcggtaaacatgcaatttgcactttggcgttgttcttgttgcccatttgccgtttctgctctgctttcaatggcacaacgttcagatcctccgccaactccacaatggcaaagtccgtctcccgacgtgcaatttccctacttcgcggttttccccttttcccccgcttttcaattgccattgatgccttagggtaaatcgctcgggaatctgtaaagcatgctttttgcgttctcatcggtgcaaaacttacacggcacgtcgaacatgtcctttttacggcatccgtcggccaagtccacctgcgcacaaacaccgcccacctgaggaaaagccaaacggaatcgcgggacttggggtgcttctcagtttgggcatttttacttcgagccaccaatttatgtggtattgtttctcgacttctcgaattgcttccatgcaatgccgtgcagtcaaaacgtgccgttgtgaaattaaagtgcctccgcaaaacgtttgtgtgccgagggcggaactaattgagagagcaaccgccttgaaggaagtgaagcttttttgcagcttttgctttgtccgtcttacccaagggtattcaccgggctgaagcggccttcctccgccgataaccatcccacggattttcactaaaatgcgcagaatcggcgaatcattgccattacagtaccaaaatattttaatttattttggcatttaattgatcattaattaatattaatcccccaaatcctccttcgttcttgtctgtttttacctccatttgtaaagtcgggatttcggcaaaacttttggatccgttcgttctcttctgcgcttattcttttcagctgcgatttgattttgccgacgaatgccagcagaaatatcacaagacaatgaattggcaatgcttttaaattcattttctctttctttttcctccgtttgatttttcccttttcgccgcccttttaaacggccaatgaatgctttttctttgctgttttatggcattttaatcagcacattttattctttgtgtgcttcataataaaatgttttcaaatgcattttaattgtttttcatttcaataatttttcgttttattattttaattttccatttaatttcctttgccttgccaatgaatgccccgccgctccctatgggctaaattaaattatttttgtctatttttgccacttccatcaatcctttacccacccgaactacacaaataataataggtaattccaattagttattttgcccttttctgatattctgatgtcccaaattttatgcaaaggtccgaaaaggaaaatttaattaaaagtgaaagaaaagaaaaggaaggacaaacttattcattcattcagcagaagaagaagaagggaattgttgaaagtagggttcagccccgaccccgagcccccgacccgacccgagacgttttttggacctattccccgacccgacccccgacatgtcgtccccgaccccccgacactaattcgggggattggggactccgagcgttgtaaaaatttaaaagttaattatacaatgaaggaggaaaaggttgaaaatttttgaaattttgaacaatttttcttaataaaattaatttaaaattccgaaaaaaccgttttc

SEQ ID NO: 5424 - DNA, 2434 bp, Heterodera glycines
cgcggcccccactcgcacggcatgccccgccggcatcagtgcttttgctgcagaagcaatgcttgcaactgaatttggaataattgaatttataaaaattatgggccaatttatcgccatttttctggcaaattaccgaaacactttttgtagcttttaaaaagccattgaatttcctatttaatgtatcaaataattatgttaatataataataataatcaatttgaatcgcttcacagtctaggtagcgaagctcccaaagcgcgaagcgctttttcccagctaaatagccgacggttaaaagttaattatacaatgaaggaggaaaaggttgaaaatttttgaaattttgaacaatttttcttaataaaattaatttaaaattccgaaaaacttttcggcggcgcctatcggcaccgccggcctcccaaaactccaaattttttcctaaaaattggctcgaaaatcacaaaatatggacaatttttggacaaaattctcttaacaaagtatactcattttcaaaaattttcccgacggcgcctatcggcaccgccggaccacttcccccaccccaagtttccaaaaaactttttgagaagcgcaccactaaaattgtcatagtttttagatattttgaacctgggaattcgatttacgatttctgaaaatttttggggcctaggattccttgttataaaatgccaaattggacgcacttttactggcgccaatgaatgaatttgaatcagatgattaaagtgaaaaaaggaagatttacgagcattaaaaagaaaaattgtttttttttgttaaataatttcgttgatcactacccgatcggggtccccgacccccgacatgtcgccccccgaggtccccggcccccgactttttgcccccgagggctcggggccgaaccctagttgaaagattcgtcacaattggaaaaagtaaaaataaaaaaagagaaaatgtaaaacaaaggaaaaagacaaattaagttaattgggctaattagtgccatttgcagcaacgacccgcgctcaattaggagttcatttgataatttatgacgacaaataaaaggaaagcatatgaagaaagtaaaatggtcagatttgttctaagggcaaatgtttggtccgattcatttggtcgtattttggaggcgaacaacggcaaaacattcggaagaattgttgccgaaaacgacgcccaaaaagcgaataaatgagaatatttgttgcactgaaagggaactgctgacattgctctacttaaagtcatgtcaaattcacctgttcagacacaccaaaaagttgccaattggaattcgcatattccgtccgtcgtcccttaccaagtcgaatgcttcgattacgtggttaataccttcattaaggacggtaaagcttgatgttggacctttttactgctcaccggccaaccaattgaatgccacgaaagcggcgattgtaaccaccgccattttggtgcagcgcgagtccaacgcattcgagagggaagagcccgtctcgtgctggtggagggagaagctgcgtattgccatggcatttccgttttcagtgcctttggcattcgctttttcatctgttgttgccgatttgcgctcgttccttctgatgatcggcggctgagttggccttttctgctgctgcgctgtgctgcctttcagcagcgactgtttcggctgaatgactccgcccgcgaaaccattccgtccgcctccgtcgctggtcgttgtgccgctgccacggctttctcccgttgttctgtaaatgccaaagtcatagaacgaaattcgaacggaatttttttgcaaatttggatggaaaatgaaaagtcagtcatcctttgatcacctccttctgatcacgcgcatttgacaacgttgcgcattggcctttcgaatgatggacagaatttgagcattcagcacaattataaacagaaagggagcggccaacataagcagcaaatagcctaaaatgggagtggggttaaattaattaatggattcaaattagatgaggaaaaactcaaaagattgttgcaaattaaccactgaatgcgctttaccataagtgtaataaatgatgaagtagaggtggtcctggcgcagttccgtcttcgtcagtcggccacattcgttcagtgcgaccttaaacaatcaatcagtgagtgcgaatggcactttttgctatacttcaaaaaaggacggcattttgaaaaggacggccactgcggtgatcgaaaaaacgacagttcgcgcgcgattggcggtgcacctgagaaaggggcgaccattggcgaggctaagcaaatcgttcatgccatgctcgcatgtgaagcgggtacttaacagccaaataacggtcgatggttatggccacaaccagtccaaacgct

SEQ ID NO: 5425 - DNA, 2933 bp, Heterodera glycines
  unsure (1)..(2933): unsure at all n locations
ggcttagaatcacattttattattttaaaaattaatttctggttaatttttattttttcataagaaattttataaattttcaaaaattctcaaaatatgtaaaaaaaaaagaaaatatgtacgaaaaatttgccgaaattatgaatttattttgagcattttcaaaaatttctgtaaaaatcctcaaaatatgtaaaaaaaaatgtatgaaaaagtccgaaaaagtccaaaatatgtaccatatgtgtataaaaccccgaaatatgtaaataaaaattcccaacctttgttcgcaaacacaaaaaagaaagtgtttttcctactaattagagcatggagaagccaggaaaaaaatatgtatttacataaaattgacatccctattaatgaccttaagaggttttaatttggtaagaaactaattgtttttattttatctgccgattcttttcaaatttaagtagcttagttaaagacttttttcaacattgtaatagccgatatttgtgtattaatttttaaattttaatctatcatcaatagcatttttgttggttgttcgtaatcgttgtttgtcgtcgttcccttcgggtcaaaaaagacaaagtgagcaaaaagaaaaattgcaaaattatgccacagaacagaacagaaagcttttccgaaaaaatgatgaaatttggtaatggaaggaaaacaaataaattacggtgggattatcgtccaattgttcaaagcttaaagtgttgtggtggtcaacgagaatgccaagcacacaaaattaaaattattacagggaatcaatggaaaaacggcggcgcgaatttcacaattacaaaaaaacgtttttttaaaatattttattattttttaatttaaaaatgtaaaaatccgcggcgcttttcccattgaaatacacaacaaacaatcaaagaaaataatataataggcataaaatacggcaatattcatttttaaggtatcaatttgctcgatggctcctcctcctcccctcattttctgttgttgttgtcacttctccccaaacaaattcaacgccatttgctgccgttctctgcgccgcccatcggtcagtccttcagctgagtgccaatgtctccgctttcgtcgttgctggtgccatttgtgccgtcatccgtcggaggggcaaatcctgcaaaaaatgcgtggattgagtcagtcatttctcggcaaataaatgttaattcgaattcgcaatcctgcattttttggaaaattcaggatttgcagattaatccggccggatccggcccggcaaaaaattttgaattacaatcctgcaacaggatgcgcaaatttgatttttgtgcgggatccggcaagatccgcatacattctttgaaaattttaaaagacggaataccaaaatttttgaataaatttataataaaatcaatcaaaataaattcaattttcatctcaaatttcacctagaatttgcaaaaaaatttcccggcggcgcctatcgacaccactggatcgacattaatcctgtagaattgagtcaaaaggtgtgacatttggtcattttttggtcaaaatcagttaattaattgataaaattttcaaaaaaaatttcagacggcgcctatctgcatagacggacccctttgttcctagtttttgaaaaaattgcgctgaaaaaaagcgtttttgaaaagcaaaaaatagtcaaatttattgaccattaacagatttgatttccgatctctttttaccgtctgacccattcgaaaaatcctagtcgcccttttaacgcatcccgccaacccctacaatttcttgtcaggtattttttttttggaaatttcattcgaattttttcaaaatttctaagaatccgcaatcctgcgcgggatcctgcaaatttaaaatgcaggattaatccggccggatccggtcctgcaaaaatttttgaattccaatcctgcaacaggatccgcaaatttgaaattttctgctgtaaatttgattaaataaaaattaaaaattgaggagttgaagaattcgaaatgtgaatgattctaaaaacaacgcaactctaaactcaaaatatgttcaccttcttccgtctcgtagagaatttgcagcaccgaagcgacctccaaactgccgacattttcactgtccttaagcaaattttaattttttttcaaagggaaaatttcgtcgattttcccccatttgtgcacaatgacctgacaaagcacctcaatctttcgaagtttggccttaaaatggaagacagaaattattatttctttttcgaatttggcaaatttcacaaagtaaaagtcgcgttccctctcgaggccactgatcacttctaaaatttcactaattttgtttttgaaaaaattaaagaaatttctcaccgtccgactcggccaattggttgcgcagctcatcaatttcggtgttcttctgcttcagttcctcgatgagctgtaaatttggaggaaactttgaatgagtcatcaagaaagagaaaagaacttgaaaaatcaaccaatttttcaagattttgctaaaaatttaaaatttttcccagggcggtaacccgaatttaactcaatttgttgttgttttattttcattttgaacttattgttaaatgatttaaaaaaatccttcattttatgaaaataagaaacaaagagagatatttcaatggttggtgcacccctccaaattttatcacaaattcccaaattattgaaaattcgccactttataaattgaaatgtatggtgcacttcatttcccaccgtcgttctcacccccccccccccaaagttaaaaaatattctcnaagtttaagatttttgttgaaaattctaattataagtctgtttttttttaattttcggtgggaatgacgaggggggggg

SEQ ID NO: 5426 - DNA, 3535 bp, Heterodera glycines
tcctgctaaatatcgggacttgtcggcttatgctcttccattctcccaactcatggtctcctaatttgccacttttctcctgctcttcagttgggtggtcgtcgtcgtccgttgtggcattttcagtgcggtactgttcgccgtcgctttgtttattttgccatcctttggcaattcttcgtaattgcctataaatgattgctcaacaaacatttagccccgcatttgtccgttttgcttacgcatttccaccgggtcgtactggtggccgtcgtaattcgcgtcaaagaatttcttgaaccattgcaaaaactcgaaattgtcctaaaatggggcgagaaaattcaaaaaaatatgaatgaataaactcaaaacgttctaattccctagccaaaagccaacctggaatttgcctttgatgagctaaaacaacgagaaaatgttgttgttttttttgtaaaaatcaaacgaatgtgctcaccttttccacgggtatcactttttcgatgcccaattgtttcctgaaacaaattttcggtataaataaatgttaggtatgtttttttttgaatataccatgaagtctgcacaattttccaattggacagccaatcctacgaaaagaaaagggaatcaacacagttaagaaacaactttaaaaaaatatataaattctttcgaaaatccgagcctccccccaatttttaaaataatttagaaaaccaaagaaatctttccaaattcaggtaaacattccatacctgtgcaagggggggggggtcagccaagaggtcttacgatcgacttgaccccccccccatggggtggtcagagcccatttccattgcgatcgaccattttttcaaattcttttctagtgagacctttttttttttgcttctcaaaacacctttttttgcggcgcgctttttccaaataccttttaatgaaccgggggggggggacggcggtgccgataggcgccgccgggtaaatgttgaaaatttgagtgcgatttgttgacaaattttcaccaaacggtgctatttttgcgactttaagtcaagttttttaggaaaaattaaggctttttataggcgacgcaagggaattttttttttggaattctttaaaaaataggcaaaattttgggattttttttaccccctctcctcttactatcgacgaattttcctcacaaatcggaattagtcgatcgtaaaaatttggaatttttaatgaagtttgttaaaaaaataaggcaatttttctttgtaaattttcttttttcacattaacgatcgactttttcgtggatttttttctctctcactcctttttcttcttctcccttcacccccctcttacgatcgactgtcctgaacccttatgatcgactaagacccccccccgtgcacagatatgaaatattcaccagcaaaattcatgaaaatggggcaaataacaacaacaaaaagacgcacaacccgtaaaacgggtgaaaagcatattttagaagtgaatggcccgtacaaattaatataattttggcctaccaattcgagacgactgttgaacttcaccttcttcagttgaagtgcgccggggaagagaatctgtgaaaagggacaattgtttttttttaatttattataaattttcattgtttttatctgtgaaaaggcaatagccggcgccggtgtgcaactgaaaaagaatcggtgaatttaaaacaatgggattcatttaattaatccggaaacgaatatgcttagtaataattgtctggtcacctgttcgagtttggcaaattcggactgaaaatgtaaaaaaaaattgatgccaaaagaattcacccaattttaccgccaaactgaggttgacccacgtcaacatttcatggcgtgacaggggctcaacatttgcggaggttaactgaaaaatacacaaatattagattttcctagccggtcgaaattgagaacccgctcactgtctaagggatgtttcgggatacgaaaacagcagaaccggttttttcaagtcgagattcggaaattcccgcacatcaacgccctcaagatttttgggtgggaaacttccgttcaaaaaactcactggaatgttcgtgactagcgccatagggaagcgtgtgttgatgaaatgaaagcagcagaaaaatacagctaatgttgaaaataaatttacaaaaataaacaattaagcaaaaataaaatccgtttaattacgttttcaatttgttgttggacaaagcaaatagtatttggtaatacatgcatattatatatactacaataatagataataataataataataactgtgatgaagggacaaaaatcactaaaatgcattgctgctgatcaatggtgattgtgtgatgtttgaatgaggggcaaaattcaagaggattcgatttggcgatgcgttcatttggtctgcttctcctcctcttctgctggttggtcctcttctcctccttcttcttcttcctcttcttctgttactgtttgctgtccgctgtacaattggaccaacgagttgtagacgctcagcggacggtgggccggcgtgtgtttgatggacggcactcggacaatgcgggcaatgtcctaatttttgtataaagaatgagtcatgtttccggaagctttatggtgtttttgttgtcatcatttgacacccatttacacagatctgaaatccccgactcggacaaaaattaaattttggagtgggcgggtcagaactgtacaaattatgtggccaatttatgctgtattctgcgtttttttattacggatttaaaaattagaatttttgaattgttattaaatttgcgaaattaattgggaaattagtgtcaaatgacaagcggacccccaaaaattgaaaattttcaaatattaataaaaaatagcaacaaaaaattgaaactcaactgtttgatgctgcgaagtgaaccctaaattaaagtgaaaattatagtaatattatactatataaaaaaaattttccacctcccctttaaatgaccattcaatgtaaattttttaacaatttaaaaatttggcgcctgaggcgggagacaatgtcaatgcccaaaaataaatattttactaaaatatttaagaaaatgtacatttgcttttgcgtattttgagcatgtcccagcgcttctccggcttcttttgcagcacgccggtcagaagttgggtcaacgactgcgaaatgggcgtcggtggcatttgcagcggtgccgtcgtgatgttctcgaagagctgaaaagtttccgattgaattaccctaattttggggttttcccattctgattgtcacaaactgactttcatgatgacgtcaccgtcaaatggataacaaccgctgaaaaagaagaaacaaattgttgaaaaaagaatgatatgtttgtttgtttgttgcttccttctcacctgaccaaattgtacagcgtcacaccgcacgaccaaatgtccaccaaacggccgctgttaaa

SEQ ID NO: 5427 - DNA, 1470 bp, Heterodera glycines
  unsure (1)..(1470): unsure at all n locations
tcaaatntaactctaaatataaatttnggaatttgagtgtgctctttaattattattttttgcacataaatatttgtccctacagatcgcatatcttcagtatgccgtccagactcagcagcaaattggccggctttatgtccttgtgaatgatccgtttggtgtgcaaaaagtccaaacctaaaaatcgaagggtgaaagttggatggattttgtggagaagccatttttgcagcctccatttatttgtaaaaaacacatttttatgtcagaatcggaagaccaaacacattatgtacaaaaacagtttttgaattttctgaaaacccaaaaaccaaccatcgatcagttgagtgaagtaaaggtgggcctgaaaaacaaaattaaatcaagaaattatttttgcttttacctgaaattctgagagcattttctcagtgcaattgtccaacatttgttggaggctgcaaacacaaaattccatcactgaaaatttgaagaaaaatcagttgaaaatgtccgactgatggctgaccaatgtacaacttctgcttctcctctatcctgaaaaggacaaaacattgaaaaagaagttaaataaaataattgaaaaatgtcaaaggacctgaaaatgtcgaacactttcaccacatttcggtggttcagccggcgaaggacgtcaatctcacggtgcacattttgctcaccgcccggaattttgcgcaaccgtttgtcctcaaaagcattggaaatttgatggaaacggtgtcataaaagcggaaattggttgaaaaaacggggaaaatgttttgcttttggggaacttattttgaaataaatcagaaaaaatgtcgataaattacaattcttgtcaccatttcgagtgcctttttaaggagggggtaaaaccttgatgattttgacggctcgcctcatcagtgaccgcacatggaccacttccttcactttgctgtacgaaccctcgccgatcagatcgccgaacaaataaccctcaatgattttgggcggcttctccatgaacacctcctctggaagaaaggcaaagatttgttgaggtattggcaaaattgtttatacggcaaagggccggcaattgtgaagattattggtcccacaaaaaaagaataaaaaaactaaaaaacatgtttttaggggttatttgatgcgctgagcacgaatatgacatccatttcgaccaatttcgaaccaggacccgaattcaaacaaaaagtcgaaatttaaattttcgatttagcacttttagtctaaaattgactaaaactagcagaaaaaaatcataggcaattttaacagcaaaatgagtcattctatgcaaattaaaacatacccagaagtaaaattcagaaaatttacactttcaactatgttcgaactctggtccggggatcgaaattggatcaaatggatatcttattacgagatcagcga

SEQ ID NO: 5428 - DNA, 1799 bp, Heterodera glycines
aaattttaaaattattttcgaaaaaattaatagagactacgaatcaaatatcctagagttgaaaaatttttaaaaattttcttaattaaatttttgtaataaaatggcgctggaacaaaaaccgaatggtttgattcatttaaaaaattttaaaaattattaaaattaaatttaaaaattggaaattttacagcaaatgcgcggcttctcctttgacctgtcgcttgcctccgtgttcatctttctgctgtcctgtttgctcggcgtgctcggttccgtggtcggctttatgcacgcccagcagcagcaccagcggcgccatcgacggatggacaggcaaaaaaatgaaataaatataaaatgccatcaggaatgcctgccattattttcaaactcaaaaaccgaacaaaatgccggtttctaggccaaaatggcactcccgagagtgccatggggaggaggaggacaccaagatgggccaggccgggttttgtgacaatttatgtacttagtgatgaggttgttgggtacggatggatcagtcactttggcacgggactttttttggcacaaaaattttcaaaaaaaggtcgaaaagttttgaaaaataatatgttcatcaagaattttcagataattaagttctttttgtttttggttttttgaaaaacctacaaaattcaggaaataaatccttcatataaattctttacaaaatatttttaaagttttctctattagcctggaaaatttcatataaaattatcaaatttattatattttcatacattttttcccaaaattgaccaaatttttttaaattttctatgacttacattcccatctcacattatcattatcattaagtggattaattatatacccttattgatatccaacttttgtcctcgttcaattaatccaatttttttttgtgaatttcagcaaaaccttcccgaaaacggagctcagtacagtatcctcgtcagccaatgaccacaacagtaaccaccaccaccatcatcacaacgagcacagtcagctgagcatgaccaacatggccaaccaaccccatctgatccgcatccgtaacgaaggcgccggtgcctcggtgattcgggacaattccatcggcgtttgaattagcgcgctttttcccccatttttggcatatgatcttggcactttttttttgcattggcaactttcatctccatatgtttataccatttattctcttaaaattgtaaatatttctttatttattattcatacatatattcatgagtacatttatacaaatatatttttttggtcctgtcctcccacggcattttttaaaggtctaacaaaatgcaatttgttttggcacatagcaaacttggctgggtctgggatttttgaaaaagccatggccggcatggagccgggatcctagtcaagttttcgggatttgactggaaaatagattaagtctattttcggcggggatctgatccccgaaccccggggtaatcacaaaaactaatgggtttaaatcccggagatggaattttacctcttttttccgtttgcattttcatctttcatttaatttaatgcatttatttaaaaattctttttaaccaagatcaatttgtaaatgtattcaaattgataaattgaaaatcgctttaaattttttttaattttaagattacttacatttttttctattttttaaaaaacgttgccaaaatttctttaaatttttaaaaataaatttttgcatattttaaattatttaaaaaaattatttt

SEQ ID NO: 5429 - DNA, 2391 bp, Heterodera glycines
tttgaattagcgcgctttttcccccatttttggatctgttcttggcactttttttttgcattcgcaactttcatctccatatgtttataccatttattctcttactttatttattcttcatttttcatgagtacatttatacaaaaaagcatatatttttttggtcctccttcggcattttttgacggtctaataaagtgcaatttgtttggcacaccgcaaacttggctgggtctcagatttttggaaaagccatggccggcatggagccgggatcctagtcaagttttcgggatttggctgaaaaaatggataaaaaaatttttcggctgggaccagatccccgaaccttggggtttatcagggaaaactcaagggttgaaatcccggagaattttccgggtcttctacagtatgctacatttggtatatcgtacaaaaaatttgtattacattttatatgccgttgttttattttatttttctttcctgataattcgaaaaacaattctgatggcatggattttacctcttttttccgtttgcattttcatatctttcatttaatttaatgcatttatttaaaaattcttttttaccaagatcaaatttgtaaatgtattcaaattgataaattgaaaattgctttaaatttttttaatttaaagattacttacattttttctattttttaaaaacgttgccaaaatttcttaaatttttaaaaataatttttgctatttttaattatttaaaaaaattattttgttattgcttagaatttattacttttaaaatttaatattttcatggttgacaaaatgtgagttgggccaacaaaatcaacaaaaatagacgaaataaatatttatttaatcggtggtcgctttcgtccgtcaacatttggccctgttttcactttgttgttgactttagttaatcccttttaaaagtgcgaaatccccccccccaattttcttgtcaattttttgattttaaatttttcatcaatttctttctttatgatatttttcctattttaactgacaaattttaattttattataattttcataaattttaattattttataatattttatttacattatttctccctgaaaatttgttcttcaactgatcagtttgtttgcatttgtgcttggcgattggactttttgttgattaaaaggggattaattgcgtggtatgttatttttctaaaacttttaccgttgattaacccgggattcgttcatgaggtttcgaacccattgggatttagccatgggccccaaaattagctgtgagatctcgaggtctcacctgccggccattttcccgaattcaattgtgtttttgaatgatacccaatctccgagatttgtatcgagaaaattggcattatccggcaagatttatagttggctttctgtgaaagcattgtttgcttctttttcaacattggaatatatatttcttaaataaattcttacaattaagcacaattttccttttttattcatttggacatttaaaaaaataaaaagctcttcgattttatgaatttcaactcaaaaaaatggcgcagaaatattaaaattttggttgaagtcagtggtttaggacttgagttataacgtaataaaagttttagagactcataaattttcgaatatgcattaaattgcttagcattagctaaggaaaaattctataattcaaaagctttcgaatgatacaaaaattgttcggtttagtggggaatgaagcgagttatggctgatcaaaagaaacaacacaaaaaaggcatttatcggtgttttttgaattagcgcgcaaaaaaaatttctttttggcgttctgaacaattttgtctgacacttacgcttgacagcgggaggttcagcatctgccttaattgtgggaggaaaaaaacccatttttgaaaaaatatgaaaaatctgaggcagaatttgcggaaaacattttttcagggggaggggattcgtgatcagtggaccttgaaaatccagtggaaagaatttaaaaaccaaaaattcgaaaatgggaggggggattgaactttttgtacgatgttggaatcacaagcaaaattgaagttaaagctgattttttaccatgcgaattaacgcagttgaacagcgacggcgaatatgcaatgggaataatagtgaaaatggaagccgaagacggaataattaaatggcggaaaataaagtgtcgcaacgcttttatatgcccaattgggtaactcaagcgcgcggtaggggtcagttgcgtctgagccaagcataaatgatcagcagcatttgtgagtcgctgtataaatgtccgaatatttcacaaaatttctgaatttctgaaatt

SEQ ID NO: 5430 - DNA, 2851 bp, Heterodera glycines
gggctgccatgtccatgtcaccgaaagagttgctctcgcgccaattgatgcccaaaattggcaaggttcaaatattttgttaattagaaacatttaaaaatagaaaaaaccactttctttcccttttatttgttggaatgagtttcgatttttgaaattcttggtaattttttttttttgtaggctaccggtcttcgtccgtcgctgaactcggacctgacgctgaccgtcacattggaaaatgacgaatttgtgcagtccgattttgactttctcgtcctgcattttcccgacgaattcatgcgaggccatggtaacagttttccaatagatttttttgacgttttagtgattttttttttgatatttgggagtttttagtgggttgtccatattttttggctctattccaaattaatggaatttatgaccgtttaaaaaaaaatattttggccccaaaacggaggcgccgtggcggagggagtcgcacaccaaattctggtggcacaaatgccgttgttgaagaccatgccgtcgtggacatggcctcttctctgctgaccaaaatgaagatcaaagcggcgcgcgatcaaatgagccgtgccgtggcaaagtgagcgatggtgcaccggggacggtcccacgtgaaattatgaaaaaaaataatagacctaagttttttttatcatagtacgcccatcccatccaggcaaaactcacactgttttaacttctcgcaagcacaaccaaattcattttttccgcataattcgatttcctatttctctattagcatgcgtaatgtcaagaaaaaatatggaatcaatttcctgatgaatggaaaaattattttttttcgaatcgggcataactttttttttgaactttattcaaactttgaacttgaattttgtgtgctaatataaaaagtgcaacgaatttacttaaaataaaatgggcgaatttaaaaataagtcagaaatattttaaaattctcctccatatttaaattccattttttgctagcattttcaaattttcgcccgcctcgcttccatgcacttgcaaatccgtcactttggagcggttgccgttgttcatcggcggtcgctattgcaaatactcgcgcgcactgccccagtcgccatggattggcgccagcgatgaagaagcaccgccggcggcggtggtggcgacaaatgacggtggtccagcgactgttgaggggatagcgattccggcgactgttgcggatgagacagcgacgccggcgactgttgaggggatagcgattccggcgacttctgcggatgggacagcgactgttgaggggatacaattccggcgactgttgcggatgggatggagactaaggctgcgcctgccgtcaaaattggcactctgccgacggcagcacggcacattctgccgcacagttcggtgagacaccaaacgagctaaacaaattattgaaaaaacgcttttttctaaaagatttccgagaaaattgcgggcgcaatggtgcgacactttggcgccgatgggagtcgtttcattgcgtccggccgtgaggacattgacgtgcgaatgctgggcaatgggcgaccattcgctgtacaggtgtggtgggtgtgggtgtttttgtgtactgcttgaaaatgtagtcgttttttatggaataggcccagagatttcgtccaacaatagccaaaatacgcttttttggaggacattttaagtaaattttaataggatttgggtccgacacagtcgtcatgctgaggaagtttggattacattagaagttctgtcgcgaaaattcactgaaaattttgctttaaaataatccacccgttttcctcagttgctcaacgcgcgcaaaaccgcgtgcctgcgcacgcgtgcgtctgccgccacggcactgtccgcgctggccgcccaaatcaatgcgtcggaggagcgcacgcgggacatcagtgtgcacgcgctggcccatgtcagcgcaaagcaggcgcagcagctcaatgttggccaagaaggtgagcgttgggggggggggggggaggcgtaggaaactttaaaaaatttcatttaaacttaatggtttttcaaataataagttttaaaaaaaaaattcttttttaattttttttaaatttcttacaattaggaaggttttatagtaggtaaattattttttacaattttcataaaaaggaattaaaaacccaagtttttttcaaaaacaacaaaaaaaaaaataatttttttttaaatttttcttgtcaatagaaaagcgcaagacgtactccgcgctgtgctgcacacgcacaccgctggtggacgacgtgccgttgcgcacgctgcacgcgcacccattccctgtgcaggtggcacaacgcaccgtggtaaaaatgggggggagggacaaggcggcccaattagtcttagaattgaattaggtaattattttttaaaacatttgaaaaggtgcgcgtgctccggcggcgtccgctcatcgaccgcacgcgctttgtgtacacaatgcgtgcgttcgcgttggaccggcaccattttgtgctgcggctggagacccaggcgggcacatagtgagcaacgaacgaattttcaaaatcaacccccccccccctaaccaataaatgatttatttttccatgaattttcactttccagaaaaatggactgccatattttttgttgtcctaaaattttatttagttttttgatgactaactatattcaattattcaaatttaaatattatttattttatttatttattggaaatcatcgcgtgctaatttttcacaaaacaaattttattaatcat

SEQ ID NO: 5431 - DNA, 1963 bp, Heterodera glycines
  unsure (1)..(1963): unsure at all n locations
tatcactcanttgtcagtcacnttgctgtgttcaggtgaaccgttgtaaaatgccaaaatgtgcacacggaaagggtgccaatttgcggtacggcaaaaaatgccatcgcctccccccccctatcgatttcatcattttttttcttggccatgccattaaccggcgccgccccggggggcgggcgaagtttccgattaccccacaaaaattggggcgcacctttcacattttcccccaattttttatcccattaaattgtctgaattaataacagtaaaataataataaggtcccaatttttgtgggccaaaagcgccaaacgatgtcctaaaaatcggaaaaaaatactggcaaaatgaaaaaaaaacaatttttttttgaaaattttgtagggtctaaaaatgttaatttaaaaaatctcaaaaagaaggtgctaaaagcccgaaaattaatctataagagtataggaaaaaaatttgagggagctctataattttaaatttaaattaaataataaatttaaatttttcctaattcaaatttggcctttttaaattaaaacccatttaaaaacattgaagaaatttaattcaataaaattatattcttaaattttcatttattaacctaataattaaagaaaaggaaaattattatttacatactttaattttagagaaaagtatgcctttaaaaataattattattttgtgatttggaaattataaattaattttcaggggaataatttttgtattttaaatgattttctaaatttaattttctttttttagaaattaaattaatttcatttaaagaaccaattttttaattgcctcacctttcatcacacttttattatattatttttcatttaaccttaaaaaagtaaattaaattaaaatacgcaaaagttaatcgaatcgaaaagtttatttaataaagttttttcaaaaatattacttttaaattaaaatttttttaatataaaatagtttttattaaattttattaatttaaaaaagttttccttttaaattttcttttattttccgttcattttaattttaacattcttttaaataaacgttctatcatttttctctttaatcaaaaaattattttcaaattaatataattttaattaatttttttttggattttcgtcatgacgctattttccaatcctcgatggtttggcggtgccaatgccaagccaacaaatcggaggataaaagaaatttaaattaaattacgcaatatctaaaagtgacggtttttaaactaaaatttattataaaatatttttattcagttttattgaattaaaaaaaggctttgaaacaaaaattcatttttttaatgtaacttaattttaataatttccatcatgacgtatttcctctccgcccacggagggcgatggtttggcggtgccaatgccaacaaatccgcggatattgccctctgcccgatttgcacaatgccaaaagggggtgtgtgcttgtgtgccacaaatggtgtagtaatccgtcggtgtttcctccgcgtgccgtgccgcccccatttcttgccgatgtgccctttgttccattggcattatgtacataatgtacataattaattttgcaccacatttttctcgcgcgtccatttccgagattcaccacttttttttcttccacatcgccgcaagcagagcacagagtgccaaagattgttatgagtctgtttttttttgttgcctcaaagttcgttgcgtttttatttcctatttttgcatttgccgattattttttgagttttggcattatgtaagcctaagaattttaattagccaattattatttaattagattttgttagcctccctcataagtctgtgtaccgggcttaattgagcgccgggttcaggacaaattgcgtaaaatgctcaactctgtcccaaattcagcgaagaaa

SEQ ID NO: 5432 - DNA, 4798 bp, Heterodera glycines
aataaagataataaataatttactatttaattttttctctccaagtggcacgccgcaagggaattaaaaaaaactcattagttatgcataattagtttcctatgtagacaaaatgggagttatttcataaaatccacaaatctaccaaaaatacggaaagaatagtaaatttaaaatttaacatgctgtctcgcaatatctcacactgtctctctctctctctcacacagtctctctctctctcctctttctatctttccctcgctctgtttctcttctctttatctttactttatatcactcattctttgccaaatagaaagcgacacaaagcgacgctaacatttcgcacaattgtcattattacggatgatacttttagtgacgaaaaatcccgaaagagttaactaaaatagttacgaaaaagtgccaaaataatgacaaaatagtgaaaaaatccaaaatagtgacgaatagagacataattttcagccaaaaattgagcaaaaataatttttattcactatttgcagttgcaaatgagttggactgagatttttaagagcaaaaaacccaaaatagttacctaaataaagtttttaaacttaaaaatttttgccaagaaagtaaatttttgaataaaaattttttcatttcataggaggagtatattttgaaaaattttagctcgattctgaggggtgtatttttttgaagtttttttaggtcgattcttagaggtgtattttttatagtgacaaaaagccaaaatagtgatttttaactattttagtgacaaaaccctcaaaattgtgatttctattgaccgataatggcctcagaatcaaaaatttttaatgcagaaatgcgttttttgagcccctttcttcaaatcaattgagcaaaaaatttaggtatccctacaaatgagagcagtgccaaaggtgtgacgcaacagcgtgcgtcaattggtattgattttctaacagacacagaaaaaaaataatgagagagactgagagataacaaaagttatcggtgcatatcgattcagtgccgacgattcagtgccgacgattcagtgacgacgattcagtgtgaagacgattcagtgccgacgattcagtgccgacgattcagtgtacgttgaaaagccgacaattcagtgccagaaaatttggcaaaaaattttcaaaaaaacaactatgtagatgccaacggagaccggctaatttttgaccataaccgagcaccaggaacttgccagggacctagataatgccggataccgtagacctcagatcttttttccagaaccggaaccagaaaccgcaagaaattccggagaaccgctatctcatccagaaaaattttaaaaattcaaaaaaattaaaaatttaaaaaaaaattcaaatttaatttatatcaagtgaaaataatacaaaattatttggttttttataataaattaaattaatgaaaattttcaaacaaattttcttcaattatttcaaacaattaatcatttttggactaaatcatcgaatattaatagaaattttttaaagaatatattaattattattttttatttttccctttgactccaattttcttcactaatttttcactcagaccccattcttaccagtgcttgtttttcccggttcccggttgccctaccgggaccgggacctgagcttttcaaaatccggtctcggtcccgtggcactctactctaaatagtaggaaaaacactttcttttttgtgtttgcaaacaaaaatcgggacttttatttacatatttttacatacatatttcgggattttatacatatttggtacatattttggactttttcttacatattttgatttttttttacatattttgcgggttttttacggaaatttttggaaatcctcaaaaaaaaatccaaaattttggcaaatttattattgttttatacatattttgagaatttttgaaaatttttagaaatttctagtgaaaaaattaaaaaaaactttttttaaatgtacccctccaaaaataatttttttaatgttaaaaggtgattctaaacatatttaggtcattattttaattttggattgatttagcataagagtataacaataacatcagacagaatttctaaccacttcaatttatattgtatttttaggggtttttttgaaaattttttgccaaattttctggcactgaattgtcggcttttcaacgtacactgaatcgtcggcactgaatcgtcggcactgaatcgtcttcacactgaatcgtcgtcactgaatcgtcggcactgaatcgtcggcactgaatcgtcggcactgaattgaccggctccgaaagttatgactttttatttacataattttcttttattttacaaatatcatattttaagaatttaaagaaatttcgtataaatgtaaatgaaatttatttgaaaaatgaaatctaaaaaacgattctttcaaaaaagagaaataattaattaatttaaaaattctaactaagcctaatgaatttatttgtggtagttttgttttttcacccccggtctgaaaatttttcaattctttgttttgggctaatattatctggtcatgaatccgatattttattttaaccatcgtttttccagtgagttatgtgaaaatgtaattcaaaattttgaaaataaaaaattaaacaggcagcataaggcaagaatattttgtaaaatttcatcaaactaatcaatccttgcatcgtttaacacctagcctccacaaaaattcgcaaaataatgcaagtgaaataaaaaacggttttttcaaaaatgagaaataaaaattaatttttaaaaattttaaattatattttaatcctattaagtcattttgtggtagtttgtttttttcacccatgagttgaaaatttttcaatttattttaggctaatttttgtctggtcacgaacccggtgtagtgctaggaccgataaattaaaccgagatttacattttaataattgagcgtaccccgtaaaatttgaatactagtgtcattttttctggcatttcaatgcatgattttgtaaaattttttgtccaaaataatctttaaaataattttttattcttttgtacatgagtgagagttttgtccttaattctcattttttatggaattttttttgctattttatctacatgttttgcgaaaatccgttcttgattatataactgctatttatgctattttatttaaattccgatgcatttaaaattgtaaattatgccaattatttattatacaaggaacaaattttattcagtttgtaattgtcataatcatttgaattttttcagagaaatggcataatttaagtcatgcctacttacacaaaaattcctattgattaaagattgaaaatttatggccttgccgaaagtttatgtttcaagttttgcaaacatggcgattttttattaatgaaattttgcactccataaaataaaatgaataagaaaataaccttttttatgcttcttgacaaaagcatgatttaaatttataaccaactctttcctcaatgtccgatgtttttaaccccaaaagattgaagcgtaaaaaataaattcagtatattattattatttttataatgcaaatttgttgtctgtctccacattcgtgacttaatagaatttaaattttgctataatttaagctaaaagaatattaatttatttgttatcctttaaatttaaatttaataaaatttcttttatttgcaagttttctttttcttttttttattatgattaataaaaaaattttatgtcactatgtcgcagaatgtacaaaaaatcactggaaaggaaatatttccctccaagggaattctttcctttccctgtccaacggggacattgttgaaaagtgcaagtgctgaattcaatgtccaaatgtggacactgaaactgagagttctctgtaaccctcttaatgacccaacgggggtcaaattaatggtctgtatgaaagggctcctgattgtcccttttacagattgagagaagagcttttctcttactctttattcaattaaatataaatataatttggtgctgagcagaagtgaaaactgagaggaagtgatgagaatgaaaatggggcgggcttttataccctcacaaatcaatggggcggagcaaatcacgtgaacaaatgcacatacaaaaaatcgatcgattactcatagggaaaatgaatgaagagggaaaaggatgactcataatagaagcgaccgagagcaaattgatcgacaaattaatgaacaaaaaactaattaaatggtgaatgaattttatgtcgctttccgcgacaaaagtgaattttagtgttttatttgtttttaaggattttataagccttaaagacctctaaattcaaaaatgacaaaataaaaaatttgtcaagctttttttttttttgtaaaactcccgggggtttttaagtttttttattatatcgttttttgtgaaatttgaagttttggattatgcatcaggttttaaccagattatacccttagggattttttgagattaaatttgtttactagtctctcaaatttactcatttgtctaagtcactttaaaaatttcaagtggatgtgcaatgacatttggatggacattttccccaattaaaaaattttccgaattcaacaaatcattttgtttttttctgtaaaagtgcggcattgttcatttgatattattt

SEQ ID NO: 5433 - DNA, 3749 bp, Heterodera glycines
  unsure (1)..(3749): unsure at all n locations
ctcggataaattataaataaataaataaaaatattattaattaatgttcaaaaatgaataacaccaacacaacaaaacccgacatacaaattttgaattcctcagaagagcctaatgaaactcttttgcatgtactacttttttctcattatcttcttgcatttcccgtgtttttgcttttttggttcgttttaattaggtggcttaaaagtctcggtcacttatcgcccagcgaggccgagtcagtaatggaagaaatgcaaaatatcccccgacatccaccaatatttttcgcaacaaaatgacgcagaggttaaagaaaacagacactgaactctctctttagtatgacaaaatcgataatgactcatgctggcggaggcttctcatcgtcattcattttttacaaagcgttaacgaaaatgtctccaaatgaaaattctgaccgtccctatcaacaaaccgacaatgttcaacctgttcaactgccacagcaacaaccagatgaagacaccgagttgagggcacaaattgaagacgctgaggaggatttgctcttgaactggtggcgtaaagacccgacaatggtaaacttatttcaatttagcatttttgatttcttcaaatttcagattcgttttctctttggacaccgtcgagcacctgccatcgaagctgcgcttcttcaacgcgccgaacgtgaggccgagattttgcgccaatatgccgagaatcaacaacaataagaagggaccattcagatattatgtcgtatgttatttttcttgtttttattttttatgatgataaaaaattttgcaatgtagaactaaggaggagaaatggtgatggggggggactaaaactcgcgcaccccttgtccgattgacaccaaattttgtgggcagtcaattcatcaccccctaagccgaacggctaaagaattttgtctctagcaccattttgagtggtacaatcccgacgccccgccccctcgcgcaccccaaaacttgcgcatcaaaacccgagcgcggcggctgaagttttaacagatgggggggggggggatccacggagacggagagagggggtcaacgatgacggagggaggtgaccgtgtcactgactgcggaacggtggggaggggtccgcggcagtggaaagagggggtccgtgaaagagagggggtccgcgctgccccgcgaaaagggcggagggcgacgagcggggaggggtccgcgccgcccgttgaaagggcgctgcgagccgcggggagggtccgcaccacttaacgcaaaataacacgacccgtccattccatcggtggccgactggttaacgcttcgggcccaccaccatctcgggttcaatcccgcgcggcgaagtcagagacgcagacacaaccacccaataggcacggacccgcccgctcagcctctctgcgctcagcggagaaaatcaatcaatagttaaggtggtctccccatgtagtaatatgtaatgctatttatcagtatgtaaaacgaaattttatttataatttatatatctgcatgataatattgcattttttacataatcacacttaaatatgtttagatgttcatttaaatttatttaattctgtaacttaatcattttatttaaatgctatcttaaatttaagctaaaagaaaaatttttatatcagatataaaaattagaaaatttttttaggaaaactattaattatcatctttttttcaattagaggcatgaatgtaattttcattcaggttgtcaaggtttattttcatttttattttatctcttttattgtgtttttgaattacaaattttttaacagtctaagatttcttttgcgttattaaatattctttgtacttttatttttttcttttagaatattcaaatatgtttcatcctaatttcacacattctgtttcgaactcatcaacggtaaatttttagaatttaaacttttgagttttgttttacatctgattttatcttgccaaaacacctcaagctttcttctaattaatgtttgggttttaattatatttcttctagtgtttagctcattcccatgcaataatgtatataaacattgcttgctttctgacagcattttcatttttcgataaaaaaatttcgtttaaattattttttttgagtgcgtttttttaagaaattgtattttcaattcaaatttaaaattgatatcttgctaattttcaggatatgccttttgaaaattaaaaggtagattattaaggctgtattcttgggcattggattgattcatttatattttttgaaaaatataaaattataacgaattatcatatcacatcatgttttaaatcaaattcattcatttcatgcgatgactggatttgaattaaattgaaattaaacaaattattcacaatatctaatgttcttctgacgaatttctcgattaagtcacgccgcatctcaaaaggattatctgatttcgcctgttgattgtgtattattatttttgttgttttatttttatttgatttttaagatagtagttatttcataatttaatttttgatacaaagattttgaaatatgttattttttgggttaaattaattatggaaatattcattattggaaatatttctgccttatcattaaaaatctttatcattaaagtaaatatatatcattcagctttataatgaattataatttttataattgaaattatagaggaaacaaaccttttataattttcatatcacaaatagaaattttcgaatatttatattttttagtcataaatttaatgtttttttataagttataaaagaacttattatttttcaatttatcaatttatttaaaatcgcacttcagtcgatgttgggagcccccattgacactttaattttttagttaatctctactaatatttgtatttatacattttttaattttaattattaattttactatgtaatttataaattaaaaagattgtttagaaaatataattttaacttaagaaattacctgattgtataatgtttcatttgatttgatttttataattattggtaaagaacaattttttattcaatattcctaatcaaattgtgttaatttcttttatttatctcataaattcagattcattaattcattgtatctcaaataaatacatttaccgtatttcttcgattatacccctcggtcgctctattgttcaaaccccctcaaaagggggctttattcgagagggtggatctaatcgaggggggggggggctttatagttcaaccctttttttacaaaatctgacaaaaaattgtgtttttttttgtaaaattttttgccaaaataccgaaattttttagtgctattaattaaaaatgttttttttcatttcggcagatttcattaaataaatccgggttaattccaaaattctttaggcttttgggccatgggttcaaatctcattgcctgtaaagttttttaaaattatttttattgtttagaattcgtgttaggggttcggaattggactaaactgaagtaaaattcttgaaaaaatagccaaaaagtcacaaaaaatgcatgttagaagaagcttcaaacaaagtttagatttggaacccaaacaatgccggcgccaaactgaagtagacagctttttagaagtaatgttaatttttccgaaaaatcnnngaattttatgtaatactttt

SEQ ID NO: 5434 - DNA, 5270 bp, Heterodera glycines
aattgtcgagccaatttttaggaaaaattttggagttttgaggggccggcggtgccgataggcgtcgccaaatagtttttcggaaattttaattaattttattaagaaaattgttcaagatttcaaaaattttcaaccttccccccccccccttcgttgaattaactttttaaatttttacaacgctcggagtccccaattccccgaattagtgtcgggtcgggggtcaaaaagtcggcggtcggtgggttcggggtcggggagcaacaataatttaaattattaattcttttcttgttttaatcaaaaggattaaccctcaaattaacaacaaaaaacttttgtcattatattgacaatcagaaaaagttttttccgaatcaaagattttttaaatatgtcctaattattgtactaatagttcagtaaaaattttaattattttgtttttataatgttatttttgcattttaaaaattaaatttaactttgaaattaagttgaaataaactataaattgataatgcatttaaattatataattgagtatgtaataatatttacttttcattctttaaattatttgttttcttaagagaattataacatctgcatatttcaaaacaattattattgtttatttatctcttgcatgaattgttgcaattattttaggttttaatttacgaatataagagataaattattttgaataagaattacatcgtatttcttttatattgatctaactcaaattttattcaatgtcattaatatttattacattttgaactaatattaattcaaaatgattattattgtttatttatacacaacttattttgattaagtattacattgtattgcttttatatgtttctaaaagtttattaatttacgaagatgcagattttgttcaatgtaattaaataatatttattgcactttgaactgatattaccattgttacttttacagacaattttgtatgcgatttcattaatttaaaaattttttttaaatcataattatcacgcgcagtgtagtgtgttatgttaataattaaattgaatgttgaaattaagttaaatattattcattaagtgtttcgtcttttattttgtaggtaggtaggtattaaacattctcattaaatattatatgaattattttattaagtttattataattttttattaatttattaatttttcgtttttattacaattttattaataatttgggaaaacgccaaaataggtcaaaataggttctttaaaaaattattttattaggttttttaggctctaaaaataaaaatcaagaaatcggcactaaaactcgaaaagtagcttaaattaaattttaatttcatgtaatttaatatttcagttttatttattttatttctgcgttttaacagaaattgacgctttgcataaataattttcttaagcaaagtaataaaaatttttgtaaaattgtcgattagtgggcgtttgtttatttctaggatttttacttataattttcctacaatttattatttataaacgtagtttattttaagcattattttattgtatttaaaataagcataaaatatacaaattattccgcaattatctttactttactttctgcaattattttatttgttgctgtcactttataatatatttaaaatcttttaaatttttatattttatcaattaaacattttcttttaaaaagtattatttgatttaaatttttatttttaattagtttttgttttatatttattattgtcagtagctaccctactacactcatcgtggggtgtgaaaatgattaatgggttttcgggggaggggttccctttgatcttgccgccctaattaatcatgggggggggggcagctgttaataggtttcgggggaggggtggtaattaataggtttcgggggaggggtggtaattaatcatggggaggggggttaattaagggggagtgcgcgaatttttcatgggtattaggagggtaagtgcgcgaggggggttaattaatggggagtgcgcgaatttttcacaggcattagaatggtaagtgcgcgaattttttggtatgtgattggggtggggggaatgagcgaaaatgtcaggcactgaattttacgatttttaatgaggcgtattatttccagtgctagagaaatagtgtaggaaatagagagacagttagagatattagagtgaaagagaaatagtacactatatctctgacttctctaacctatcttacacccaatcatattgtaataccaaaagttttgaaacgatatgtctttgcgtaagatttacattcaaaatgggcggacaaagtggcttggttttgtttaaatcacactgttattttaaaataggacaaccataagagggggattgtaaatttttatattttatcaattaaacattttcttttaaaaagtattatttgatttaaatttttatttttaattagtttttgttttatatttattattgtctaccttgtcagagagttaataagaattagttcaaataatgtaatttaattttttttgttaatttttaggtttaacaaattgtaatatgtcatctttttcagttattgggtgaaaatgggttaaaaatttaaattaaaagttcattcattaccaaaaaccaaaattggtttttatcttttattgaacaagcaaagtattaatttaattaacactaaagttcgtattcagttttatttgtgaagaagattttttgcaaaaatcaactttcttctatttttattgttttataatttcatttttatttaatattttttttatttgtttttttaaaaagttattctaatttcatcaattttgtaattctcataataattaaacgttgaattttaataattgatattctgatattccgtttataaaaattccacctaattaaatttattttttcttaagaattcgaaattttattgaccgaacatgacaaaaatttcattaatttgaatgagacgacagagttgttcagtacactgttgtttgtccaatattttatatttaaaattattttttattttagatcgtatgtttgttataaaaataattaaatttcaggtctaaatattcatataccggtgaaattaaattagttttttccagtgttgtactattttttataataccttttttattaataaatattccttaatatttaattatttattatagtaatgtgattaatacaataaacaaaatatattgcgtaagctgattatttcaaatatattattttaaatatgtttgcctttccttttcttgtatcctccaaaagctgtacgcactctcatgtcaattaatttctaaaataaatttgaataaattttaaaataaacttaaaacattaaatcttgtattttttcgtaataaaattaaatgtaattttttattctaaataaattggagtttaatattttaatatcaaaaatttcttaacagataatttagaagagacatatttgttatatcttcatattttatatttcatgtgtcctataattatttaaaattatgaacattgtttggtttattttttctatttaaatttattagtcttttgaaatgttgaggtatgattgatatatgtttcatttattagtaaataatcttttgtataaaaataaaaataatttattggtagaaaattatcttattcagtggacaaaattatagaaaaaatgattttaaaaagtaagaaaactttaaccaatgttttctatcaataatgtaaatataaagctgcttaataaaaaccattaaatcctcatgctgtattgtcaattataaaaaataaatatattatttcctatttatttccgattaatatttatatcatttttattaaatttgttcagttttaaattaattttctgtcattaaatatgactttcaagtagatattgatcagtatattcgttcaaataattctacgacagagctacgtgattaattttttttaatttgataatcatttcatgaaaaattctttattattttgtgatttttttagttattggtaattttgattagcataatagcaaaaggtgaaaatgaaaatttgttattctcttcttcttaggcagccaagtatgagtatttaacccctagattattcagaccaaacttttattttaaatttattaaatattatttagctatcaacatttcggaagtactttgtcaaatgccgaaacaattattacaagataaatgatgtctttcaaatatttttccacgaaatataatttccttacgttgacccttggagatattggttagtcatcggtatttattatgtaaaggatttttttgtgaacaatttatttttaatggaagtatatatggtattaattcattgtcatttttttttgttaaggtgcattttgaagcagaatatcagctgtaatttcatgttaattttcattattttattgaataatatatttcaattaaaatctttttaatataatataacaaaactaaaaaattaatgcgaatgccgaagtattgttttttacaataaatgttaaaattaaattttatgcaataaaataacgcgataacaatttttttgccaatttttaacggcgcattaaatttaaataaaaaatgtaaaagtgatcttaaaattaattacctaagtgggaataaaattaacttattaagaaaaaaatattgtacataaagaataaaaaagacaataattattttaaaagcatatgaaatattaaattaaaaaatgagaattcgaaaaataatatttttattataataataaaaaacgaaggcaattctttttagccaaatcgattatgaaatggctaattttatggccatttcttcgctatccattgccttttcctgagatgagatgtgcgattcggcagaggggggggcggtgcgttggagaaaatttttgtacgctattgttcgtaaagcgacgaaggaagagaggggaggggagggggggggggggaataaaaaaagaacggccaccgatttagcttttaaaacaaaaattaacatacaaaatgaaggaaagataattaatttttgaaaattttaattagttatttttaatttctaaggtatgctgttgaatttgaaatatttttatacattcttttatttgcaaatttttgaatttaattttttaaattttaacagcctctgagatttgttagaattag

SEQ ID NO: 5435 - DNA, 1306 bp, Heterodera glycines
tgcatttttgagcagaatatcagctgtaatttcatgttaattttcattattttattgaataatatatttcaattaaaatctttttaatataatataacaaaactaaaaaattaatgcgaatgccgaagtattgttttttacaataaatgttaaaattaaattttatgcaataaaataacgcgataacaatttttttgccaatttttaacggcgcattaaatttaaataaaaaatgtaaaagtgatcttaaaattaattacctaagtgggaataaaattaacttattaagaaaaaaatattgtacataaagaataaaaaagacaataattattttaaaagcatatgaaatattaaattaaaaaatgagaattcgaaaaataatatttttattataataataaaaaacgaaggcaattctttttagccaaatcgattatgaaatggctaattttatggccatttcttcgctatccattgccttttcctgagatgagatgtgcgattcggcagggggggggggcggtgcgttggagaaaatttttgtacgctattgttcgtaaagcgacgaaggaagagaggggaggggaggggggggggataaaaaaaagaatggcattgatttggtttttaataaaataaaaaagcttatggggggggggcaaaaataaaaaaagaacggccaccgatttagcttttaaaacaaaaattaacatacaaaatgaaggaaagataattaatttttgaaaattttaattagttatttttaatttctaaggtatgctgttgaatttgaaatatttttatacattcttttatttgcaaatttttgaatttaattttttaaattttaacagcctctgagatttgttagaattagtagttgtttttttcttttttgaaaccataaaattgccaatattatttggtataattttttgtatccttttttttttgttttcgttttttgattcttttaaaattttaaattattttaagattctatgatattatttgtttaaattaaagttatttatttactcaagtatttctttaaatttaaatatcggttaagtttaaatacgacattcattcccatatttgtacttttgcgtgtttatatttacatcaaaattcaattaacgttttgctttttctgtttaaatagttttaaattttcttttctttattggggttttggataagtttgtttgtaagtggaaaagctgcaactgttagaaaataaaaattcaatgacagaaaaaataaataaataacgttattaggtacttattaaaaatgaattttt

SEQ ID NO: 5436 - DNA, 986 bp, Heterodera glycines
tctttaggacaacttgatattcttcaaatttgatagataaaaagtatagatgattgatccacgcaaacatgatttggcatttcttagcattttttatgggattttgaggtaccgtttttctaaacaaaatatcgattagcatagaaatcaaatttttttgttgaatttatcttcaccctttaacaaataatttttattgatgtttgtatttaatctacttgttgtttgtaaagcttatttcaattcaaattatttttttacctaaaatgtttatgcataaaaatatgtattaattaaatatataagcatttaaaaaattttcaccagtatttcagcttttttcacaacaaaatcaattgcttatgccacaaaggataatgttgtaattatttaattaagattctatgatattttatttctgtttttcttttcatttatttattatttttaactatcatttgctgttttatttatttggctttaaatgttgcctttatttatattcatttaaaaggtcttctaactaaaataatttatgttcattagcttcgtctttttttgtcgcgtgtgttttcctacgatcccacagaagcttgactgaagcgttcttaattcaaaatttgttgatttcgaccataagtttactattggttaaaagcaatttatatttatttttttaatcttaagaacaatttctggtctaatgttaaagtgtttttttaaaatttatttatttgatatattttaattaaagttattagaatcggtaacattttatttatttatttttattatatatttttttattaaatgtaatcacgcgcagccctttaaaatattcataaatttcttgtgccatcatatgcattataaagaattttgtatattttctaataaattcatactgataaataaattataaaatttaatttttcatggattttaaatatatgtattattcatagtattttctttcatgaaattta

SEQ ID NO: 5437 - DNA, 8578 bp, Heterodera glycines
tgaattaagccaatccattgacctgatcagaccattataatccattaatcaatagctgaccaattagtaatttttgatcattttaccaatgtctggtcactttcatcatctttttatctttccctcttccattcccattcattaatcaaccgcacactgcagatgaactgctccaattcacaccactcggcacaattccgttcaccgccatggcgccaacagctgatccatcggcgacacgttgtgcacccgcttcattggcatcggcacaactccattccgccaatgcggcgcaacattcggccgaccatttgtgcttttttctctgtccaattgagcagggactgtgccgagtgcaggtggctggagtttggacaaaggtgtgttgtgctcatgattttcgaaatttcgtatgatggaaataacagttttagtatggacagccgggcccactgctgaatggcactgttgtgtcaatgacagcgttgccgtcactgttgcggcaaacgatttgcaacgtggcacgtcgcaaggcggccgaattggaaaggtagggagaatcggatagtcaaatcaatcaaaaataattgaggcctatgatctgcgagaacaaacagctaaatggtttttatatttccattttttagttaccaaatgacccacgttcgacgtcgccatgccattgccgaatttggccgacgatttccttcccggcttaattacaccgactttgttgagcaactgatcagcgacaattgatgcgcagaaggaactgctgctgctgctctttgccaattctttttcgttctgatcagtgatcactttacccaatttctttctctggtcactgttcccaaatacattctccttttatttttacgctagtgccttttcatgtcttcttccgcttcaaaaactttcattttttgttcaaataatacgcatagaaaccgttttgactcacattccgccctctgaattgtgtctcataattattgttttcaatcccactatcatatggtaaaattgttcggtttttaagtgcctaaaaatcccatcactaatgatttttattccgttttacacatcggtaaatgttcaaattgtaaagataaataaaagaaaattcaaaaatggataataagtaaaaaaccagtcgtcattcgtcaccattttttctttccactgcattattcttggtttgattgagtttgatatggatcagggacggcacggaattccaatttctgggtgttttttgggcctcggaatgccatccctggtatggatgaaatgcttcaaagatgcaaattctttcggcgaattcatttaattatgcaaatttctctccctttttggcctttcgtccgttagccgtgccaatttaagcaaaaaatgcccatcaccccagcagatgttttcatttccctgccaatgggtgccattaaaacattttaaattcaattttattagccaatatttttccccctttcacaatgtgagttatccattcggcattctccccgttttattggcatcagttaaaccaaattgagtataatgccaagattttgccccaatggctcattggcattttgccgtcccccctccttcctttttttgattgtcttttggccgtttccatagtcacccgctccctcccccccccccggtgccaataatactaataaaacgatgaatttctgtctttgcttttggcctatcgataggccaaagaaagaccaggccatacaagtaaataaaatattaacatttattaggttcacaatttacaaaaggtattttgaaattaattcaattaactaaaccataaaaataacatttttatttctatatttaacattaatttacacccaaattaaaatgcttaattcggaagccaaaattaatggtcattttgaaattggaatcattccaaaaacggacataaaaattgaaatctcatttgacggagacaaatttgtcaccattcgatcataagacgaacgcattaatgatcaaataggaaatttacagcaataatgcgtttattttagtaatttgcttagaggaatttattttttgcttattgacggcaaaaattcctatgcctctttttccctaaaaaataggtaattagtaagtaattaggtaaataattcaccaccggcggattttgaaaacttaagttaataattagaagagatttttaaccaaaaatgacttttcaaaaattgtgcggagaaagtgtgtttttggtgcaccaaatgacattcgtagaaaaacaaatacaaaaccttccatgataattacttaaaatagttcattagaattgtaatttccgctaaataattttccccaagtttccattagaaaaaaataattatacggtagaaaatggaacaggcgcgactaaccgtccaacaattgcgtcaggaggcaaatttgcagcgaaagaaagtgtgggtgaattactaaataaatatccaattatttatttgatatttattttttttaattccatttcccaattgtttcagctcggaagtggccagagagtttggtgtttgttttttgaatttgaattcattttggcattttgacagtctcgtcgaatattgtgaagggcacaaggaaggcgactgtttgttcaccggacggatggaccacaacccgtaccaggagaagaagtcatgcgtactgatctgaccgatcggcggaacggcccaatcgatcaatgccagctgatcagttgatcaaccgattgattattggaccattgccaaaaaatattttggcattttctcaatttgtctgtttgcatgcgattttcttataaataatgtcctcttttaaaaaatcacattcttcattcaacaaaaatgaagcaattttgaactgaatttacccaacaattagcaaaaaaaataacataatgcgccgaattcgttaaaaacgcctcaatatgacagctgaggaattcgggaaatttgctgaagaaaaataattgtttgaagaaggattttaccagaaacaaaacaatttttaatcttaaaaaatggtccccaaaaatggcaaagaattgacatcgaattgggatcaattttgcgacttcacttctcttgtcggctttcgattgctccattccaatcagccgttgtgggtcaggtgaacggatcaaaggcatttcaatggataaattaactaaaaataattagattattctgttatcttcaataattggccattaaaaggatgtttgaatttgtttaataaaactaataaaattatgctctgtctatccaaagacatttttttaaaatagaggcaatttgaacaattaataaacaaaatataataattaaataaattatatttaagaagtgttgccgcttccgttatgtttttgtgctcctttttcatctgtttccaatcgctttacttttgggacaaatttcgccaatcggcgggccaaagaattgcgacggtaacggagacggagggacagcccatgcgacagccgcggttcctcgtctgtgtcggccaacagagcgggcaatggaaaatgggggaggggggaaatggaaaataattaaattaaattaaattaaataaataaataaattttaataaaaaataattcgaaaaaaggtaaaataaagtgatgtgaatttagattattattttatttattttgttctcaattttaaagttcgctgctgcgcagccgcggcgaaagtgttgactttcgccaattggtttacaattatcaaatggaggaaaaattgaggcccgattttattaaacaggcaaaaaaagaaaaaatatttaaaataaaaataaaattaaaattaaaaaaggaacgaattaaaaatcctttttagcttcaaaacgaaatgggtttggtcaacaaattcctcagttcctcctccaattcttcgacgagtgttctccaatgcgcgggcattgtcctctcaaaaaacattcatttgcttgtcgaaattgggacggcacttcgagtgaattttaatttttgatttcgaaaaaaatatttctttcagttcgattacgcaaattttacacttccaaaaacgcccgacgaaattcaggggaaaagcgaaggaatgagcagcaaattacttaataatattctttgaaaatgaattacacatttcttttaaataaattaaatttttaggatttcgtttcgaaaggttacagtacgccaagttacggtcatcattggaccaatgtttggccaaatatttactggacgagatgctccagcaaaacaatgaaaatttggtaaaaaatattttttgtaaataatttaataatttttaataaaaattccaattttaaaaaagaattccaactcaaattcatcaaattttgaaacatttattcgctgtcgcatgaaacgaatcgccaaattatacgccgaatttgagcgacaacagaaggaatatttcgaatatgtgcaaaatgtttggatgcgaccggacgaattaatcgtaaaaagtgcgaaaaatttaaatggaaaataataaattccgaaaataaatttcaatttttaaaggcgtttttttcaaaaatgacccaggcaaatggaaatggagttggcaagtggacaacggactgtgcgcattgggagggccacggaaaaggcaaaaaattgggggaggaataaaaatagaaaataaattagaaataaaaaataaattaaaatgggggtaaaaaataaatttggaaattgacaaaaggaagcaaataacgccggaggcgatgaacaaccagcaaacatttgattacattttggtgaaaacgaacatgctcgagtcgcacccggacagcaaaatccgcgtctttttggtgcacgaagagggcaccgacgacggtggaggaagggaacggcacacggcaattagggtaatttggtgggggtaattaataaatagaattggacttgtttaaacaggcaaattcaattgaactcaactcgggaaagcacgtggaagtgactctgcgtgggatgtccgagattttggcatgatcactttctaaacgttcgtttgactgatgccaatgccaattaggacgaagactgtgacagcaaatacgagtcgggctgtgtgccgtccaatttcacttattcgcctatggtaacagctgaaaaccaattaatcattttaattataatttgttattattttaacgccacaaataattaattatttgttaagtaattaatcaattgaggtgtgtcgctggtgcaaatccgaagtgcgcaaagcgtgcccatgcacagttaggcaattaaatgcactttgttttgtttttttcatattcaaggctctctttttaataaaatctttttatttccataattaattttaaaattcctccattttaaaatgccgacctctttctctctgaatatattggcgaatctgtgcacaactgttcactgctggaggtgctcaaatgcggacccattcaaagtgaactttaccaaacaggtgggcaaaatcataaaaatttaaaaataattttattttttatttaaaaagtaacgtcaattctttaaatgcttatcattaaagccctaaaaaagcattgtttgtgtttttggtgctcttaatatttggttatctctcactatttattcttatttattttattttaataatttatttttttgaaaatacccttgtccatcaaatgcctttaaaatttcaaattccccccccccccccattagtccatgccattcatttcattcgttcgtaatttgtcatgttttctgtgccatttcagctgattgtcccaacgcgtgtgtgtcggtcgaatacaccgccgactttgcggtccatgaactgacgctggagaagctgaacacgcgggtggacgacgcgatccaaaccaaatgcatggctgaacagcttcaactcgtggacaaattcaacgaacacaaattcccaaacggtggcggcaccgatccgtgggcgagggacggacgacagacaaaaatgtccgagaaaatgatgaaaaataactaaaccttaatgggggccggattttaaaatcattataattaataatgaaaaatgtaaattgaagatggaaggcgagtgcgcagttgagccaatttctggatgattattacgtgatgatggtcaccgtttatcgcattctctacggaaagtaagttatgctaattgaatacagtcagtgtaaaatattacatcattttcttcaattaataatgttttttcctaaatcatgccaacttaaaactgagggtgctttccgagttgagtgtgtccattattttggccaaaatgttaatcaccggcttaattgcaattagtttttttttgatcagcatcgaaagtatatgtacaaacaggtagaaggaaatccattgatataatataatatgaggaaaatgccaaggactgtcgggacaatggcattttttatcgggggacggtttttttacggaaaagttttcccaaaaacggaggcacactaattaatgcttaatcttcctcataaatcacaaattttcttcgcatgttcaaagcttgttgcccaaatgttttgcgttcttttggctccaaaatcacttcaaaatgtgccggggaattgtaaatgaatgccgacattcgagtgcgttcttgggcggcatccaactgaatttcaaaattccatcgctttaactttccgttatcaattagttaatcaattcattaattatgtaattagtgctcacattgtccggcgtcattagtggactgtaatattgccatgtgaaattattgtcctctttttcttttttgcaaattatcacattaattccgtacaattttgaggctgtaaatgcgtcaacctcattaaaccatttcgcttgttctcccacattttctgctgctgttcttttcgtttcggcatattgccgtgcctcctcttttgtagtgaaaaacatttcttaacaaagtgccaatgtttatttatttgtcgcttaattggccctcaattacttaaaataattgtttcttttcctaattacgccattaaatagggaaaaatgaaaaaaataaaattttatttttataattttactgaaaattcaaccatagtttgcattcttaaaatcatcagatggcttttgcttctatttgctgcgaaatccaaaaaaaaatttcaaaatgaaaaattaacttcttttttggcccataactttgaaccgagaagcgaaaaatccgagaaattctcgagccgggaatcgaaaacgatactctcgcacatccctaattagagctttgatcacattacactaccagattgcctttgatcattttgcatttcaatttccttaccattggcccatttatgaaaatccctaaccctaaaaaacaaataatccatggcacttaccccaccaattgctttttgctggatcatcttcactattaattaattcgctgttcaaaaattccatgatgtcagcccttatttgcctatgattggcttcagtcccagtcaaaatccacgacaacgatcggaagccgcagttgccatcgctctcaattggcacgactccgcccggcccaaattcctcagatggaaagtcaaattcggcaccgaaattagtgccctgttcgtacacatagtgccattcctcacagaattccctccggtcgctttcggtcggcggattaaataaaaaatgtaacggattttgcaaattttgcggcttctgctcattgtcagcagatgccaatgccaaactgttcccaatgtgatgcttttcctgtccaaaatgaatcctttttctttccacttcttccgattgaatttccaattttcttttgcgcccaaatttttcttcgtttccatttgaaaattgaaaaattaaggaaacaattaaacatttgaataaggatactgacaatgagaacatttcattcagtttgattctgcgtcaaaaagggaatttgttttaatattttaataatgatttattataatttatatttaatataattataattcattattttatattattttttgtgttgttgctaaagcgttttttaaagattgacaaaaaaaaaatttatattaatgcattggataagtcattaataaattaaaatatatgcacaataaaatgggatgtaaaaattattgcccaattattgacattaaatgatcaataatttattgcaaatatctcttttttataatgcaataaatctttcttaattaaaaaatcatagggaaattaaatgtttacttttacactttttgtccatcggaatagcatcgtcaaatcaacactttttcggctgtaattttgcaaaaaatataaaaaacaaataatttaattgagcataaatctttataaaagttatttaacaaataagtttaaagagaacggttttcttttttcatttcctaaaacattgatggatatgcttttacatttggctgtcaattggcatcattagggcattaattgagtaattagcgtttttaattgtctctccccatttcccaatgtctagttcct

SEQ ID NO: 5438 - DNA, 1332 bp, Heterodera glycines
tttatttttttgattaaatttaattctttgaagggtaaccgcgcggagaacttttcaaggtcagttttatcttttacgaattgtttttcatttggtttggagttttcattaaactaaaacaggacattgttgcgcgggaatattacagcgaagccgacgcaaggttttgaattggatttaccagggaatctgatcagtttcttttaagccaatgcatccaacaaattcttgaatcgatcgcctattgccacgacaacagtgtggtgcacaggcaagtcacggcgaatcccacaattaataattgggcattttaagggatttgaagccagagaatttgctgcttgcgagtcgtgccaaaggagctgctgtgaaattgggtcctttgcttaacttattcgcgaaaatacgcatggaatttagctgattttggtcttgccattgaagtgcaagggaattccgaatcttggtaaagatcattttcattacacatattacaatatattacaacctattcttctttcaaaaatttgattagggaaaatcgaatttttattttttttaaccaaataatgtttaggaaaaatttaagtatttatgtaaaaacactatacgcatttcaaatcatgccaatatttaactattctttcattttaggggcgggtatactaaaaaattacttgatttcacatttaggtatggttttgctggaacgcccggatatctgtcgcccgaagtgctgaaaaaggacccttatggaaagccggtggacatttgggcatgcggtgagaatattttgtgtaaaatttgtttcaaagtgtcgtctggttttcccaggtgttattttgtacattcttttggtcggttatcctcctttttgggacgaggatcagcaccgcctttacgcacagatcaaaaacggcgcttatgacgtaacttttcctttttttctacataattcccattcctccacttcagtatccgtctccggaatggtaagcgttcggttaaaagggtacagtaagccaaattaaccaatcaatcgccagggatactgtgacgcccgaggcgaaaagtctgattgactcaatgctaacattgaacccgcagaagcgaataaccgcagaccaagcgctaaaagtgccttggatttgtgtaagtttcgagtggggagggctgaaaagtcaacaccttgggaatttttcggttttgtgcaattatataaaaaatttctcccgtttttaagaattttgtaaatagcaattgttgctcttatgcttccaacaaacaactaacgatcagcgtttttttctcatcccccatgctctttgttga

SEQ ID NO: 5439 - DNA, 6847 bp, Heterodera glycines
acaatcagcgtttttttctcatccccatgctctttgttgacatattttttattggattcaaaaccaaaaagtgcattttcctcattaaaaataaaacagaatccgttaattgttacggtcactttttccaggatcggtcgcgggtcgcctcggtgatgcaccgacaggacaccgtcgactgtctgcgcaagttcaatgcccgacggaagcttaaggtgagggcttttttggcatcgtacgggagcaaaatttgggaaaaggagaaatgtgtttttttcgcattgaaagtgtgcgtttgagtttaaattaaagcaaatgactttccttttccctttgcattttgatgtttggcgtacatttgtcattgtctttttgtggtgttttgtttttacaattaccaattaattggtttttgttcgtccctttccctccctttgccactaatagtcggagtgattttatcatttaattgtaaggcgctttcgacctttcccctcactaatcgatccaattgactttttccgttgagtgcctttccctttttccctttgagtggtttttttgattcctttccctccccaattcatttgatttctgatcagtgttcgtcttcgcttttattgtaggctgtcatttcggctgttgccattgtaaatcgtatgtcccattgtatgagtcctcaaaacagtcggacgaccgtcccaagtccgtctccatccccaaattcggccgcacagcccgacattggatggagtgtgaaggggccgaccaacaacaacggcatcgccgcttgtgccgattcatcgggtggcacttcagcaaataatggggtgggtggcgttgtgtgaattgtttaattgtttttgcactaatttttctaaaaactaaccaaattaactaataacacactgcaaaacgtccactttcttattcaaattatatttcaggattttgttccaatttctgtgctttttttgttgagtgatttattatttttgtttgtttgtgcgttcgttgctactttctttcttcatttcatttttttatttataatttttggtctttttatgctttatttacctttctttttcttttatgtttctaaaaattaaagtaaaataaacgaaacaaaaagattaattaaaaatgacaaatttcgaatgatattttaatcattatttacaatttatgcttatcacgcttgctggctgtttattgttaattacatatatttttccgtcttgttagtgacctgatcgactcatgcaaaataatatttgaattcgcattcgaaattcgaatgttttagtttattcgaaatgtgtgtcctttgtggtcagcaaactgacaagcagcacaaaaattatttaaaacttttgaaatttgtcatcttttttgtttccagattgtatataattctcgtcgtaatttgaacttgattttcagggtgccattctgactacgatgatcgccactcggaacatgtccagtaagttgttgtcgtccgaatgtcccctgactttctcacgcgtccctaattggtgcattaggccgtaatttgctgaacaaaaaggacgtgccgccaagcacaatcaaagaaagcaccgaatcctcgcaaacaatcgacgaaccggacggagtgggcaacgccgccggaggggacaaaggtgaatttggattgattgactaagcatttgcagtggacgaactcacactgactgactaaccgacccaatcattttcatttcaatgttttccctttaccatttgtcatcacttcttcctccgaactgaacgagccaaaaattcgtcaatattctgcaagaaattcttgtttttaacgactaaaaggaattctttcttttaacgaatttttactcgggtgtttttttgggtagaaatcttttttttgcgtgtgactaattaattaatttaattgcttgctcttcttcagtgtctgtccgttcttccctttaaaattaattcttaatttttaagcgatcatttctatcaaattgtcactgttaattacctgaatggaaatacctttcgagttttttcataaattaaaatcataaatatttcgtcaaaacacaatacccttcaaaatgcacttttgaatgctttttttggttaaagctaaagactaactgtcttaactttgttttcccccttttccccattaattgatttcgaaataattctgtttttcttcttttgtctgacactttttccgcttaatttcctttgtcccaccattagtgcgcttaatccatgtgctgacatttggcgcctatgtccaaaatcgggttgaaaacttaagttctttcaatcctaaaatagcctaatcagcattaaagtcaaacatattcttcgggttctgtttgaatattgatgattttttcaaaaatttgctgctgatcaaattatcggacacactcatttcctatcacttattcaatgctttttaggcttaaagtttgaaaccgattttggaataggcgcaaatgtcatgtaacccttaaataaactgttttggtttcatcattgatcattgagcagttacgctttaaacattggaattggttgccaaatttcgctttcttttggttaccgtattccgccttccaccagttaccgtattccgttcccctttggttctgtttgtctgtccatctgtcactgtctttctgcacaacttaaacacacttttctttcttcgctagcgcggatccaacatgagaacactgtggttgaacgggtccttagcaacagtttgaccgcgaaagcgtccactcagccgcagcaaccgcttgctgtggtgaccggcgccgcttccgccacgttctgtgcccactcgccaatcggcgcgtcggccggcacttcctcgcccgcgcctccgcttgcttcttgcgcctcccccgtcctttccggtgggtgctttctttgttcttctctcgaattttttggctttgtcttttcacgcgggagtggcaaatgcgctcagccctttcctctccttctgtttgctgcttctttctttcttgtgtttgtgtcgttgcttctttcttttcttccttttttgtttgcttgtccattttcggttacttttgtgcttattcgtcataatgccaatcctatgtatcaattgaccattatatccgagttttactaccccttggggctgtccttatgtacaaataatttgtcagtccatcgccactttctccccctttttgtttgctgctgcttcggtgtgtaatttgatgctttgcttttttactttttgcgttccgttcatttccccccccccatttttcttttaattttgcgtccaatcggccaaatcgttcgttcctttcccgtccatttaacttttgttgtgcatgacaaattttagtggtgtttagtccactgctgctccagtggatgcgggtgtaaaagtgtgagagtgttattaatttttggcccctcccttagacatacgccacacaaaattccgccttcagcactttcattccaaacaatccctcattttttttccattggcgccggaaacattttgtggggcggtgggcatgtggctgtgaaagttcgttttatcgattcattcaaagagacgggcatttaaaatttcgagaaaggaaattataaaaaacgcagtgttttaattttttgaaaaatgagtgggcatttaaattattaaaattacgctatcattccatgattaagcttaattggcggatgataaaaaatccaaataaatgctgaagggatttgtcccatttgggccgatggttaactctgaaaaccacactgaccggcctcccccgcacctccaaccttctcccactgactctaatccaaagatggcctccgcagcaaagagtaagggcttaatacataaatcaatgtttattagtagtagcagtggtgtgaacaaaaacttttttgcatgtttttcttaatttgtgtgtttttctctctttcctttctcattattccatttctttaaatgaatatgaaaaattcactgtgtgatgacgtagcgttgtataaaaatgttattattgttaaaatatacacaatccgttgaaaagctctgcgggataaaccatttacaatctcaaaattaagcacaaaagcaggaaatcgtgaaactcactcagcaactgcttaccagccaggactttgactctttttcgtatgtgcaaatgaaccgaacccattcggcaattgtcaaaacagagcgatttaggaaattgtgtgatccaaatttgacatgtttcgagccagaaacacttggcaatttgatcggtaaatgaatgggaagggaatgcacaaaatgcaccaccattcttcattttggcattttcagaagggatggacttccacaaattctatttcgacaacggtgggtttgggcgagggcggccaagggattttcaaagtgttcaacaaacggatgaataatctaaggccctcaaattccactaggcgtaacaaccgccgggatcaaacatcaccaccaccaaatccacacgaccattctgaacccgaatgttcacctgttgggtaattcgaattgtccccctttctgtaaatgttttggccatttcaggcgatgatggcgcatgcattgcgtacattctgctgacacagtacatcgacaggtgcttttcttttgcttactgtatccggaatggacgttttgttgtcattggggatgctattttggggtattaatttgctgcagatttggcgaagcaaggacttgtcaggcgcaggagacgcgcgtgtggaaaaagcggaacggcacttggtattgtgtgcacacccatcgcagtgagtttttggagaaatttgtacaggactacagtattcgttaattatagttaaattaattccgttgccaatgatgatgaattaaggtggtgaattgccgaattccgctggcccttcttcctccagcccggcggcgttccctcagaatttccattgatttgctttttctgctttagccgtatcaattcgaagtatcattatggacttttatgaattttgagaatggcttgccgatgatacttcctatttcgatttatttatgtatttctaatgctttctttctatggccaatgcctcctttggagtaacacttttattctcttatatgtaaaagacgaagcctgtgagataaatttgaaaactgaagcgaatctttttcttttgtttaggcttttgaaatgccgattcaaatcccttttaatccactggctcgtctttattttttgtcgcaaatgttcatcttatttctggtctattttctttgtctttttctgtttcttttcacagtcatggaaaattttatcatttggcctaccctcggggttagtttcctgaattagtattccaaaacatttgtttgccgcatttttttgccaccttttacggtctatcatctggtcttttcctatcatctcaaatcacaatggataaaaaatgaactctgttataattacacctaattaggcaaatagaaaatgaattaacattttatcgtcaatttctgtacaacactgcgcccaagtttatcgaaaagccccccaaagcgtagacattcaaatccaatagctcaaataggaatgtttaatcggacagaacttcggaatgtgcggaagtgttcagactagagcagtggaaggggaaaaggatgttttggtcggtcacggggattttgaggcctaatttacaagggaattggtgggaaggaacgcaataataaatgtagggtggaagggggtaacaattccttggcttcattctgtgcggcgtgtttcgccggctgccgacttctcagcgcccacgaaattggggttttgtatttcgagatcaccggttggtgcgagacctgaaaggaaagtgaggagggaatgaatggccgaccattgacaagcgaatggaatgattcaccgctcacccggacactcaaaaacgctgtaattgtggtccatttcgtccgtgtcttcttcgttgtcgctcacattgtccaccaccggccccgacgctgtgcccagtattttctgtaactttctttttaattttccaacttttcatttcgaattcctcgcctgtttctgctgctggtaatggtgcagttgcgctttgtaagcttaaaaatgcaaattactccttcggtttccgttgttttttactcacccaaagtgtcgtcgccgctctgaccgaatatgggcgaacccgacttcttaagtttgtcttttgtgggcccggcgggggaatagcgagtgaattcgttgaaggggtcgtcaattcgacttgaacggacactaaaaaagagggaataaatatgccaatgagtttcgagttagtccaactgattgtaatagtaaacaccgccgacagcgcccgcgacaatgccaaaacagcaaacggccagataagctgaaaaggtgaaaaaataggacaaagggtaagtgtggcaaacccatgaagagaatgttgccggaattggtcaggaaataaaaggcgtgcgtttttctgtccgaatcggttggcacactaaaaaaagaattgttaaagagatggccaacaataaatgttcaccgtttgtccatccattctttgtggcggttgttttggtgttgacgtggctccacaaactccacaaattcgttttggccctttttaacggcagcaattttcttcccttcgttttcaccgaacatttcggaagactcgagttcaccctggaagttgggttcatcggtcaaacgcattccaatattcgttattattcagctcatggcatttttggggtcataaatttcgg

SEQ ID NO: 5440 - DNA, 1931 bp, Heterodera glycines
tgcaacgacacgctggaccagaagggactcagccgggactcgttcatcggcgtgctggacattgctggcttcgaaatttttgatgtaagtgccaccagacagaatttgtcggggttttcgagcgccgtttttcttaaatttctctaccatgcgtattcttcggagacagaaattctatagaattttccatgcagaaaggaaattaaaaaaaaacccagaatttacgagaaaaaaaaaatcaaaaattcattttcttcaccttgctgaaatagttgcaaaaatttgaggataaagttttggcgatcagatgaaaaatgcctagggcaactaaaagctatgtggattctggaaaaaatttttcacaaattttttgtcgaaaaataaccaaggtggcggttacttgctactagtatttgttggttaacaatgtgctgtttctgatcataatttgtaaatggtcggttccaattcattttttttgatcactcaaatttaatgactccaatcctaattttgcattcaaattagggttaaactccgacccgatgcggcgagttatgaatttcgtctgttgcactccaaatccggatgtaattgtctttaaatgagtcttaagactttttttaattgtgtcggtaaattccctcctagatccccgaattttctctcccccagggtcgtggcttaaccctaattaaattttttagggctcttcacctggtctagatttaaacattaaaattttagtttaacagctttgaacaattgtggattaactttggttggttttcaatatatttgttgaaattatttaatttagcagttaaataaattacaataaaacaaatattaatattaaaatattgaagcaaaaactaaaaatttaatacaaaaaaataaactaaaataaactgactaactaattgatggatgcaatatgcataaacaatgaaatgggaattgtttaacaaaaataaaacacaaataaataaaaagtgtaaaatcgctatcaaataattcgactgctctcaataaatcgttccaaaatgatggttgacaggcttagctgaaaataaataaaaatattaaaaattaattttcctaaattttatacgcatctttaaattgtaagtcgaaagtctctggatatattgttgtggggcttcaacccacacccactatctttccgtggaaaatgatctaaccaactgagctatccactgcgcaaggggagactcaaggattttagaaaaaaggtctttcaggcctttttgttttaagatattttaccccttggggtgtaccggtatcagggctgcacgcaattacggattacggattgcggattacgggaaattacggggtttttggacccccgtaattacggatttccgtaactgagaaaatcgccgtaattacggattacggatttccgtaattgcaaatccagttgcgtgcagccctgaccggtataccctaccccctgggacggaccttctctgacagtgggcgtttattgttgttatcactaacccactgattgatctaagtagatcagttagactcgaccaagaccctagaagttggtcccgtgagctacactttgcttccaggatttaggattttagacgctggaagaatacccggtcaaaaaatgtctttcaggcaatttttcggtttgtttttcagaaattttatctctcgaaggtataccccaccccctgggacggaccatccctgacatcgggtatttactaataacagttatcacattgatctaactaggtcattggtcgcgatcaagatcctccccccccccctcccatatgttggtcccggatcatgtcaagatatattctggccaagtctctgtaattgtgtttctgtctctgacctcctctgccttctgctgttctgatcagttgtgcgtt

SEQ ID NO: 5441 - DNA, 3964 bp, Heterodera glycines
ttccctttcattttttgtctttttttttttttcctccaattttataagttttttcacgatgttttttcatttgttctgtttctcgctgctcccattctctctgcatcgctttttctctgtgctttctctcttcaacaagcttccttctatgctcttcctctctcttctcttcctctcgcaatgctctctcagcttcttcccatttctttttcctccgttcttcctcttccctctttttttctctggccaactcggctgcctcctctttttccattatctttcgcgtttgcttcaatttgttttctttgtaactgttcttaaaataattgtgcgcaatgcttctatggtgtttttctaaaattcttattttcattaaaaattttttaaaaaatcgggttcatctaaaaattttaatgagatacaaatttaaagtttttaattacccttcctggtactattattattattattattttatttaagtaaatttggtttctctacctggcatcttctggttggaagcctaaaaataaaaactaaaactaaattttcatgacataattaatatgtctgggctgattattttttattataatattagagtacggatttataaagaaaaattgtaaatgttcgagtcaaatctagccaaaatattttatttctttttgcttaatagctttcaacaattttaaaaataagggctctaattaaatattcatcaatatgcctttttgactaattatttggatttgaaatttcatttaatttattttttattattatagattttattgaattttaaattttgtcaattttttttttgttttaaatactcaattactttggcattaatttgcaatggatttgttgccaattctgatgttctgcccatatttttgttttcttttttgtcttaatagagaaaaggagttagcaaaaattaaataattcttcaattaaatttaccataataatccgttggaaatttgtgcctttcaccataacccttcagcccaccgtaatcaattggcactttgccaccaaattgagcggcgattgctctacttttaaccaaatcttaattgttaatttgtttcttaatattaaactgttgtagttataatcctctcaaaaaaatgttgtgcaattcagtaatttaaaaaaatttttttttttttttgctattttgatgcatttttagttaaatattcattcataactcaaaaaatcaaataaatctttatcaaaattaaacatttaaatttctaactaaaataaataaataattagggctgggagttatatgtaaataaaaaaagggttacaaaatttcaatattttcggttcacttacaatttttttaaaaagtctgtatttttttatataaaaactttaaaatttcaggtaaacaaaaaaatttaaattttcaagtttaaaaacacgctaattgtttcaaataaaattttatgaaattttgcagactgttagccccttatattaagttattttcctgtcaaaattccagtcattcttctgacaactatgaattgaataataaattcgccattttcaaacttcgtaattataattcaccgtcatataaataataatttattaataatttttataaatttctttgtataattctattaaaaaatttaattaattactttgttccggcattctctgctcatttgttcgtttttcattggcaatttttgtgtgatactttgtcaatgtttctgttcgttttacttttttgggcattcgtggtatttttgactccccattaaccaatgcattgaatgctttttcaagtaaaagcatcaattcattctcatccattatttcgccatttctcttaaaatttattatttttaaaaccttttcattttttcttttttttcaaaattgaagtcgaaagcataacgaaaaaatatttaaacctataaattcaaaataaatttaacgaatttttttgaattttctttcgcgaaaattttttgagaatttttttccaaattttaaaatttcagttttttagtctttattttcaatttaaattttaaatatgtcaattatggcctcttgcgccaactgtttgcagttaattaattttctccctaattaatcgtttgtcactgattacctcgtaaaggggtgggatgcttaattattcgcactaattaattgtctccctaattgatcatttgtcactatttacctcgtaaaggggtgggatgcctcggcgttgcatctctctgccaattgctgcccattgttggtaagcttcggcacgctcattagtcaaaattggcattttgcacagttgccgatcattttttccctgctgctcctttacattgcttgtcacaaatttcaaacatttcttggcatttcgccacgattgttcaacacttttgccaagcgctttttctttgatctcaccgcctgctccgcggctttcaattctgtacactgtccgggcaatttcatcttctcttgggatcaaaattatccgcttcatcccatgttcccgcacaattagttgtccggcatcgtacgggtccgcaatttcaagccgctttctatagtgttctgcgcctaatttttgagttttacataattttgaggaacaaaatatttgaaatttataaaaaacttaagggggggggggtttgcaaatttttttgagataataacaagttaaaacttgttcacggagggaggaggtttggagttccagatcacgatctgacatctattttgattattttcaaatcactaatccgaattagggcaaaagttaacactttgacactagcgcctctaatttgatggagttgcgcagccgtgcgcgatggtcgtgccggcgtagggaatttggtttttaccaatcaacaggggagggaataagggaaagtgccatatcttcacgaacgatgcaggggggtgggggataccacggagtgatcagtaaaagcgtaaagtgattaaacaatcatttgtcgcgaaaaggggggcgtgaaaataaacggaaaactaaatgggaataaaatgaaaaatgtgagcatgaaattcctaaggcctcggcattagcctaattatttggcaattttctttttttttataaattaaaaaaatattatttttttggaataaatcatttaccccgtttttcgtattgttcacgcaaatttcgttcaatttcttcccatttttgcaccaacatttggtcattcttgttgaatgaatgttctgcataatttttggccattttttcttttatttctccgtctgatttttcgctgtcacttttcattgaaacagcggaaattgaactatcggaatgctaaaagcaaaaaataatggaaaaaaaaattttcaaacgtacttttcagtatttgacgaaaaccaaattaaacttaaaatcaaatccttaaaaatttctttcaagtattttttcggaaaaatttactttacctttttcaatatttaattattattttttatttgaaatatttatgaaaattttttgggcatttaaattaaattttacttaacataaataaaaattcgacctcattgtgatcagtttgataattgctctgatcactttcactgcttggaattgaccttccaattgcagcattttctgaatccgaatcattcgatcggccaataaaatttgtcttcggtgcaacagtccaattggtgccaccattttgtgggtactcttccgtttgccacaatttgtggtctcgagtttgttcaaacaatgggttatcgtagactacctattgaaaatttttttatgaatttgtaaaattaagtattttaaaaaataaagcaccctccccccccccccccccctaaattagagtcccgccctgaaatgaagccttctaaattatagccacctcccaaaaaataaagcccttcttttgaggggggttgaaaa

SEQ ID NO: 5442 - DNA, 2654 bp, Heterodera glycines
cccaatattatattttattaatggaaaatgctaattcgattatttttttttataattttgcttaaattttcaatgttttcccaaaatccgtggctttagatatccatggataatactaatgtatttacatatttatcatcagttttgggaagcaaagtgttcttaatttgtttcgtatttgcggtatttctgactacgataggcaatggcggttcagggaaatttgggtcatcatcaacaattccgtcaaggaccaaattgttttgaagaattgggactagcagttcacgtgcactaaaatttagatttgtttttaattattaattaattcattggcatgaatatgtagaccaattaattacccaaagcagcgacagaattttttggctatttttcggcaaagccgaggaggaaatacgaaatcttaaattttttttctccactgttatttttttttaatttcagcgccggagagcaaaaaaaaaacaacaagaattcgtagccgtttttccaaaaaaggactaatgcgaaagtcgtctgttgcacccccaaatcttctgctgaattgtctttaaatggatttttaagaatttttttgttttggaaaattttctgttgaaaatacaaactccccaattagggctattgctccccgaaattttttaaaatttttcccagccatcccgataaattttgtcgagaaatttcctctccgatcgccgactttttcttcccgaaagttgaaataattacattaaaaaaatttacgcttaatttattttccaaaaatgggttatatttttcacttttttatatgattcccttaccaattttaatttttactatttttaaaaataattttaaaccacatttaaaaaggcttacattttcaatatttcttccacctttggcacatcgtttacttcaaaatccgtgcccttgtagtgatatgcccacacataggtcggtgtgtgcaaaaaattgcccacaaaattggcccatccctcaactttttcaaccatggctttgttggtgaatttgagcgcgtcctcaacaaatgtgccgtgccatttgtacgcatctttgacccgtagcatggcaaatgtgagtgccatgccaccgcgtttttcataagctggttttccattcaaaaatggcggtttcctgccaaaatttggcattgtgccaatgcccgtttgaatggtgtcaatttgcgcatgtgctggccataatcggggccgaactgcaacagtggccaacaattggtcatcaactacaatttttggcacaaatgcgtttgcgtttttgatggcaaaaaatatgatgaagcgcacaatggcacggtgaattgctttccattcctcacaaaggcgcctttcagatccctaaatgagcccaaaattgccaattgcacaaatttattgatacccagaaatgagacaggtagactaatccaaaaaaaactcaaaatgtcaatttaatttcgcgaaaatggcacttttttgtaaaaaataaaaaaaataaaaaatttgagtaatgcctcccgaaatatgattattttttaagattttatatcaattctacggcccaaaacttgtgaaaccattgagaaaaaatttgttaaaactggtcaaaaatttgagaaaatattatttaaatttaaaagaggcttaccattaatcttgcgcaatgccaatttggcggttctgtgttctgctggtcgtttaaccacaagtccgggtctctggccgaaaaatcgttcaatttccgcagctgtaaaaacatttcattttttggaatatgttaatatgtatgtacacaaaaataacatttttattttaaattatttttcaataaaagagattaatttgaattaacttttggattatttttcaatttttttatatcagaaatcgtatacgggtaggacccatatctgggtttttacgaagtgtaaattttaattaagttttggttaatttttaaattttttcaagggggattttctctattttttttttgtttctattagggggctgaaatccgttttccatgaaaataattcattggataattttgaagaaatttttgatattttatattaaaattttctttttgtgttcttggggactttatccctatagtgttttcgaaatttcaaaaaatttcaattccattttcccccgttctctcacctcctcattttccgttgtcaaacttattgttggcggaaatttgggcttttgtgaccgtgtccgatcatcatgcgatgatggtaaagtgtaatatttctcgtcattgtcactcgcctcttcctcggttactgtagtatctgtaattgtctctaatgatggcaaagatgcggatgaggatgagttttttgtggtatggtaaccatttcgactgcttgttgggctactgtaagtttctgtgctcgaacttctgtttgtttcactgctatttgcatcacttggctggctacagtaggcatctgtaccggaagtaagcggcgagaaacactgtagtattcttgttcctgctctattcaacacttccacacttgaagcaggtgtactgtacttttctttgctgcttgtttcgctgctatttgggtcatgtggcgggctacagtaggcatctgcaccggaattaag

SEQ ID NO: 5443 - DNA, 866 bp, Heterodera glycines
actttcatttcaagattttgaatattcaatcttatatgttaaaagcataggaagatattaagaaaaaggtcgtccctagaaaaagtttttgaaaattttatttcgggttcaaaatcttcggaagtgattttttttgcggaaaatgatgatcctgtttagaaccttgtcttcgaaattctcatgaccaggagtcctcttaaaacagcagcactttagtcctatctgtccttgtccatcccgaaaatcttggccctggttcaggctccgggttttttcaaaaattcagtctcattattgtaattttatttgttcctcatgtaggaatttggtggatggcggaggtgtaaaaggtcagcctgtggtgggaattgaacccacgaattgagatggaactgtttaatgagccgttatggaattatgtgagagtttttggaattgatgttaatgaagccgagggtaatgcacataaacaacaaatttaaaaagcaaaaatattaataatttatttctgggcatgtcattttttagctgtggttaaattttgtgaagaccttcaaacggttgttcaaaaagatgtcaaaaaccttgctgtaaatgttgacaaaaaattcaagattgatcctaaagttaaaaatgtgaaaacattaaaggaatttaaatttttgcattccattataaaatttgtggaagataagaaaaattcagatgaattggaaaagttttccacaaattatgacggaaaaaaattttctcagaaaacaaagttattaacggcacttttggtaacattggatgaaatccacacggactacagcaatgccagcaaaagagaaataggcaaaagtggaattcgtttgacacattct

SEQ ID NO: 5444 - DNA, 6617 bp, Heterodera glycines
  unsure (1)..(6617): unsure at all n locations
caaaaaaattttacctaacacactacctctgcaccatctgtagaggttaagngaanaaaanaanggnnnnttttcttttcttagaaaaaataaaaactttggnacgtcataactcggcactcgtgctcatttcgcagaaaataaaaatatttttcttaagaaaccatgggtgctctatccacccaccaaatttcatttggaaatcccacggacacctggggaccttcctttgttagaatttttaattactttttaagaaatttaaccgagaaaagcaaaatcagtgatgactttgatttcgtgctaacacttcaaacagttgccgaagagagcacggaattaaaggcggagaaacggcaaaagtcaattaaggctaaagataatgtgaattgtttcaattgcttttctcattagcaattcgtttgtgcttactaattgacgaaaaagaaaaattggcagaaaaatatttgccaaaattcgtattcgcattgaaaatgtgcacaaaagaaactaggtaaaaataaaattgatttttaattttttatttcgatttttattttattaagcaattaagggttgggaaattttaaatgaaaaagggtgaaaaaatagaaataaaattccacttgtattaagaattttaattatattggtaaattaactttattaattaagctgtaacaatttcgaactctttgaacacaaaatgaaaattgatggtaaaaatgtgcacataaatttaagaaattggcatttgccttattttgtgtataaggaaaaagaagatgaatttaaaatggaagaagcggaaggtcatttttgaatatgatttcatatttattatattaattataatattatttaaatttaattaattatataaaaatattatttttttaatagtggaagtgaatatacgaaaactgaatgaattggtgaacttggtaaagccagacgatgaaaaagttatgggtaattttgaaattgttcattatttatatatatgtttttattaatagtgaacaaaattatacaaaaattgcatgtattactaaaattgcaagagaaaaaacgaaaagtgaaaaaggacgaagccgaaggtatttttaaaattatttttaattgattaatttgaatatatttttaatagtggaaatgctgagagaaaaattatggatgagctagaagaaaaattaacaaagcataaacaaaaaaagatggatgagaaaaacaagaattgagccgaaaagaaaagcgagagaataatgagcaaaaataaaaaaattttccaacatcatattgtccatgttaacttttctttattttttagggatcgcagatcacgaatccgacatatatttttgcctatttctaatccctaacccgaactcgaacacaaatacgaaaatttgaaattttcgatttatgaaatgaggcttattgacctaccaaatggggcttttgaaaattttaatctgggagtcctgtttatttaccaatacccatgcaaagcatacatatacaatgggtaaaattggcgaaccgtacagcctatgccctgggggcacactttgattggacaaattgggttctgtcaatttcattttccatctttggcataaagttgagcattcaattggattaaaaacatatatgggtaatatgtagggctcaggcataaaaaagttgaaattgcataaagaatacaaaaacgactaaaaaggcacaaaaatttaattttggaaaaagtgcgccgaaaaaaggtggtttggaaagcaaaaaaaaaaaaaaaaaacctttttttacattgctcgacccatgaaaattgttattttgatcttattaattaattaaattgttacaaaagcgatttaaagtaatgttgcaaaatgttcttattttgaccctaaaaccttattttttggccttgatgatcttattttaaaaattttcgatcacacccctggtgtaggcacaaaacggaaaaatgctctgaatcaactttgattcaaatcaaaggtgctctgtcgttatttaaaaaacatcataaaaatcagtatttaaaaaccaccattatagttaaaatcaatattttccgcaacccacacaaaatttaatacaactttttttaaattttaaatacataaatatatcaggtatttttatatgaaaatccacgttctattcaatgattaaattgagtaaattaaatccctaagcatacaaatacaagcatttcattcaacgaattaattgcatttcatttgaaaaaatgacaattagtaaaaagaaaaaggcgatatagtacatgaataaaagaaacgagagtataatgaacatagtgcaactaactgtctgtctttcctcgccacttttacagcccatctaaaaatgctgccaatgttttcaactatatataaaaaagaaataatacgttgcttgataagcgatttgttcaccggcgccgtttcccgctcgctggtcgctgctgctgacctgtggcgagtgaattatgctcgccgagcgcttgagcgttagagcttgcctatggtcacggcgagcgttgtccctccgcgtctgcagcaagcggggcgaggctgccaaatcccttggctgaagaaggccgaggctgagaaagctgaggctgaccggtcttggttgaacagcaccgcgcactggcttggagatggccgggcattgacgacggttgtattcggtcggagtcggtttgagcaaaatcgccattttttaaaattggcaaaatatgcttttttgttagccgatggggcgaagtagggttcgagctccgtgcgcgggggtggcttttcgcgggggcgggggcttgctttgaattagtacaagaaatctcacaaaaaatcaatttgtttgtaactgtgaaattttttcaaaaaattacaaactttggaagcataagagtgcatttttgtctattcacaaaaaaacaataaaaattggatcaaagcctcgggcgaagtttgaggcttttgagttttttttatgaaaaaacagatattctttagtaattgtaatttttttaattaatagaaaattaaagaacttgaactaactgtgctcctttttttctcataatgaaaattcacttttgcgttttctgactttttttttcattattttgacattttttggagaatttcttaaaaaacaataaaaaagaaaagtacacccctaagaatctaccccaaaaatttcagaaaaagacacccccctaagaattgaccctaaattttcaaaaatgcacccctaagaaatgaaaaaaaactttcccaaaaattcgtctcaaaagcttatttatttattttattgacgagatactgatttggcttaattttattgctttgtgaataaaaatttgtcattttatatccctaatgagcctttttagagcctattttccatttgccttttttatgggttttttagagtctaaagcctaccaaaatattgtcaataagtaaaataattataaaataattttttttttcataattcaaattataattctactgatcacataaaaaatcataaatatatttagttttagaaattaatttattcactactatattaactattaattaattaattatcatctcaattatacgggttatgaagactatagaaaaattgacaaaaacaattttcgaaacaaaccacacgaattttaattggtttttgctgcatttttcagcaaattttaatcacctataaatcacttaaaatcatttaaaaaattcccctaattaaaccgtatttaactatttgtctttgtagcattggtcaagaataattatgcgttaggatgctttagacaagaattgcaccatattgaaatattcattacaaaatgaaaataaattactaattatacaattaaaaattaggaaatttttagctatcaatatttattaaaggaataaaatattaatctattactttgaaatgattacaaaaacgaggtaaatattagagaccggacgggatcgggatcccgcgggatttcttcgggatcccgcgggattaaattcgggatcccgacctcgggatccgtcccgagcgattttttaaattcatcgggattgatcgggatcgggatttcatcggaatcccgaaccgggatccctcccgaccatttaccaatcccgcgggatcccgcgggattgaagtcacgataatttttcaaaaaatgtccattttttaaattaagatcttgaattataaattaaaaaatattgtcatttgctaatttttcgtaaaaaatcccttaaaaatcccaaaaaatttacaggtctccaaaattccactaaaattttcaaaatttgacgcaaaagttggccattttgtcacttttatttcttcataaaaagaattttttttttaatttctaaaacattattctaaattttattaggtagttttatggcacaacgatttctaagaattttgtccaataatcagaataaaaattttgtctacgcatttttccttcggtgccaatcggacatcaccagacccaagaacccattattttcttataaattagttcaaaatcacaaaatatgggcagtttttgtataaattctgttaacaaattacatttcaaattttcaaaattttcccggcggcgcctatcggcaccgccgacctcccccccggttcccctaaagtttttgaaaaaatttgcagcaaaaaaaaatcttaaaaatctgattttttgattccgtttctctaaattattaaaaatgatcatctgaggcgaaaatacaaaaattgatattaattgattaaattgtaaaaaaattatttaaggctatgttgttaaatgttctcatttttgaaaatctgattttttgggcatgatattccaattttgaaaaatttctataaaaatctgatatcattcacatctctttttttttcttcaatcgaattgatcaattataaatattagataaacatttgaacaaaaacttggcacaaaaatgtaaaaaaaataggtttgagcaaatcccgaaaatcccgcggcatcccgaaaaaaaatcttcgggatagatcgggattcggtcgggatgtgcgatcccgggatccctcccgatcgtttctcctataggttgggtattcgaatcgttgaatagtacgaatcgtgtaatagacgaatcgtggctttttggctgagtagacgaatcgtcactttttggctgagtagacgaatcgtcgagtagacgaatcataggcgcgcccctcccaagccttgaaggccttacaaccaactgcgacagttccgtcagccacgagtgtcccaagtgtcagaggtaccgcgcattggactatctccccgatatcctccaagatttgtccaccgacatgtcccacgatttgtccccaggaagagagagagagagaaaaagtgccatacgtccatgttgagtcctaaccaaaaaaagtcaatgaggcgaacctattcttgccaattttctggcctcgctcatatcgtggccaagccctacactacggtcgcaaaacattcgttcggctattcttccgccgaacatacaggcaatttcggccatgacttgcttccttgtgcttacagggcgcgtttccgtgtccgtttaaccttcataatccccgtttgggtctggcacgatacacacctaattaacaaatcatatccaaatcaaatctcaaatccacttcgatgagccgctcggaatggcgaagaaaccatacgaccaacgtgtggccgcattcgtggattgcaactctggccatattttgctcattccacaaatccgcttcatccagctcggccataaagttgcgaacacgattcgaataagcatttacggcacgatgggcattcatattgccttgaagcaataaaagggataaagcatttgagataattagagttaaaagtcataagctaatgattaatactgtaagcataaataaggcatttaagcaataaatggatatttatattaaccatatgcttagagaggttttaaaatagtaaaaggtaaaacattttttagataattagagttaaatcatatgctgatgagtaataccttatgcacaaattaaggtattaaagcaataaagggcaaaaatattttttgagataattacagttaatcagcgaccttttcgcatatggtcttgttgaaactgtgaaatcaaatcttcatataatgttgctttttaagttggttggaagtgggccattgacgcgtagtaagaaagcgcgaattgattttggccagggcaagacgaatggctgaggcagtcctttggccgaactgaaaattaatcaaaaaagtggttgcttttttgtaaattgcaaatctaatttaattccttatagttggcaattaaactttattctatgggcacaatggactacaatgaagttcgccggtataaaaaattttcagaataattttgtatagtgtgagcgaattaaaattggtataacagtaaaatattggtactttcttgttttggttacatggctttaaaaaaaacaaaaacgagcgtaaattcacataacttagttttacttggagacataa

SEQ ID NO: 5445 - DNA, 1818 bp, Heterodera glycines
  unsure (1)..(1818): unsure at all n locations
tttttgcggacanaattcagcgttcgccgttgactgtgtgctttcccgagtacaaaggtgttgttttttgtcagtatctttgttctcgactagggaaattttttttttaatttttgttgcgtttttttcgaaattgaaaacaaaaaaaaggggggggacatggcacggcatggatgtgtcgtcggaatgccgatttatgattgctgctttccgatattttgagggcgtcggcacaaatctctggtacacgtttcactgcccccaaggggagaaaatcctaaatccaaagacgtcggcacatttggggccaaatttttttaatttaggccaacaaaatcaaacggaatgcataaattatatccagtggaattttgagcatatgaataggtcacggcaacgggaaacttattgccaccacacatgcgcaacggacacaaacgtaatttactagtggccaaatcggaatctcgggacacttggcattactggaaaatcaaagaaattttccgagtcgagacattccgagattcccgaccggtcaacatccattaggagcaattagtgacagtctgtgttcgggactgaaaactccgagtaatattattaccaatcaatcatcatcaatcatttatacgcataagcgtgacgcccaaaaataagaaataatgaaacaatatcaaataaaacaaacaattggtcacttttggagctggggtggcaaagaaatcaacaaattcagatcagatctttcaagaagtttggcaaactcattagaatttagtaatctcgtctctttaggcaaaagtctatagagacgagaggttcgaataaagaacgaattgtatctagcattggttgagcaataagctgttcttatagtgcagggctcccatccgtccttgaatggcaaggacgtccttgaaattgggccctctttcttgaaaataaaaaatgtccttggatgccaaggacgtccttgaaaatgaacatttagaaagttttaaaaaaattcaaagaaatttgagaaatctttgtaattttcaacgatattttgattatattatggcattatgtaaataaaatgcaaattttcaaattttctcatgcttgtgaatgaatttgttacgcaatttttcgcgtttgcgacataatttatattttagaatgttcccaaataagcgcaaatgttctttcaatcccgattgggaaaagcaatatacttttgtcaaaagaagccgaaaagggaatggatttttttattgtgctttttgccaaaaagacatcaatgtcgagtcgatgggagtttcggccataaagtcgcacacggaaaacaaagaacataagcaaattaaagaggaacggcgtaaaagcacacaattgagaattttgttcgatccaaatcgacgcttaattcaattgaccttcaagttgcaacggctgagggtcatttctctaaaattttcagaattttccacattatgttcttgaagttctggattaccatcaacatttaaaaatcattgcattaattaaacgtctgaccatttttcttcccttatctcaacacaaggtgacgatacaataatattaattatggacaaattaattacaccagcacaattagatgtcaaaatcaccattcaaatgtagcaataaatagaggaatcaaatggctgtcaaatcaccaaaaacattcatattatttattattttatcgcatcttttcctacaattcaatttccaagaatggctgccaagcttcataccatcatcctctgctgcttgtatgtgcgatgattaatcacgagataaaatact

SEQ ID NO: 5446 - DNA, 4794 bp, Heterodera glycines
  unsure (1)..(4794): unsure at all n locations
ggatgttttgaggtgcacagaaatgttattattattaaaaaaacgtggctttacgtcgctgcttatttctttaaatgtcatttgtcttctgtttgtgtcccctccccggcggaaagcggggaggggggggggggtgaaaatattttttgttttattcaaaatggcattaaataaatgccaaacattcactcagacacattgaaactccaaagtactcagaatttgccacattggttctgtttgtgttagctcaacattgccatttaaaattcatttctttaatttaatgtcgacaatttttcttcccttttctcagcccccgaggggacgatgaataataataattagtgacaaattaattggggcagcacaatttgttggcaaaatcaccggccaaatgtgcgtacaaaagtggtgatcaaatggctgtcaaatcaccaaaacattcattcattttattattttattggcccttttcctaaaattcaatttacaaaaatggtttccaagcttcttccggtcattctctgctgcttgtttttggtatgtttaagcattcggtataaaatactgtaattcgagtagaaaatcagggagtacggtatctatgatattattaatttctaaaacaggcttaattaaattcagttaaatattttaaataaagtaataaagcttaaactttcctttttaggcttctttcgccctctgctcgcccaaggctgctgatgtgctggtaaatggctcatttttggcattatggaaaatcaaaataatattaatatcttgagacctaaaaactcaatttcacggacatatttgcaggattaggattcaaaatccgttaccggatgaatccgctttattaatccagcaaaatgccaaacaaatgcacacgattgtgggcccaataaaccctacaaattcttccgtctccactattatccatattaaaattgattttttcagaaatttaaacgagaagcggcgatcagcagttgtggagctgtaagacatatttaaaacaatagaaatattcgacaaaatattcatggaggtcgcttaatccctaaatttgttaatgaaatttaaatttatttgtaccactaaaagcgttagatgttttttaattagccatttttgtcctgttttctattttcggcacttttagggacagtttgaatacgggggcggctgttgtacgacatgcacaagcgatgctgattgtacgggcgggaaggtgagttatccaaataatgagaagcatttgccactgttagaaggggattgggcgcagatctaaagagccccttaaatattcatcgaataattatgtacaattggatggagcaagagcgagatatccgacgacgttaatggtcaaaaaatccctcgaaggaagagaactatgaggtataatcgcattaccttctgaggggaaccgtatacgagaaatcaacaattctaaacgagacagggcntcgcaatttacatcaaaggtagaaggtgtgggatgttcggtatagctaatacgaaacnnnnnnctaaannctnnncnatattcattaaatgttcattttcaaggaacgtccntggcatccaaggacattttaatttcagaagagggcncaatgcaccactgagacagggatattcgtcagagaaatcagacccgattttgacgaaaaactttcggttttctaagtaattctgaatcaatgcacttggtttcctccaataatgggagttgacacatcgcataatgcaatggaaaccggaagtgccctaactcgcacgtcatccctcctccctcccttagtccaggtggcagtactttatatccatatttaagtgcagatgagaatggggcggcatcggaacagtaccgcacacactggactatagctcgtttgatttatgcaatagagatccaaggctttgtgtaacgaagttggcatgccaacctggcttggattgctcttttattgcaatttgagcatgtttttggcaacaatgttcagcactttcgcttgaccttgggcatcgatctccctttttggagcatgcacacggacattgttgccgtccgttgctcgagagaaggccgtgtataattgaccgtgggaaaatacttccctttctaggtcaatgccgacagtgcggattgtttggccctgacctttttgaatggtcatagcgaatgcaggctttattgggaactgcaaacgctcatattttatgccgccaggcgatttgtcttcatagacatttcgtgttctttcaagaaagaatcttacttggccgccaatagcattgctattgataacacgaccaatgaggcgatcatcgccaagttcttccagaactatgcgtgtgccactgatcagtccttccttatcacttttattgataagaaggacgacgacgcatccgactttaagccggagactgtgcgggggcatgcccgagtctgtgcgccggttcaacgcagccacttcggactcgatctcatcgatgtccagtgggcggtcgtcaaggggcttatccgtggacaagtatccccgcacttgacctggcacattcgccatcatgatctcgttgacttcatcacacgtgtcaatgtgcggagcgagaatcaaacgattgagcagctcttgtcatttgccaaggagttgttggaagttaggatagacataatctatcagctcttccttgctcttaacgaggaactgcggaggaatccagaagtgctctccggtttctccaagcccgatttggcggcacatttgcaagaacgcttgctgaccttggcccagtctctggttgatggtcaatttcatcgtggtgaactgaccaaacaacggagacgtttgaaaacaggctgtcacctgagcggttaagccttcatgaggcacgaccggcagcgactgtttgaagtcagcgctgaaaatgaccgtttttcctccgaagaggagatccttgtgctggcgaattgccatctctttgcacactcggtcgatgacctcaatcaccgtgttgtgaagcatggtgatctcatcaatgatgatgagttgggcctcacgaatccgacgggcaaagaagctctccagcggaatgcttgggagtttgtctaatgacacttctctacccagacgaaacgtggaatgggctgttttcccatatggcagcaaaatggctgcacacccagtggatgccgtagcaagcactttgtaggtgtatggggcctttcgcaagcgcctaataatttggccaaacaggaatgtctttcctgtgcctccatcgccgtatatgaagaaacggcgggggacagtcgaatccctagggttcgactgtattgccaacaaaacagcatcaaagacgttctgttggtcgctgttaagtggcggaggggtatttggctgtggacgaggatttggttgccctggaggcaaattcaaatcatcatcgccaaagaaaaactcttcaattgccgcgtcagtatttttggcaattgaagttggcgggtctggcaggccaaaatggacacaactgtagccaaagttgtggagccgccaatcaatgtcggctaaggctctatcctctgctactttatgctgtgccggagtaataatgccttgcggattgtacatttggtctttgtacttgttccacaattctatggcattactcggctggccatagaccaggatgctcacaaaaagccatctcatctgatctggccagcgcgacagagctgcctccgccagagttttgtcccaaattttgtcgtcttcaagaagaccatgcattattgcagcctcagtgaatgaggtacaaagcaacccgttaaccatcttaagatggtctgggtctccaggggcctattcaaattagcatcgtatcaacgatgcgatgatacgatgtgatggctcatcatagccccgatgcccgttcaaattaaaatcgtctcccgcatacgatttatcacaccaagtcatcacatgtacgttcaaattcatcgtatcatcgcatctacgatgcgatcgtcacatcgctcgtaaaatcgtctgcggcagacgattatttgtacgatatgtcgtatgtgcgttcaaattaaaacatttctacatacgacgagcccatcatacgatgagcctccctctatgaaaatcgtatgtagacatacatggaaggaaccagcgattttcctacatcgtatgtaggaaaaaaattcgtaaaaaattcgggagacttttaaataaataatatttgtatatttcttatagattaaagtctcagctattttttcatataaattttaaatttttagtaccaataaaagccagtcaaattattaaaaacataaaacattcaaaagaacgcatttttcctttaatttgaaaaaaggatcagcagctaccttattaggtttgtataaattatttggagaaaataacagcgaatattaaaagtaattatttttattaaatttttgtcgaatttaaaattattttaaaattgccaatggaaatatttttaagacataaaatgatttgtggtaaacatcgtatgcattcatcgtatcatatcatcacatcttatccataaaattaatttgaacagccatacgatcgtatgatgagaacgtacgattggatcatcgtacgatctcatcgtatgatgagctgcaaacgacagctcatcatatggcgaaagtctttaatttgaacacgcatatgatcatcgtatcatcgcatcgttgatacgatgctaatttgaataggccncaggaaa

SEQ ID NO: 5447 - DNA, 1943 bp, Heterodera glycines
cggccttggaactccattgattcgccgtacccaagggatggttccgaagaactttttgtcataaagttcttctcggaactcagcgattttgctgctccagacacgcatccacatgtcaaaacggtcagtaaatacttgaccgtttttatatatattctctttgaactcaggccattccctgttgttggtgaaagtaatgaagagacgcgctttcttcgcgtcatggcaccgtgcaaaaacggtgttgcaatcttcatacattttcttccaatattggagagaatttacgttgtgttcggaaagccgaacaacactgccaatgtcatcaacagttttctgttgggcattggggttttgccgtgctttctgcctgttgtattggttgaccaaatactgcagcagattttttggagtgctgatccgcagatccatgtcaggtctatgcaaaaatgttgctatttgccaatcaatttttgcagcctggtcaaggatccagcgctgaccaagtcctccaccacatgaaagaatgtggtggtattgcaactccacattttcatcccttattgcgagataatacttgcaataatctcgcagggagataaattgtttggatttgtcaatccgccggtgctgcgatgaaacagatgctacagattcagcatctgaatctgcgactgaccccgcatcagataatgcaattgactgagtctcgcacgactcattatctgactcggcttccgagtcaaataggccagatgcattctgagcaccttttcgcttacgcgatggtggcttagcatatttaacgccagttgtgtatccatcatcgcccattggcttgattaatggatacgtaagactatcagtccacggactgaaaggagcaatttcatttaattgcccttgtttgttctctacccaaattcctttgggcggaggagcaccagtggggtccgcatgaatagcgaacattccttcacccgtagaaggggtgattatttggtgtgggtgcaattttgggtctttcagaccagctggagccctgcgctcattcaacaaagtcatgcgaaagaagcgaagctcttccggagtttgttgttggagaagctcagtgagctgctcacgcgcctgcttatatgcctgcgcagcaggatgatgcacttggatcatttgttctaagatctcaagagtctgctcatttagctggtgaccctgcacaaactcatcttcgtttgtgattttctccccagtaaacctggggttgtttcgacgctgttccatagcctcgactgggtccagaatgtacaactgccaaagccaggaatctgagttgtaccagcctgcatgctgcttatgcggcgatggaattctccgttaagaataacggccatcggaccgccagcagggcttggtttgttgccagcggaaacgcttgcaaattggaacaggttgttataacgcgacatgtttcgcacaaattctttcccttcacgggattgcttattccccacaatcagctctttgagctcatcaggatgcgagttaagcattggcagcacaactcttcccttccggcagcaaatgctactgtcttaatgtgagaagagatgtgcaccgcaatcggcgcattttttgtcaccgagtttcccggagtcacaatattccgggaaatgtttggctgctgctgcagcgcattgccaccccttgtgaaatgcagagcaacgccgtgtgatcggcgttgccactcccagcgaatttgctggcggggggcgtttcggcgccggtgaaggcgaacggctaacagaagctgaaagccttttttgaacgcgcattgatcgccttggtggcgtcttaggtctgatgaaaattacatcatcagcctgcgcaattggctcttgcgggatgcaagactccgacaccaaaccaagcgtgtcaagggagtt

SEQ ID NO: 5448 - DNA, 7325 bp, Heterodera glycines
atataatgattagggctgccaattttatgtaaatacatatttttttcctagcttctccttgctctaaatagcaggaaaaacactttcttttttgtgtttgcgaacaaaaaccgggacttttatttacatatttttacatatttcggggtttttatacatatttgtacatattttggattttttcatattattttcatttttttacatattgagtattttttacggaaatttttggaaatcctcaaaaaaaaatccaaaatttcggcaaatatttttgtacatattttcatttttttacatattttgaaaatttataaagaaaaaataagtttgaaaatgttgcctaaaaatatgtaccaaaaaaagtaatttttatgtcattttgtggctatttcatattttacggggattttctttcccaaaatataacattaaaaaattttatttacatatttggggttttttgtacatattttgggatttgtcttacatatttatgtacatatttggaccactttttgtacatatctttggcagccctaataatgatgaatattaagcattaacaacacaattatggcgagtaaaatatattcacgatttttttttctcaaaaaattttgcaaaacaaaaggtccccctttggtttttgataaaattcaaaatctgtcatttttaaaacaaaagggtcccccctatggttttgataaaactcaaaagttttcattttttaattagcgccaaatttcttttaaaaattattttatgcataccatatattaaaaaaaaacaaattctgcatcaaaataaacaaaaaaaaaaaatgtaaaaaaagtgaaaaaaaattcaaaaaagtactctttgtaactagcgcccggaaagtccccaggaacaattttttcacgagcatacatcttacaaaaattttgcaaaccaacagagtccccttttggtttaaatacaattaacagataaatgtgaactattttcaatttacacattaactttttgagaaaaaaattaggttcacttaactgaaaaagtgccatttattgcgaaaaattgtattttcattaattgtaaacgactcttgatatggcctttaaatttacacaataatagaatattttaggaagaattcattcaacgatttggaagacaatttggcataacggaggaatttatccgctccaactcgcaacgaatgaaggagttcaagcagcaagtcaccgagggaaaacagcgcgaggaatatgccaaattgctgcacgagcaaatggaatttgagtcggcgcgccgtttcagagagaaatatggactctgatctgatctgctttattaaatcaactccgtttattgtctattaaaattgtgtttccaacttttttctgaaacaaaaatagggaattattaaattccttttttaaatacaaatgttgaatttgttttaaatgattcatacctgtatattataatatttaaatgtctgtacacaaaaagaccaaccaatttttgagaaattcaggaattgagaatgactgaaaacaaacaccgcaatttggggaacgataggcaagtttacaatttaaattcttgagcgggtcgatcctacggtttcattttagtattctacgtaaaaacgtttttgataatgttatgctttgccttaaatttcttttacataaaattgtacacagtcactgatcacgaaattttgctatttttatttttcgggctctaaatttgattgaatatactccagactgtatgtattccctatccgaaaaccataaaaatgggccttttttggtcgcaggaattgaataaattgtgccatttctgtggacacattaacttttctttttttaattttctagtatcagaatctgtgatgacgtctgttttgaccttctccactttttgcatcgtgtggaccatcagcgcataaatttggtcagtcgccgcttccgttggctgagtgcgtccgtcgagcgtcgctatccctcgcgtgccattcgcgctttgttcgtcgttggcaccccacaaaatgatcaatctgcagatcagcaacaccgttttcttggcaattcgatcagtgtctgtccgtcagttggggcaccttatgccgttgaattcgcaactgttgctccgcctgccaatgtatcgcgcatttccgaattggaaatatgcgatttcatcggcccgcaactcatcgaatttttacgcgtttcggcgcctttgttagacggatgttgtctgatttttgatggtattccttaatctacttattcttttatgcctttaactgttgtcagattttgagaatttcgtccgtttgcactccttccaattcgtctaccaattctttgccctttttccggacaatcgttccgttgagttgcgtttcgtctcttccgccaccgcccctttcttttccaatcatccgtttttgttcggttgtgtcgaattgggcatcgaatgcaccgccgactttccattgggtactgattttggcattcggtttttctgaattcatttttaagactgtctctacgggtggctttgtcaggacataacggaggaaaacaaacgaaagcgttgtttggacattcgcttcggtacttttgttcatgtgaagaagtgcttggatgccgtgggacagtttgtcaacttcgtcaaacatgtgtgtgaaggggggtttcgttgcccatcattgccaattgctcccgacctccactcaaatgctaattcactttaagcgctttttgcattcctccgattggtgtcccttttacgtggaaattgagctgctcggcgggccacacattcccgaattggacactttcactgaacacaacgaacggaccggagaacaattgacttttgcaagagacgaattggcacgactttactcattggaaaggcgaaaaagcacagagaaagggccggacgatggaatgggcggagagggccaaagggcggacaatggcgccgagggaggccatggaagtgacggtgtttatcagcacagtgcagctgaatacgtttattcgatgtaccattcggtggttttcatccgacaaattttccagggggacatttccattggttgatcattcccgggggttttcattgtttcgatgtttctttctcctaaagtttctgctgttattttgtgcttgattcgtttgttttttctttgttattcgttggacaataattattttcttttttcttccattcttttctctttttaatttggtaaaaattattctaaaaatgagttcctctcccattgtcgccgttgccgaggggggcgacccggtggagcgaatgattcgtgcgaatggatgttgggatgaacacgtcgcactcggcgattgtgtgggggaggaaggcgactggcgaaagtgccaaaaacaagtggagaagctgaggttgtgcggaggagcgctgaacggatataacggacacttcgaaaatggcattttcagggaatgtatgggaaaagcaatggcacagcaaaaacgaaggacggagtggcaaaaacagcaaaacgaatgaggacgaacattggtcacactggcccactatttgaacctattgtcgtcgattaacataaactgtggtcgcattgtctttaagtttcatgccgttgagtcttacccaactcttccactgcacgcgtggcatttcacgtccacgccctgtggcattccttgtgcatggatgagttgcccgtcccgcttttcccatggctatccgtttctttcgtcccctccccctcattaacctaagttttgcgcctcattctcggccttttctttatgtggcgtcattagcaacgtaagcaattagcaaagcacaaatcggagcatcaacggacggaatgccaattaaaatttggcggttcggtgcctttccttttatttgaaaactttttgtgttttccaattctaagaacagtcagtcttttgagagtttgtcaacacattgaggcctctgccttcatttgatagtgttgctttgataaggtgcgaattcgcttcccttttggtcgttcgtttccgccgtttcggcgtgccattggcacttcgttgcgctgttccctttcaaatgccaatccgtgcccttcctcttcgtcgagactgaccctctcccctctcagtttagcaatttgtccgtctcccttttgtcccctcagtttaacaatttgtccgtttcccttttgtctttttgctccatgtcttcctcccgcttctttgtcctccttcctctcctctttttcctcctcctttcgttcgaatgcgttcttttggctcccaatttgttctcctccgtaagttgtcgtccatttatcttttcccatcaaaaatacgcccaaaaaacgaacagaaaatcgtcgcttttggtgagagtggcgatgcgtttgattcgccgtcattcgccgatggcacatcgacggaacgcttttcggcaacggaaagcgacggaagggcaatggccaaacggaacagtcggatggtcaacgcattgagcaccattctgaacaaacggaaagaattgggcaccaatgtgagcgaaactgtcaatgtttttaccgcctaatggcgccatattttaggatgcttttcgagttcgaatccgatcattggaccaaatgggtacgcttttcaaacacttatttataaaattgacttttcaggcaatacgaattgctacttttcgccggttcagtgttatttctttgaggaacggtaggaaaaagtgaaccgacgatggaagagaagaaaagaattggaacagacaaaatgaaatgattgttttgggaatgagaagcgatgccctttttgtgatttgccaattaaattgcgactcaacgaattttcccgcgttaaacgcccattttttatcaattcgataatttaaacgatttcatcggtcggattggtctgtctttgctgtgctaaatccaccgcttaaaatgcgaaaatgtttcaattcgctgttttttttctttccctccatccgccgttagtcaatccatcactttttttatccaaaacaaaaacagagaaagcgatgtttgtgaggcactgattcactgtttacacttagcaaagagtgatcggaagggttaagcgatcggatgagagcaggcgaagggcggagaagtcgccctttcactgcttaaccaaagacaaatgcccgcgaccgatcaatggccgacaaagcaaagtttggccgccaaatgtgagcagtgagcacgagggattgatcagtgagtgggctgcttgctgatcttctgcttttgcagtgaatgtttcttagctgctcagcaaaggattttcgcattcatcgaatgccaaatccccgccgggctcaaatctttacgcccattgcttttgggtttggccatctgtcacttttcttccgatcacttttattgccatatttttgctgataaaagagagcaaatagctcctcattcattccactcgcttttactcattcatttttaagccaaatatttaaaatggaaaatatcgaaattacgcacgaatggagcggccaacaatgggattggcccctgcaggttggcagtggcaccaaaaaaaacactctcaaaatggcacttttcattttacagcataatgacggggtggtgaaggttcacaacactccggaaaaatgggaagttgggttggacgtggcattcttcacgccaaacgaaattgaggtgggaaacgcaacgaaaaggacaaagtgcgcattttgacaggtgaaagtggtcgcggaccatctgaacatccattgcaaagtgagcggaaaggcaaaaaaacgaaagagaaatgccaaaaagggaaatggaaaaagaaatgattaattattgtgcccttttaagcacgaggctcggagcgatgtgcacggctcagtgagtcgagagattaaccgctcgtataaattgccgaacgatgtgaacacagtgagtcagtcgatggccgtcaaaatgccgaaatgacccaatttgtgacactgtccgtacggcacattccctctcccccacagggcacaatcaaatcgcatttgactcagaacggcgttcttcgcgtctctgcgcagaaaaaatgagaggaaatggcgaaccatggaagaagagaagagacaaagtgttctgtttcacaaccaataataatcctgtttatttactttgctttttacttttgtaatttatcgccgtttcgcgaataattaaaaattgcgtccatcgcttcttcagtttaaaaaatggttacgccaaaatcatagtttattttccattacactctctttaatataagtaattcaactctctttgatggttgagtttgagtttaactttttatttttcgaaatgaaaaataaaagaaagttcattgcattttttgaaaatttttgaattcatgggattaatcccagtttaatctctttcgaaaattacaatcccggttccgagttaaatgttaattatctttcttggcactgcgcttttattttcattacattttttcattaactttttttgggctttgtgccgaagagatgtgaacaaaaattagaaaagtgcgatgggcgggcgataaataaacggagaaaagagacaaaaaaggggacaaaagaagggcggataaacgaggggataaaagtggagattaaagcggatattatcgcttgcaaaaacggcgcgtgtccttctcagtttgccgtcctttgcttctgccctttcccttctctctccgttaagcgaatgcgaaatttcgataatttcgctttgcgaatgcgaaccttcggctggcgccgccgtccgcaaaagcaaagcgttttcttaaaaaccaaaattgaaaatgcgtaactaattaaggggaggaaatgcccactcattccattggggcaattccgccgttcttttggcaaaggcaaaagcccttccccatccgttggcatttcgcttcgcaaaagcgaacgatctggcgcgtttggcaaaggcaaagtgtcgcggcgatcgcttattctccacaagttcggtagggatcagatccaaaaggactgcgcgaggctgctgaaaaaagggggaacagtgatcaggacgaaacaaagcaaaaaaaaaaaaacaatacaaaagggaaaagaagagagtgaaagtgatcagaagagagaaaagcaatgacagagataaagggaaaagaagagagtgaaagtgatcagaagagagaaaagcaatgacagagataaaagggaaaagaagagagaaaagcaatgacagagataaagggaaaagaagagag

SEQ ID NO: 5449 - DNA, 1624 bp, Heterodera glycines
gagataagggaaaaagaagagggaaaagaagggaaaagaaaagtgatcagaaaggaaaaaaaccaatgaaaagagataaaaggggaaaagaagagaatcaggagataagggaaacaaaagagtcagagataagggaaaagaagagagtgaaagtgatcagaagggagggagagaaaacgaataagagactagcaaaggaaggaaagaaaaatgttccaaaaatcatgatcataaataaattctgctaaattgtgatggcttacctcggcggatggctgctgcccctccacagaaacacaaagtgcgacgaggacagcaaagagcgtcagaaacaacggcagaagacgacacattggacgaggcgaaccaaagaatgaatgggaggaactgaaagggatgagagaaggaaaaagggagagaatgtcaaaatgggagaggaaaatgccaaaagtgaaacaaaaaaagtgccaaagagagcggaggagagattggagaaaaagaagaggaagagaaagagaaaggcaggtggaaaaagaagtgcaatcaatcataataattaagtgccatttgagtgttcgtggtaattcatttaagtgctttttgttaaaacgtcagctttagtcaactttattaattaatggcaaaatgtgtttttgggagggattggcaatgtttggcattggcggagaaaggttcaaattgccggcgggggataatccgcttttgacggaacattcgaatcggagttttaagcatcggcggacgcattaatttgctacgatgtgcagaaaataacaacaaaagtgagacagctccaaattgacttattattcccggggaaatttaaaaatgaaaaataaacaaaaaaagagaaaataaccgcaaaaaatgggaaaaatgaaaatgttggaccaaacccatcggactgagaaggaattgaagcagaatgagcacgagttcgagcagtgagtccatccgaaggaatgccaattcccccccccccccgccaatgtgccaatattcgaattttcgttgcgtcacaatattaaaaatgaaaaatgcaagggaaaaaatagcgaatgattgcgtgggtttgcccattggcaaatgaaaaaacatccaacaaaattatttccgatggtttagggtgggggggggcgagggatgctaccaaaaataggatgttggtaggagggatgtggcatggttctcttttttgagtgtttcgcttttttcgatttttattgttctctttgctaacgtcactgatttttaacaaccaaaagactgtatactataataataataataatagtaaaacaagagaatgctaacatttaaagagagtctataaacgaatatagtctacaattaaagttctgtttgaacatgagcaaaatgaatgtttaaaagcatatgagctagttgattggactcttaaaatgcgtttggactaataaaaggcgtttagattcataaagtgctttagagctaactcagcattggttccagtcaaaagaaaattcatatttgaaaattaaaaattttaaaatctattttcaatatcagtcatatccaatccatgcccacctatgtggttgatttgatgcatgcgcgctccttt

SEQ ID NO: 5450 - DNA, 2669 bp, Heterodera glycines
ttggatggacattttcccactgttgaccgtcctcaactcggtttaaaattggaactgctttcgcccgtttcgatgttttagtggacaaatattttgatggcaaaaaaagtgattttttagggttttttttaaggattttgtgcgaaaaggggcctccaatttcaaacgaattttgcttaaaagcaaaattcggttttttttgttgtaaaagtgaaccttttttttagggtttttgcttatttgctgattttttatgttagaaaatcacatacatttttaccaactccagctagacagatttattttcctttttcatgtaaaaatagtaactttttttagggttttcgttaatcatatttttgtattttataaaatatttcgttactttttcagcacatgagcaacgacgtttggatggaaattttcctttttttgaccatgctcaactcggcctcaaattggcactgctttcgcccgtttcgatgttttagtggacaaatattttgatgacaaaagcaaaatgactgtgggccacaaatcgaaaggactaacttaaatgcggtaagtatttaaagttttctcggttctaaaaatggcccgaaaaataaaaaaaaattcaaaattcgtaatgtgtgtcaggtttttttagtgtcttattgttacgtatttttggatttaatgatttttaagctggaccttacatttatatttttccattatagtcataaatttctttgtttggcaattacatggcataaaaaatttttttggtaattttgtatgtttttgcatttttaatagaaaaatttttgtttcgtgtaaaattgctcagagtttcggtcaacaaatttttgtccagccctattgcttccctttccgctaaattattaattttcataatttcagttgatgttcagcgatgtttggatgggcattttcccactttttgaccgtcctcaactcggcctcaaattggcactgatttcgccccgtttcgatgttttagtggacaaacatttcgatgggcaaacgcgaattttttcaaatttcggtaagtcttttgtttttgctttttttgtaagtgattggtttttttttgtttactttattgaagtcgtaagtttcattttttcaaattggccatgaaaatattttctatctaaaattttgattggattcggtgcttaaaaaggaatttgtaatattttttagaaatttgcgattttacttatgtttcagcatattttatctatgttttaaattattttatttgataattaaaaacggtaacaccttaagggaaacttttttctcttaaaattaaaatttttttttggaaatttgatatttttaatttagttttatggccctttttactcaattaagactaaaaatggattttctatgaacaaattttctcatttaactaacatattttttcaaattttcagttgggtttgcaatgatgtttggatggaaattttgccctgttttggccatgctcaactcggcctcaaatcgggcactgtttttgccccgttttgatttgctggtggacaaacatttcaatggtaaacgcgaattttttcaaatttcgataagcttttttgtttttactttttttgtaaaagtgattgattttttggttacttaaactaatagtgttttaatggaatttaggagccccaaacttttcttggtttcaaaaaatggatgaaaattattatttttccaaaattcattattctttttgatttttttattagagtgtcgggtttttttagggtctcgccgggacaaaatctcgccgcaaaaatttaaaaaaaattcaaaaattgaattttttcaaggaaaaaatcttagaaaaatttattataagaaaatataagaaagaaaattattgttaagtttttcttgaaaattgcgcggccaaatttggaagttccatggcataaaaaagcaattttttctaaattttgaaagtttttacttttaatagaaaacttttggttttgtgtagcagtctctaagagattttggtcaaaaacgttttgtcaaaaacttattgtaaagatttctcattcgttttttggtgcaaaagttccctttttagggtttttgcttttttgttgaaatttattagaattttcacaacagcttagcaaaggaatagtttttttaaatattgtgtgcccaaaaaacgcgctccagttttaaataggctatgaaaataaaaaaaaactttctgaattcggcgtttttttaagggccagaggctttttgctgcaaattttttaagatttataattttcatgactttttcagcacgtgcgcaatgacgtttggatggacattttcccttttttggccatgctcaactcggcctcaaattcgcactgatttcgcttcgtttcaatgcgttggtggacaaacattttcaatggcaaaagcggatgctgcgcaagttttaatttttttcaaattaaccggtcaaatgttttataagctctaaaaatttttgattgcattcggcaattaataaattcgaaaatgtaaacttttctttgttgaaaaaccttttattaaaaaaaaactagcaatttaatttttatgaaaatcaattattgtgatgttttgaaaatcttaacattgatgggctgaaaccattc

SEQ ID NO: 5451 - DNA, 3667 bp, Heterodera glycines
tctcgccgggacaaaatctcgccgcaaaaatttaaaaaaaattcaaaaattgatttttttcaaggaaaaaatcttagaaaaatttattataagaaaatataagaaagaaaattattgttaagtttttcttgaaaattgcgcggccaaatttggaagttccatgccataaaaaagcaattttttgtaaattttgaaagtttttatttttagtagaaaacttttggttttgtgtagcattctctaagagattttggtcaaaaactttttgtcaaaaacttattgctcacttttccgctatttattaattttcataatttcagttggtttgcagcgatgtttggatggacactttccctttttgaccgtcatcaactcggcctcaaattggcacttctttcgccacatttcgagcttttggtggacaaacatttcaatggcatatcgaatttgggcaagtttttttgagtttttgttgtaaaattgaatacattttttggttttttgttgtttttaaggatttaatcccaaaaatgggccttcaatatcaaagaatttttgcctaaaaacccctgaaaataaagatttctcattcgtttttttggtgtaaaagtgccctttttagggtttttgcttttttgttgaaatttattagaattttcacaacagcttagcaaaggaatagtttttttaaatattgtgtgcccaaaaaacgcgctccagttttaaataggctatgaaaataaaaaaactttctgaattcggcgttttttttttgctgcaaattttttaagatttataattttcatgactttttcagcacgtgcgcaatgacgtttggatggacattttcccttttttggccatgctcaactcggcctcaaattggcattgctttcgccacgtttcaatgcgtttgtggacaaacattttcaatggcaaaagcggatgctgcgcaagttttaaattttttcaaattaaccggtcaaatgttttataagctctaaaaatttttgattgcattctgcaattaataaatttgaaaatgtaaacatttttctttgttgaaaaaccttttattttaaaaaaactagcaatttaatttttatgaaaatcaattattgtgattttttgaaaatctcaacattgatgggctgaaaccattccatccagttaattttttgtgaaattaaaaaattctcacaggcaattgccgtttggccggttaaatctttaaaatttatctatctctgatgaactgaatagaacaaggaaaaatttttagatgtaatatatgaaaaattatggcaaagtgtatactaagtgaatagttatactaacccaaatctgaggttggttaggaataagtttcgtacactttggcacgcataagctcctaaatagaatttaagaagtctttacgcttgactgaaacttaaatgtgtacttaaaattattttataaatattattgaagtcaattgtaaagatttctgtccttatccccatttgagactcacatttatttgtttcaaaatcttatcggtctgctttgcgaccatgatgagatttttgcacgtgccggtctgcttagcgaccatggcaacatatcggtcagcttagcgaccatgatatgtagtgcaaacgccggtctgctttgcgaccatggcgaggctggtctgctttgcgaccatagccagtagtgtcggtctgctttgcgaccatgacacaatgccggtcagctttgcgaccatggcaacatatcaatctgctttaagactggtatggaaatcaagctcagacttgcactcgcctttgcgatgcatgtggctgggctgcccaatgggagcgcctttttctggccttgtatcccagctgaatgtttgcaaaaaggattgttctttgattacttagcaatgctaattgttcgaaggtcccattttgtaaacaggaggttggctacggtgggattgtcctccaatcaacagcaaagcgtctgtcgttaggagttccctgcccctggctattcagagaatggaacaaacaaagggcaatatatgtggttcgctgacatgcccttcggggcatttgtcgcaccaaagtggttcgctgacatgcccttcggggcattgtcgcaccaatgtggttcgcagactggcccttcgtggcatgagtcgcacctaagcggttcgctgacatcccttcgtggaacgtgtcgcaccaacttttggatctgcattcttaatgggatgtgtgagccctggctgatggatttcagcacaggacgactacacttcacggcgaagaatgatgtctttgatctttatttgtgcatttttgttaataaagttttaacgtctgtgtgcatttattggttaattacctcatatttttgccacatttgcaaacttttctgatttgttgtttcagatgccttctaagcaacgaaatttgcgaaaaaatgagcaagagcgttatcagcggcggacggagaaatctgtcagtcgggatacctcacccgtctcagtcgggagtgcagatgggaatggtgaggcatcagcatctctccggggcaccaccaccccaagtttaagtgctttgcaaataagcacgcctgcttcttccattggaagtaaaaaaaggggaagacccttgaaagcaggagcgaagccaattttggcaacgcaagaaactgtgtcctcaattgacacacctcgaactgctgtcacccaaagtgaccaaggttcgccgtgcaaaaaaagaggaaaggtctccgagtgtgaccaaccaacgtttgccaatgaagctattgctttgacgcctgtttcgactcaaagtcgtggagggcgtcctgccaaaaaaattagaggcccaggccgaggcagactcagtgattccatgagcaaaagctctgaaatggatatcaatcttgaaaatgcgccaattccggcaacctcgcacactgtgtctgaaaaaattgacttcagcactgtgcaaattaatttcgccacatcgcgaaattttgcctgtaaaatttggaaatgggcagcaatcggcctttacgaacgtgatggcgaaacaccgattgccccaagatctggcccaagatacattgagacctgttggaatgatatgacccagtttctcaatgacggctttgctgccacatacttggcatacttggcaaccatatcacaacgaaaagtggtcgttgttgacccaatggtatggagcaatggcctggacagagtcatgccttacaaaaatatgacatttgggtacgaccctaatgttccggcagaagttatacttttgccagtacatttccctggacattggactctcattgtccatgatgtgcaatttggcactcattttgccgattctttgcctaccacatatggcaggttggatccgcaactgacggataaaattaaaaatatcatttcggatattttgccgtcagcagtgttgacagggattgttgatgtcgaaaatctgacggtccaacacgatggtaatagttgtgggtacttcgtgtgcctgtatgctgagtcatggcttatgaacaatcgcacatttgttctgcctgatttatccatcaattatgaaaaaaagcgcattttatggcacattaacgagctatatggctctgataatgtgccatatca

SEQ ID NO: 5452 - DNA, 2049 bp, Heterodera glycines
  unsure (1)..(2049): unsure at all n locations
gaggaagcaatacaaattaaaaaataaaataaaatattttagcaatgacagcggcgtcggacttacggacagatcgggaaaagggggtttgagaagagcgaaacctaattaagaagaaaacaattaaaccattgtaattttaaagactccaaaaatgagagcacttcgacggaagagacggccaatttgagcagcggcggcggagacgaattttcattcagtggcggcacatctttggcaagtgcgacggcatcgggggaaggtggccaattcaaaacagaaaatgaattggatagtaattaaataaaagcaacgacatttcagattcaaaatttgtgccctttcgcccattcattcgttccgtttccatccacggcgtccaacagtaccacgacttggagctgatcaaatacagcgatgtgagtttcaaatttaggaacgcattataatattggtattttgacactcttaaaaaaatactactcaatttgattgaaattgatggagcctaattagtacggaacgggccaactccgtttggccaactccgtttggccaactccgtctgagccaactttgagtcaatataactcttaaagttattgactgaatcaaacaatcttgatatcattcgaaagctcttcacaggctctattagcctactaaaaattacagaaaatttcgaactataaaaaaagatagaaataaaaaactttgaaaattctgtcttttttgcggttttaaactgacaacttttttgagagctgattaatcactgagaaatagcttataaatatcttctaaacatctagggctttcgaatgataccatgattgtgaagtttggccaacaaagaaaaaagttatagctttttgaacattgctgagacggagttggccagacggagttgacccctaccgtaattagtataattattttttccacctttttaagacgcccgcccgtctcgcccttctgggcaacaccagcaaatacccaatcactttggctgaaattgttcgtcgcgtcagtcccccggagtgtctgaacacttcctttttgagtggcattctcagacggtcaaaatgccaaagaaaaagtgttttaattcaattttaaaactttttagagcaaaaaacaaagacggcgggaagcgatttcgcacggaattgcaacagtttaattgcggcgtcgatttgcagacggggagaagaaagacgggcgcaatcacaacattcaccgcactttgtgaacgtatgaaaatgaatttggaaattaaaatggaaaataaaataattaaatcgtaaaataaattaaggagaatctgttcaattggccaaagactttgacaaattggcaaaggacgaatgccatggatttcctgaaaagtaaaaaccaagaggaaataatttcgcatcaattaaaaaggcaattggctaattagttccaatttactctcagggaattggccatggaaatctgccgaagggcgggcgtcgattcgatggaaaaacaaaattgcaagcatcttatggactcttttcagaatgcgaggtgggcagacacatcgacaaattattaaacatataataataattttaaaacaattagcaaaattctgcgcgatgccatcgattttttggagagggccattgaacaggagacgggcgagttggcctcagtcactccggcacaaatggtggtccagcaaaggcagcaacagacaaacgatgccattggggccgagacggacttaatgaaccgattcaaacgctttgccagggtcagtggctaattttggtattgtcaaatgccaaatctagtcccgggcccttcccttttcagatgtcccattgctttgggaaccggggaatgttaagcgcttggcaatgtttgttggggtgcgtttttctctaattaattaattagttagttttttaattgtttatttttgaagtgtccttaacaattgcgaattttccctccaccaacaaanttgccacaatccntntgaccgaaatcgagcaacaaaagcctttgacatctgcc

SEQ ID NO: 5453 - DNA, 3732 bp, Heterodera glycines
ttgaaacttttccgcaggtcaatccgacgggggatgataaggccccgctttttaacagtaattaatttttttaggaccagcgaggcgcgggcagttcacattggatgttgccttaatttgcttttaatttttaattttttaaatttaatttttattcgtctgtttccatcctttttgattggatgcgacaactaaaaatgggttgagaatgagctttcattttatcatcggtcataattgttttttttaaatttattattatgcgaataaaatgtaattaaaagtaacaaaaattaaaaagtttaatttctgcgtaagagcccagcaaaaatattcatggagtttatgtaaatagtaaatattatttatatttaatattaattttttacttttcgaattttaaattattttgtcgctttgtttttctaattttccgtttcctcaattttagtatttatttgcttccataattccccaacgaaagaattcttttccatgtcaatgaaaatggcaaattttgttgtccttttttgcccctccgtcgtccctttctttctttttttgtctctttaaaaatgcaattctgtcaagcacaaatctgtgccaacgccgtcaaatgccgtcccggaaagatgggacatcattcccttgggggaattacggaggcaaagggcacacatcgccggaggggcgggcggcacagagtttggcccaaaaaggcagcagagatttctcgcctcacccctcgaccagttccatctgtgccattcgctgttccaaaaatattttttgtcttcatttgaaataatttgttgataaaagcgttttatatattcttgaatttatttatttaaaactaaaattttaggccaaaaaaacaacgactaattaacctcaaatttattgctatggccgagaagaaaaatggcattagccacgaatgctgtggtgaatgataattaaaaaataataattttcatttattttgatcttttttcattttcagtatcaaataattcatcagatgttaatgctaattgtaagccaaatcaccaatccgttgcacaacgcgtgcctcaacagctgcttttccaccatccctcgccttatttgcgtagggttaaactgccacgacttcatctcacagtaccactcaaaaaagtaccattttaaaaatcataaagtttaattgcggttacggtatgcatgactcattcctttcctgcccaattagacaaatgaatcgtcccatttatccgtttatattataaattatttttttggctttatccgccctttaaaataatttttttgttttcagtgttattcgccctgtgaatttgacgatgatttgccttctcccgacgaattatctgctcgagtggaattcattaatttaaaaaatgcccaaatcagacaacagttggtcagtggtgttaatagtttttttttaaattttaattttcagaaaaatagggccaatgaaattaaaaaagttgcagaacaaccaaagccggcacaaatacggttggtcggcattaaaaaattaaaatgaaattttataaaatttaataatttaagcgcttttttatgcccatcaatggctgaaattggaaattgcgattgaacaaatacacgaggaaaaccaatgaaaagcaggcactgttttgctgactaattgcaattttaaagtaattaaattcttaattaccgactatgttcttacacttttaccaaaacaacaagagaccgggggaatcgatcttttatgtatgttttctactcacttatttgttagttgaaatttaataatttagatgcaaaaattgaaaaaaattattttgtacgattaaaattgacatttttattggctttgccgatcggaatcaaaaatcacttggacaaaatcacgctcattcaactcattcattgattcaaaagtgtgtgaaatggcatatgtattgtaaatcaaagaaatgtgagaaacattttcgggtgaatttgtagcgtaattaattaattaatggggcgaaagtttacacaaaaatggaggggaaaagaaagagcagcgaaatgaatgaatggatgataaaagttgtgaaagaaaaactaaataaatgcccggttttcgttgtccatttgtaaccacagattgtgtctaatgagaaaaatgattaggaaatgcggaattgacgcgatttatgaagacaaaatactggtcaaaatggtcaattggccgacaatcatttggacttaattatgctcaaagtgccaaaaagtgtttgtggtccatcatcggttcatcagctgtgcactgacaagttggagctgttcgttcagctccatcccggaatggccgtgctgctgctgctgttgtttcattgccatggaaccgcggaggccgagcagtccgtccaccgcggcactgcaaaaggccaaaaatagctttgccgctaattgctacacccacctatcgttggactgaactgccctcagcaatccgttgaaggagttcatttggtgttgctgctgcgcgtgtgccattggcgaagtgttatccccggcacaacactggtccatgttcgtctgctgctgatgcatttgctgctgttgcgatcgttgaaaatggcgcgtgccgttgccgccgacccctccggcgacgcttggcctccccaaacccaacggtcgggtgggcgaagaggactgaaaaggacgaaaactcgaaaggcaagcaaatgccaactgatcgatcactcatttatcagttctattattagtaaatgtttaaaaatgaaccatcgcattggaattcttgtcgaattaataattttttataaatgccaatttcaatttataaatttgattgattaaaaaaagcccccttagccaccagcttccccccatgactacgccttggctgcttttgccgttccccgctttttctctgcgcttcgacctgttgctgttgttgctgccgccgctgttcgtccgccgttagttgtgcagcggccgcttgtgccatctcctgctgttgctgctgcggttgtttcagtgccaaatgcgtcgtccgctccctcgccgtgccgcacagcgccgcgtcgccgtatccgccggccgcgcccactaagccgcccaaaacggcggcactcatcgccatgctgcccatggaatgcctttccctgttcatatgcgttgcctcgtgccccaattgctgagaccgttgccgctaaaatgacattttaacgggatttgggtgggataaaggcgattaattggcggaaggaatgcgtgtcaaatggcactcacaaattgacgcccacaatattggcacgtgaacggcttaaggccggtgtgaattcgctcgtgctggtccaaatggctctgcaacaacaattaatgaaatgggacggattgcgttttttgaccttttgcgtaaatcgtttggggcaatagcgacaatggtaagggcgatcattgatgtgaatttctaaaagaatacgacttttgcggttgaaaaatgtgcaaagcgattaaggaacacccaaaaatgaattccgccgaaaattaaaaaaaattaataaaataaaatttgaatacgcaatatcaaatgccgtttcccccccccccccccaaatttgactacgagtcgagcacaaatgaaaaagctgatcaatttgtataattgatctgttccccaatgggcaaatgtgatcaaactctgatcacgtagga

SEQ ID NO: 5454 - DNA, 642 bp, Heterodera glycines
atcataagtagggatgggatttttagtgataaaaaataccaaaataattaactaaatagtgaccaaaaaatgccaaaatagtggcaaaaatagtggcgaaaaagttccaaatttaggggtgtaattttttaaatagctatttttaatttgaaaataatttaaaattaaggaaaaagattttattcactgattgcagttacaaaatattttcgtagcaaatattgaacaggaaaaaaaaatttgggggaagaatttttgcgaaatttttccaattcttaggggtgtatttttgaaaatttttaggtcgattcttaggggtgtatttttgaaaattttttaggtcgattcttagaggtttatttttcgtttttattacaattttgggaagtttttcaaaaatgccaaaatagtggcaaaaataatgacgaaacgccaaaatagtggcaaaaaattattttagtggccaacttccgaaatagttttttttagtggcaaagctccaaaatagtgattcctagtgatgaatagtggcactaaaaatgaaaaattttcgaaaaagaatgtgtttttcgtgcatttctcgtcgagttaaagccgcagaaaaaatagttaaaaaactaagaatcccatccctaatcataa

SEQ ID NO: 5455 - DNA, 5626 bp, Heterodera glycines
  unsure (1)..(5626): unsure at all n locations
atggtggcgcatcatcgagtgggtcttttaattattttagcaaatgtcgccttttttcccncgctttaaaaattcccattaaaaatgcgcttaatttgtatccctttcaaaagttgtgccatcgcaactttcgccttggcatccgatttcctcttctttgtccgtccaacaaccgcaccaatgttcgtgccgcatttgtccaattggtattcccttcgatgacaacaaaagcggcggtgacgacgacaacggaaaagtcaaaggaaaatgggacaaaaaacactgtccaaacgacgattatcgaaggcgaaaatgaaacaacggcaactgcgagagcgacgacggcattttccacaacaatggcacaagctatgaagataattgggggaatgaaaagcacagaaaacgcagcggcgatgagtcagcggacgactgcgcattatgcgctgcccacaccaccgccgtacagccccgagcagaacatcgccacgggtatgtagagcaacacttttgctacaaagagtgctattgggaacaatgccattcgggggtggggagaggacatttcttaataaaaaaatggacttttcgggtcttccccaccccaatattgcactttctgatcaaaggctcaactttgactgattagctcaatgatataggcgcaaatgtcatgtaaacgtgcaaaacaatggtcattttcagcgggtgagctgattgtgcggctgaatccgtgcccgcatggtcagccgttggtcaacgaattccgcaatccgatcacttgcaatttcgtggttcagccgaatggggcatgcccttcggactattggtgccatactggcgagtcaattaataaaagcacttagaataattgcccaaataattgcctaattaaaggcgcctcttatgagacgaccacctgctgtcccatcggccaattgagtttgtgcaattcacaatttgttgtataaaaatgccaaatttttcagaggaccgttgtcagttgccgcgtgccaatggcgaggggggttcgctgattccgcggtggtatttcgacagcgggtgagttcattttgagggctaaatctgaatatttaaattcacaatttaattatttttatttgttttattctttcattttgacagtgatcgcaaatgcaaaaggtttctttacacgggaatgcgcggaaatgccaacaattttgtgaccgtaatggaatgcatggagagctgtgaaattggtgagagaagcaacagaaaatcttttaaatgtttaaggcttcttcttttagctgctaatgctgcggttgtgcgaaatccctgcgccggtggtcctccggcgcgtgacctcaacggggaacagtttctatgcggctcttccgattcgcggtgccctgcggggtattactgccatttgggcaacaatccgttgaccaatgtgtgctgtgagctatcatcggcaggtagtatttaacaataatatttatttttttactcctctctctctctctgtgcctcccacttctcctctgttctctcttccctcggttccttccccctctctctcttttcctctctctttcttttctctcggttccccctcgcccctttgctctttctcttcccttcgcccctccatcccctctgatctctctctctctctctctctcttttccatgttccctccctctttctaagcttccgatcggtgccatttggcacttcgtccgggcgaaggttcggctcatcttcggcgcttttacttcaacactttgacccgtcgctgtgttcagttcgtttacagaggcgcaaaaggcaacgaaaatcaattcgcttctttggtcgaatgtcgcaaggaatgcgaaagtgaaacgatcagattttgctaacaaatgagcaattaatttattgagtttttgtttttgccaggacctcccaatccttgtccgacttcgtttgattttgcaatgcgaaaggaatgccgaagtgacagcgacggatgtgacaagggcgagtggtgccatttggggtcgagccgggagacgaccgcgtgctgccccgggggtaaaaggaccgaccgaggcaaaaccgattaactaattaattgaccaattagccgccgacgacccgtgcaaattgccacttgaccttggccagggattggaaaatttgacgcgatggtcatccaaatagctcggtttatttaactgttattttcaggtatgccattcccgcggaggattcgtgccaacgcgagtgccgtccctttcagtacaaaggtgggccaatgagaaaatgcgtgccaaagttggcacaatctgttcgacatttcagggatgaaaggcaatcagaataattttcggacaaaggcgagctgtgaagcgaattgcaaaggtgcgtttggggttggcattggaacggaacccatttttaaattagtttttaaccattttttaacttttctatgctttccctccccctcccccctttagccgactgtcccctcaccctcaacccgtgcgctgacgaggagccgttgttggatcccgaggggcgaccgcagcggtgcaatgggacgggggagcagtgcccggcggactattggtgccatgtcggagcgaacgcggagaccaccgtttgctgcagcggaggtgggaaaagctcgaaagcacgagaaaacaatggttgttcatttgtgcagccactcgcgtgtgcgcacttccgctggccgaaggcgtcggccacgctttgctgtcgcggtggtatttcagcgccaaagacggaaattgccaccgctttatttacaagggcatcggtggcaatcaggtgatggtgattagaagggggacgacacaatttggcatttgataaatcccttacggggataactgatagcttaaccctccatgcgcataatattctacccctctgtagaacaactacgtggactacgagcagtgcatgaacgcgtgtcccgatggcactttgtcttccgtctcttaccctcccccctcaacgtcccctcttccatcgccgcgtccttcgtcgtcccttcagccttcgtctcttctctcactctctccgtctccccctccgccgtcggtcaatccctgcggcattggcactccgttaacagacagcgaaggacaaaagccgcgcgaatgttctcctaatagccgttgtcccatttcacacttttgccatatcggtggcgaccctttggcattgccaaatgtttgctgtccgaaaagtgaggcccaaaaatactaaataattaaagtgatcagcagaccaaaatttgggtgggaaattgatagatttcaaaaataatccgttcacaaatcattgtttgggcgacgagctcaagacttactgatgatattatgatatccatgttttaaataatcagcagatggcgacccgtgtgaacagcctttggctgaaggcattggccaattcaaattgacgcgtttccatttcgacgcttcttcgaggcgatgccgcgctttcgtttaccgtggcctccggggaaatgccaacaattttctgttagcggaagactgtgaattggtgtgccaagctgagccaagtgggtgtatgccattgctatatattttcacaaaatgccaatgcttttcagcgatgccgtcgttccgtgtgaatccgtgcccacggggaattccgttgacggacgaccaaaatgagccattagtttgcggcaacagtttggccgcgccggacctcgcacagtttggtcccctgacagccgcgcatcagaatcaattggagacggggtgcccaaggtggaggagggatcagatttgagaccgatggtcccgagggaagcgggtttatggcataattggtggacttttgccgatgggaacctaatcacggccaattaacagtgactaattgctttttgagtggtttctggtgccatgttggctcttctccggacacgaccaactgctgccctcagcttgcggatggtaataattaaggcgacgtcttaccatttttttcattcgtgtcattttccccgaaaggtggcaaaagaccgtgcgatcttccgttggaatacggtataccgatggaaatgggttacggtggccaatcacttctcaaattctttccttttgccttaggcactggcgaacagaaattggacaggtggtacttcgacgtcgattcgcaaatgtgtcggcatttccgctactccggtgggtttttcgcttttttggtcatttccttcatttttctttcaccaaaggaatcaaaggcaatgcgaataatttcgtgtcgcgcgaccattgccagcagaagtgcccttccgacccggtcaatttcggcactgacagcgaccatcagcagcagcagagacagcgcacttcgccgccgccctttgcggtcggtcgctcgcggttttcgtcctcctctcctctcccctccttctcctcctttccatcaacctcaagtccgactccaacaacaaactcattgtcagcagttgtgccacttcttccaaatccgtgcctttttggcgatttgttgcgggacgaagacggaaatgtgctaaaatgtaagcaaaacgaagacaagggatgtccagaggacactcacttttgccacgtcggccaccgcctcactcaaagcggctgctgtccccggacaacgacaacaacaggtgaaacaatgtgcaaaacggcacacattaaatgctctttcgtctataattttggtcagacccgtgtttgttgcccgtcagtcgcggcattggcacagtcgcgcacattcggtggcatttcaacgccaacacaaaacactgtgaggcgtttgactacgcgggacaaaagggcaacgagaacaattttatgacgaaaagacaatgcgaggaacaatgcgaccagcagaaaaagccgcagaaaaagaaaagtggggaaattaaatggaaaaaacactcaatgtttttctttagttaatttttgcccgcacggagagccgaaatgggagagaaaggcatggggacatgggcagaaaaagccgcaaaagtgtgggccaaacaacgaatgccccgagggattcgtgtgccatttgaacagtgacattggcatggcattgtgttgtgaggtgattttgatgatggagaatgcgtcggcacatcctcttttcagaacccggcacatttttgtctgcagtcgcgcgagcgcggcccctgcggcgcgagggaattgcgctacgggtacaatccgctgacggacacatgcgtacagtttcactacggcggctgcggggggacgctgaacaatttcgaaagcatcgatcggtgcagggaaatttgttgtcggcaataccaaagaaggaattgaaagggaaacgaactcaattcaaaggacacattttacacattgcttttggggaagtgagagagaaacgctcggattcctcggggactttttcatttctcgacgaatttcgcatatctccgaaatgtacatttatttattttttccaaattgcttattacctactattgcaggttcatcatgaaataaaaattggcaaagtgaatggataaaattgtgaaagatgtaagaaaacatgcaaaaagaaatgtatgtggtaa

SEQ ID NO: 5456 - DNA, 2084 bp, Heterodera glycines
  unsure (1)..(2084): unsure at all n locations
acagtgactattgcttttgagtgtttctggtgccatgtggctcttctccggacacgaccaactgctgccntcagctgcnggatggtaataattaaggcgacgtcttanccatttttttcattcgtgtcattttccccgaaaggtggcaaaagaccgtgcgatcttccgttggaatacggtataccgatggaaatgggttacggtggccaatcacttctcaaattctttccttttgccttaggcactggcgaacagaaattggacaggtggtacttcgacgtcgattcgcaaatgtgtcggcatttccgctactccggtgggtttttcgcttttttggtcatttcctttatttttctttcatcaaaggaatcaaaggcaatgcgaataatttcgtgtcgcgcgaccattgccagcagaagtgcccttccgacccggtcaatttcggcactgacagcgaccatcagcagcagcagagacagcgcacttcgccgccgccctttgcggtcggtcgctcgcggttttcgtcctcctctcctctcccctccttctcctttccatcaacctcaagtccgactccaacaacaacaaactcattgtcagcagttgtgccacttcttccaaatccgtgcctttttggcgatttgttgcgggacgaagacggaaatgtgctaaaatgtgagcaaaacgaagacaagggatgtccagaggacactcacttttgccacgtcggccaccgcctcactcagagcggctgctgtccccggacaacgacaacaacaggtgaaacaatgtgcaaaacggcacacattaaatgctctttcgtctataattttggtcagacccgtgtttgttgcccgtcagtcgcggcattggcacagtcgcgcacattcggtggcatttcaatgccaacacaaaacactgtgaggcgtttgactacgcgggacaaaagggcaacgagaacaattttatgacgaaaagacaatgcgaggaacaatgcgaccaacagaaaaagccgcagaaaaagaaaagtggggaaattaaatggaaaaacactcaatgtttttctttagttaatttttgcccgcacggagagccgaaatgggagagaaaagcatggggacatgggcggaaaaagccgcaaaagtgtgggccaaacaacgaatgccccgagggattcgtgtgccatttgaacagtgacattggcatggcattgtgttgtgaggtgattttgatgatggagaatgcgtcggcacatcctcttttcagaacccggcacatttttgtctgcagtcgcgcgagcgcggcccctgcggcgcgagggaattgcgctacgggtacaatccgctgacggacacatgcgtacagtttcactacggcggctgcggggggacgctgaacaatttcgaaagcatcgatcggtgcagggaaatttgttgtcggcaataccaaagaaggaattgaaagggaaacgaactcaattcaaaggacacattttacacattgcttttggggaagtgagagagaaacgctcggattcctcggggactttttcattctcggcgaattttgcatatctccgaaatgtacatttatttattttttccaaattgcttattacctactattgcatgttcatcatgaaataaaaattggcaaagtgaatggataaaattgtgaagtatgtaagaaaacattgcaaaaataaatgtatgtggtaacatcatcagaaagggagaaaggacgacaataaaaaaccctttctaccaatgtccgaacaaaatgtcctttcgctttgcgtagccccgattccgttggacggcctcctcataatggcgaatggacaacgctttcgacgtgcgatcgtccgttcgtttttccatagttcgatggttctcttcgtcgcggcaaaacaccgcactctccgtaataatcgcctgaaattgtaagttttttcggagaaacctgttaaaagttcactcaattcttgaaaaactttttcgccaaaatcgaaaaagcactggcaaagatgggaaaattttacgaaattgaaaaaaaaaaaagaaaattttgtgccaaagactcaa

SEQ ID NO: 5457 - DNA, 1378 bp, Heterodera glycines
atgatcaatgagtgatcaggaaagaaacaaggttgctcttaattgtctgtggggtgataatagtgtcattaattgttacggaattggtgatcaaattgtgcgttaattattcgccagaggggtaaaaatgttaccggaaaataccgattttgtgatctgaagagaattgtcggagaaaaatatttttcttatcagaacactgctctaatgttatgataatcaccttgaaaatcagaatgttatcagatcagcgtcgagttgatggtaaaattgagttgggaaatagatcaggaatttggctgagcatttgatcaattagcgattgaaaatattattaacattgcatgtgacatgtttaatgataattttgattatcgtaattaggcaaagccaaatcatccattttttgcagatcatttaccaatcaaacaatgtccgctatgttctgctaaacttgatcagccatatgagcaagagttggagaagcatattgcagaggtaattttggcacttcaatgcatttattacttattaattgcctttaaagacacacaataattaattaatgaattaattacttagtttaataattgcttttaaagacattttcattaattaatttaataaaatgttgtaatttaaacccatcaattaatttgctttttgtttaaaggaacacaaaattcctgccaacattgtccaacgactgatcaaaacggaaattgatgaccaacacaatcaagcaataatagatcaagaagaacatcaacaacaacaaaagtcgccaagtgtcggccatccaaacaggtaattaatatgtatatattattattaattagcacaaagccaatatataattttaaaaaaaaacttgttaattggctaactcaatcattcattttccttcagctttttgtcactctccatttgatcaaaaaatttctttatccaaacgcttaatctgatcagatcaataatgatcgatcgataatttaaaatatttcaatccgtctttttttatttgactactggtcagaatttcgagctttgattttatgtctttatcgttttttcatcggatacagtgactaattagttccctaccgtatgccttttctaattgtaatcagtttgcttaaacccattcttcttttcccaccaaaattttgatcaaattcctccactttccacactaattagcataaactatttattgatccggcggatgtcgtcgttgttgttgctgttgtttgctgttgatcaggccactccgaacactttgctcacaccaaatttgtccctctcccccccccccccccactatttcccaaggacacattttgtctcccctcccaccccaaatttctcccactggccc

SEQ ID NO: 5458 - DNA, 6434 bp, Heterodera glycines
cgacaccggcagaatggctgagatggagcaggcgagtttggagtggcgtgggagggggtaattttcccagaaatcatttgaattttaaacattttagaggctggaagagcaaaaagaaaacgacaattttttggagcattcggatggtgaaaatgaagatgacgctgtcactgactctcctcagtgatcaaatcatgttctctttgctaacatccatcaaacactctcagaatagtatcacttcatcatcatctatataattgttgatagcaacgtgtagtattgtcgacgtctacacaattccgcgccatcgcgcggggcctctctctgcggttgtccccctcccacccctcacccccccccccctgatgccctgacaaaaacagaggaattggcccaaaattattttgttggtagggcaccattttggggtgggggggggaagggtgtacgaaaatcacattaatattaatgagagagggaggggagggagagggaattatgtgggatccatccgaatcatcatcatcatcatcattgggacatggccggcagcaggggacacaacaaattattatttgtgtattatttttggccaggggatttggtgtaccgtggcgctgtcagcatttagtggacagaggggggattaaaagattaaaactgtaacaattactataactttaattaaaattaattaatatatgctctaattataaaattgactttcggtttgtgttaagttttttgagcatacaaatagtctctctctctttctctctctctctctctttttctctctcttctctcggtatctctctctctcccttttcctctatcactcacttcctttcattctctctctctctcttcctctctctctctctctagtcctctctctatcttctgtctctctttctctctttatctccgctctctttctctctttaattataatgaataatttactctctcctgttaattacgtacgactcgtagagccgcatcacttatgccgttaatgaggtgttgttgcccaacagcgacggctagcaacaagcattatcgttgagcgcgccgcttaattatcttaatgaattgctgcgccgtcagctgtcattaaggaaaggcactttcaatgggttttttaaatggccacatttggcttttcatgcttgagaaatgcaaaatgagtttgtctcttgcatcataaaattgaaaatttcaattttaaaattatatttatagcttaaagtattagcatgaccattctttagaacttttattaattttttcgtacacccaaaatttaattttgtagcaaatcaaatcaattgaacatcagtttattaaaaaatttggtgcacaaattttttattccaaatatgaattcaatgattttcatacctattttttaaattttttaaagagtaggaggcgtcgccgtgaaaaattggaaaatttggcactaattctttaagcgatttttgcaccaataattgctattcattatgaatttttgatcaaaattctaaagaattgagtgtgaaatagcaaacccttggcaaaaaaaatcggactcatgcaaaaaatacagcaaaaacccgaaactaaccccaaaaacctaacaaatgccggattctccaggcaacatccatggaatcaatacatatttgaaccctggtggatttaagccggttttaatctttaaattgccgtataaaatttgcaattatttttgcaaattaaaaaaagccataaagcattcattattttctgctctttacatggccaatttactcttccttttttgggggcggtgggccgaaaaaatgaatcagcgcagcgccaagcacaaatacacacacacacaagcccatatataaatttcgcaccgttcattcaattcattaattctctctgaatcatccattccccccccccccccccccattaatgactttttcggggggggggcgcttaaatgagcactttttaaatcactaatttgccaaattttcctctttaaaatagtgtgttcgctctctcttttctgtgtcgatggattaattaattagtcttaattaattactcaaacgagcactttaaatcactcatttagccattttcctctttaaaatattttttccgtgttgattaattatttaattaattagagttccgagagcaatgaaaatatattgaaatttgggggaattaaaatttactagggagaggatttgttgctttaaatcatttttctttgcatctattttggcatttacccccttccagcactatgtaatgttgacatttttgccctaaaattccagggttttcggcactttacctcatcctggcatttaaaattttttgtcctttgttctccttaaattttgattattttcgatctttcgttctgtctggaattcaagcttttggcacagtcattgctttaaatttcacaaattctggcatttcccccacaaatgtgtgcctgaaaatcttccgcaatttggaattattatcccatacattttcataaattttataaattaattttcccgcaaaagttttaaattttctatattttagcccctccggtgacgacggcatgctgaacaacatcatcgcagccctggccaataatcccacgactccgccaagcagttcgacagcaccggcaacggcggtagatgatccaacagcatcatcatcatccaacaattttggtgcccaactgttgccaatctttccgcaccaatgccggcactgttccatcgcttttcgtaccgcggaacatctgcaggtggtcgtcgctgtccaaaaacactcttttgagtcccggactgaatttggaatgtttgcgcacttttatcttgtccaatcaatctcgaactcagtcccgaattaaatgctggatttacccgcccccaaataaaaagtttaaaaatttttcagaaaaataggcaaatttcaaaaaaattttttgaaattttcttaacaattgcatcgaaaacgagttcctgctttttctccccggcgctgaaattttgtaaatatcactgtaaaataaaactttggaatttttggctcaaatagcacaaaaaaggtcttcagattccactttccgaaatctttttttatgtatacgggccctgtggtcccgagattaacctcgtaccatctctaacggctcttaacattatcgcttcgattctccgtcccctggggtgtcaattatccgcctaaagccaaatttctgcaattgacactactagccgtgatgtagggtcgtaggcctccggagatttatcacagtgccaaaactgatcaattttttccaggcccacgcattggcccattcgccggccaaatttcgcctttggcaccgctgcgatgcgcctccatgcgccaccggcggcacagattccgacgcggctggcacaagtgccgacaacatcgcggaccaacaaacgacgacggcatcggcacttttccccacaaaacgggccctggagcggcatcagcggacaacggcacacgccggaggcgacgacggcaccgccggcggtggcggccatttttgcgacatttgcgcggacgggcaacgctttgcgtccgacaccgcattgatggcacacttcaacacggagcagcacttggtgaaggcacgcggtggcagtggcggcggcgcacaaaacggggtgggtatactataataattgggcgatacgtgccattcatatattgtaaaaagaacttgatgttacgagacagaggggttggaatgctttaataatgcaatggcatttttatttggcatagttcattataatattttagcaagattagcaccaagaaaactaaatttctatgcgatgcttactgtaattttgattatacggtaatctcacaaaacttgctccacaagaagatatatgtgtatttttggatgggactaaaatttggtgaagtttaattgtgcctttgtaatctcgttttccaattccatttccaattcgggataaaaccagggaactaaagatagccaaaaatcaaaaaacgggcaaaattttctatggcatttttttatctcgaatctcggtttgatggctttcttatcaagatcactacgggtgcactaatccccccgccgacaataaatttgagttttttctttttctaaatttcttaagtagaagttttttcttttttttaattttcaaaattcaactttttgagaaaagaattcatttttatgaatttctccgagggggtggggaaactagctgatctcagatcacttcaatcagctttcagtctcgactctcgagatttgtgctcgagcaaaaggtcccattaacgatttcccagtccaattaatgccgtaaattttttcaaaaaaaaaaatttttttttttgaaatttaagccttccaacgctcccggctcagtcccctcctgctcatccgcctcatccgcttctccatgctcatcatcgttcacttccaaagcggtgaagaggccatcctcctcctcgtcctcatccggcaaacatttgccatacacgtgcaatgtgtgtgcccaatcgtttggccaacccggcacattggacacccatttgaggtgggcggcagtggagattaattaaaatttcatagatttttaatttttgtggactataaaaattttaaaaaaacattggcttaatagacttggactcagtcttaaaaaatattttggtttttttttaatttaaaatttttaaatatttttattatagaaaaagagtgcgaaaaggtgactaccaaactgttaaaaaaagttttttattgctttttgtatggtcgaaagttcgtattttaaaaattgcccaaaatgccaaaaaaaaaattgacataatatgaaaaaaaatgtgccagatccctgtaagaatccaaaaatatacaaaaagcttggatttttttaaatttcttaacagctgtactgaaattgataaaaaatgtgttacaaaaattgaaagtgaacattaagtggcacgatctaaaatgccaaaaattcaaaaatttgaaattttgcctaaaccaaaaaatgccaccatttttccccttggtaaggtcaatggcacatgcccaacgcatgtgccggctggctgaccttgtgcagagcggcgatgtggagccaacaaagccggtttttgagcagccgggccaccatccgccgcagcgaaccatcggcgaagtggcggccgagcgcaaaacgaaggtgggccagtgaaattttacaagaaaatttcaacaaaaaatttttgtaaaaatttgtttcaccgatattttggaaaattcttttgaaaaaaaccataatttttgaaaaaattgattggaaaattttcgagaatttttttctttgcaattttctgctataaaaaaaatcaatgaatttaaaaaccaattttttttttttctgttttgtgactatcacttaaagcattcaaaaaaaaaaagttgcaataaattttcttttaattttttttaggaaattttgagtgaatcccaaaaattattatttctttttgtgagtgtttaattaaggaagagattactacatatctatttcggcatttcaattgggctttatttactattattagaatttttttgtttttgaatttgaatttcattttttcgcgcactcatccgtgccgcaaggcttaattcatcattcataatttcataatcattcatcatcatcgtccatcatcattattatccctaattcccccgtttccattctcagtcaattcggggggatttgggcgggggccgggggattgatgattatgatttatgatgaatgaatggctttttccggcggggatgaacacaatgaatgaatggatgcgattgggggacgattaatgggaggaccgaccaatttgggcgggaaaataatgcccgcggcgatggcggatgatttgaggaaaatggagagaaaaaaaacctgccagcaggtgatggagatcggccagctgctggggctgacttattgtgcccattcattgtatgtatgctggcggcgcggaattccggctggcagaaattgccggcggcggcgcaaaattttgggggcggcacttttccgttttgccgcccaccactgaattttgccattaaaatttctgttttttcgggcataatgccaaaaattgggcaaaaaaaaacgaatgcttttgtgattatgccgaatggaaaattcgactcttagcagaattgatcggtcactttttggttttcgattacaattgtgtgtgcgttttgaccccaccccgttttcagtcccatcccatttcagctccgtcccatacagtccctccccgttttttgttcagttttctaacctatacgcttcgcacgcacacacacactttaccta

SEQ ID NO: 5459 - DNA, 1424 bp, Heterodera glycines
ggagtggggcgggggtcgggagcaatgagtatgtattattattattatcctaataataataatatacacttatgtagatgaaacggagccgcaaatggtgggtgctgcacgcctcgcgccggagggcgaaatccatttcccccccccccttcccctgaggggagtaaattgtgtttttattgttcctcgtccccgcggggggcatgggcacccgccacgccccagaaatgtgatgagtgtgaaaggcaaataatgatgaggggaggggggcagggggtaaataaataaataaataattgagagaaggttggagaggtgagtttgggggaggggagaaattggaaattgagaaattcgaggggctccgggggccgggcaattttctcattcaaaattcaaaattcatcccccaagggctcatctcatttcatccatttcccactccccgcctccctattattctcccaccgtggcgccgccaaattgtgtgctgcacaaacattgtgctgctccatccctgcccccaggggcaacatttttgttaatgttgccatttgtctaaattttcgtttcgttcgcttcctaccgtttcttgccccagccatgtgatgtgccatatggtctctcctctgaggcgccattctgtgccaaaaaaaattttttttttgcctattcgtaggtatgtttgaaatttctcggagtttgcatcttcattctagggaagtctcggtttttttttgtagggtctcgagtctcagagtcaattctccgttctcaagcctcgggaaacttttggtctcgaacatccactaattaaccgtttcgggtagttctgctgctttataatcaacaaaatgttttgtttattgcttttcctgcccacccccccccccgcccctctctagagtcttggaattctttggctctgaaaaattcttccaaatctctccaaaggatgcttcctatccttcggcttcttcgattgtcttgagttttcccaggctctctttttataatttcagaatgccaataattggcttaatttgccttttcggcatttttcagtagcgagccattcaaaaattttgaaagtcctccgagaagcaaaagtcaaacacaactctcgacttgcctttcttgacaaatttgggatcacttgtcaccggcggtggagtaatttcattatcgcgtcggcgctgctcaacaaccacttaactcaccctcaaaattgccgtcaaaatctcactcattctcctttctctgttacccattgtttacgtgtccccccaaattgacacctccggggtcgtcggggcaactcacttccccccgggggcgacagcggcgatttgcggcgccttacaattgttccccgccgcccacccccgcgggggaagtcggtttcatttcgcacccctttctcc

SEQ ID NO: 5460 - DNA, 4960 bp, Heterodera glycines
ctacgccatagcacacgcacaaccacatgaatttgcatttaacttgtatttgcacctgcagttgcaaagaaacacacttgcacctgtacctggacacacccacacatacctgcctagacccaaaacgcgtgcacatacacttttcacctaatcttgtgtctgccctgcaccgaaaacacgcacacatttgcacttaacaaccacctgcacctacactttcaggcacatcacatgcactttgcaccaaaattttaacaacaccagacactcacgcatgcacacacacacacgcacgcacacacatacccacgtacgcacggccgcatgcacctacgcacatacacgcacacacatgcacatctaaatgtaaatgcgcatacacacatgcacgtgcacgcataagcacattaacactatcactcatacacaaacacatgctcactcacaagccccatcacaacacctacaaatcattaagatataggggccgcttgttattttgatcattcattcgcaatctgatcatcttctgatcattctgatcactcattctcactctgatcatttcacactaactagtgatcacttactttttctctttgatcatttattagttcccaatcactatctgacctctaactcttactctgatcattttctgatctacttactctctgataacactcactcacaccgatctctctgtgtctctctttgatcacacactcattcctaatcactcactcgtcccttatcacacgatcactcacaccacttacttgatcatttcataaacaccacttccaagcatccgtagacatctactcattttagagcattcttagcaatgatttttcaccattttcactgcttgatcatgagattaattcctaaactctcatttttaatcaccaatcaacaattaattttctgttttacctccacatttataattaaattattaattaatattttaattatcattttatttattatttttaaatttaaatttatattcatacattcacgaccacttccatcttttaaagtataaccaattacaatgccggttgcaaccgaaccaagtattattggagttagaacaattgccgaaataattgcaatagccgcaagagtccccagataaattccattaaatctaggtgtatttctttagccgtattataattgtcatcaccactcagtaataaagaaagtgtacgataaaaacaatttccatcgccaacaattgaacaaacttttccttttacagcattaaaatatgaacttattaaataattttctgtttaatatttacatgggccatatttatgtggattaattaatttgttttgaccaaaattgaattttggttcaacttaaatgaaatgtttttgtattattacataatattatttttattttatatttaaagcttatatttcattttatcatactaataattctatttatatttattttcttatttattacaataattataatcccatttattacaaaacatttgcattgcgtgaaaattcattgggttaaataaaataggaaaacttttagtaccttaaataaaattttgaaagaatttaaaaagtacttgcttgtttctaaataagtaatttcttcttcatcgtcactgctcttttctcgaacagaaatacttttctgtgattgtgtctgtgaataaattcagaaacaatttgttgtaaataatgtacaaaattactaaccgttctatgtttgataacgtaaggatcgctttttaatataaattatacaacaaatagttttttagtaaaaccttttcatagaagagtgaaaaccttcatcagcatttattcctcttgttctcacaagacgattaaaattccataaaagatatctttccagtgtagatttgcttaggttttgagatgattcattattaattttttgaagtaattcatttattgttcggatttctcttttttcatatttatttaaaagatttttaattatattgtcattgataaaagagtcaaaggaagaagcacggcttacaccagtaatgtaatcgtaaatccgatttttaaaaagaaatttgaataaaataaataatatacaatatacggcttttgatggtccatgcatttccattaatatgaataataaaaaatataaatctagcgaataatttttttttagatgacgtaacatttacataaatccaataattgattacatttaatgtcaatattgtataaaaaatatttatttaaaatgatttattattttatataggttttattttattggcacgattgttttttctaaattaatacggtaacaataagatttgatggttttttatataacgccctttttgagggttttttatataacgcccaattttgatgaaatgtcttacaatttgattgatttgagtgttttttatataacgccctttttgaaggtttttatataacgactcagcaccgggctaacatcttcattggtcttaaattaaaattactttaataatttaccaaaaaagcagataaaataatttagacaaaaataataaaagtttttgaaagttaaaatggataatttgtcatatagtgcaatttttaaaactaatgaaagaccagaaattttcgtaaatataaaaaaagcagataagaaggaatagtaatattttaagttgtaatataaaataaaaaaccaaatttcacattcagagaactaaataacgagtcgataaaaattaaattaattttaccaaaaggcttaaaaaagaaactttagaattaacgtattttaataagtaaaatagatataataaagaagtttacttaaataaagagtagtcttgtaaattgtacaaaatttataatggattttatatatatgtttttttaaataaaaagagccatactatttatttattttttttggtagaatatagttgatatcaaagaatacaaagttttcccattaaattcaatgtaataaaattatatcttttagtaaaaattgttattgttttttttggtataaaataattaaaaaactagaacaaaatgaagataaattttaatcagattatgaacaaaacaaactatctaaacgaggacaatgctagcaccggggtggcaccttttgatccctccccagacaattgcgaaattgctggtcacgtgcaaatttttttgcggcaccggagtggcaccctttgatcccccagacaagtgcaaaatcgttggtcatgtgctcattattttgccggcaccggagtggcacctcttcattcacccctcctacatatttgactcatagatgacctagcgcctatttttatgatatttgatgcgcaaggtgatacattagccatcgctaggtgtctctccgcggtgtattttaggcgcgtctttgatggatcaaaatttctctcggccgagttgctgactgaaaaataaaacgaacttaaattattgcatatattgtttataccaagtctattgatattcttctgacgacttccatgataataaatacttatacaaagtttatctttttatatatttccgcatcccaaacatggatggaaaataggcaataaagcgacaaatattttcaagttttgccatgctatttatctttcgggactcaatttatgacgaaaatatgggctccaattattttttattttctactaacacttttctagtggatcaatttatagattcaggaaattcattgcatgaattgaaaagtatttatttttattaaaatttgctgcttattttccgtaagaaagtttttgggaggaatttcacaaccttgccataggaaaaactcatatctgactcgtaaaaacataactcgaacagtaggtatatttgttgtgcaattttatagtccagccttcgttcgctagggctctcaccgcggtgtattttaggttgtctttgatgtatcaaaatttctctcggccgtgttgttgactgaaaaataaaacgaacttaaattattgcaatattgtttagacgaagtcttttgatattattctgacgacttccatgataataaatacttatacaaagtttatctttttatatatttcctcatcccaaacatggatggaaaataggcaataaatcgacaaatatttaaaagttttgccatgctatttaactttcgggactcaatttatgacgaaaatatgggctccaattattttttattttctactaacacttttctagtggatcaatttatagattcaggaaattcattgcatgaattgaaaagtatttatttttattaaaatttgctgcttattttccgtaagaaagtttttgggaggaatttcacaaccttgccataggaaaaactcatatctgactcgtataaaacataactcgaaaagtaggtatatttgttgtgcaattttatagtccagccttcgctagggctctcaccgcggtgtattttaggtgtgtctttgatgtatcaaaatttctctcggccgtgttgttgactgaaaaataaaacgaacttaaattattgcaatattgtttatacgaagtcttttgctattattctgacgacttccatgataataaacacttatacaaagtttatctttttatatatttcctcatcccaagcgtggatggaaaataggcaataaatcgacaaatattttcaatttttgccatgctatttatctttcgggactcaatttatgacgaaaatatgggctccgattattttttattttctactaacacttttctagtggatcaatttatagattcaggaaattcattgcatgaattgaaaagtatttatttttattaaaatttgctgcttattttccgtaagaaagtttttgggaggaatttcacaaccttgccataggaaaaactcatatctgactcgtataaaacataactcgaac

SEQ ID NO: 5461 - DNA, 1537 bp, Heterodera glycines
  unsure (1)..(1537): unsure at all n locations
atgaagataaattttaatcagattatgaacaaaacaaaccatttaaacgaggacaangctagcaccgggggggcacctttcctttcctccccagacaattgcgaaattgctggtcacgtgcaaatttttttgcggcaccggagtggcaccctttgatcccccagacaagtgcaaaatcgctggtcatgtgctcatttttttgccggcaccggtgtggcaccttttcattcacccctcctagaaatttgcaaaattgctggtcacgtgactttttttatgccagcagatgcgcacggcgccccattcccgccccccaactgctgcttgagcatccccacacacccccacaacacaactgacggtcgcgacgacggggcacgctcgcctctccgatgtgtctacccgtctaccaattaactattttctgatcagcttaactaactatagaagggctaaatggagacaaaagaaaaattcaaaacaaatggtaaatactgattacaaaattcttaggcaaatattaaatcaaagaggtgccaccggtgctgacaaaaaaaggcacgtgaccagcaatttagcaattttctagtcggggtgaatgaaaaggtccaccacagtaccggcaaaaaataatgagcacatgaacagcgatttctcaattgtctgggggatcaaagggtgccactatgatgccggcataaaaaaatgcgcacttgaccagcaatttggcaactttttttgtggggagagaacaaagaaggagtgccatacgctaccggcataaaaaagacacgtgaccataaatttgcaattttttgcagagaattggttccaataaatttagaattggatgagcacctaattggatggggcgcctatgattgtgtgtgctcctcttcaatgctattttttgtgccatttttttacccgcacgggcgcatggacttctgctgcacgccctcagccccgcctttccttccctcctcccgaggtgagtaaaactcatttgtttaatcatttgagttcaacccacccatttgcaaaaatattccgattatcatttttaattttgctttatatatttctgtttaccaaaactatttctattttttattcagctaatatgttcgattttaccaaaaatacggagttttattttttcggaccagactccatttaatgggtaagtcccaaacgaccccaaatttttagctaatttaagtgagtcattttttcgaaattccctcaaattttcaattaatacacaaaaatgggctgtaagaacaacgaatattagcaaaggtaaataaatggcattttataatttaaaatggatattgataactaacttaaaaataataaaagattatttgtgaaattatgtaaccattgaatatttttgtttaacaaatacatgattgtatagattcaatttggaaaagattgttgaagataataagaaaaaaatatattatatatcttatagaaaaaataaaaaatttgaataaaaaaaatgacctctaagaggatccccccg

SEQ ID NO: 5462 - DNA, 2703 bp, Heterodera glycines
aaataatataaacaccaaattgtttaaaaaattatttatcagctattcgtcgatttaactacactaacccaatgtaccacaagtattattaaaatgataaaaataaaaccaataaaatataaataaaatattaaaaaaagaaaagagagaatcttaatttaactagagcgaagctaccggaaattgtaactcttatctttacaatagaaataatattaaaaaacgtctgttggtaaagcagtttaaacggtttttcgtaatttttttataattttcacaacagtcaaagctggaagaccccccaaccccgcaagtcgaatggctcggattgagatcttaagcaattttaaaaaaggttaaatcggacataaaatggtttccttttaattaaaatgataaaatataatcaacataaagtcttaatattatttttaatatttctttttatataataaattttgttaaattaaaacaaatcatttgaacaataaaaatttaatatatcgagagcaaaattaatacacattatttctaataatatttatcaaagataacaaataaacattaaaaacattcatttttatattttataaagaaaaagtttattattaattaaagaattaataaatagcgattaaaattaaatcaagaattgatttatgtgtgttgttcaaaaatatatgagcactctaatatgaaatctagacaaaaacaaagcgaccaaataaaataaatagtgaaaaaaagcttttatttttgatttttataataaataaataaatttatgtaaaaaaaattcctaattaaacgattaaagtgtgttgagataaaaaataagacaaattaaaataaggattatataaaactatttactttaccaacaaaaaataaaactaatttacaaatgatttaacattctgtgattttttaccagaaatccattgcacaacatatcaatcttgtacgcgtctcaacttggaaaaaatttaactgagttaattattaaaacaaatgtgcttttaaaattctgataattctgttaaacaccagaatagttatgaaaattctggtaaacgtcagaatggttctgaaaattctggtaagcgtcattgttctgaaaattctggtaaacgtcagaatggttctgtaaattctggtaaacatcagaattgttctgaaaattctggtaaacgtcagaatggttctgtaaattctggtaaacatcagaattgttctgaaaattctggtaaacaccagaatagttctgaaaaattctggtaagcgtcagaatggttctgaaaattctgttaaacaccagaatagttatgaaaattctggtaaacgtcagaatggttctgaaaattctggtaaacaccagaatagttctgaaaaattctggtaagcgtcagaatggttctgtaaattctggtaaacgtaagaattgttctgaaaattctgttaaacaccattatagttctgaaaaattctggtaagcgtcagaatggttctgtaaattctgttaaacaccagaatagttatgaaaattctggtaaacgtcagaatggttctgaaaattctggtaaacaccagaatagttctgaaaaattctggtaagcgtcagaatggttctgtaaatgctggtaaatgtcagaattcttctgaaaattctggtaagcgtcattgttctgaaaattctggtaaacatcagaatgttctgtaaattcttgtaaacatcagaattgttctgaaaattctgttaaacaccagaatagttatgaaaattctggtaaacgtcagaatggttctgaaatttctggtaaacaccagaatagttctgaaaaattctggtaaacgtcagaatggttctgaaaattcaagtaaacaccagaatagttctgaaaaattctggtaagcgtcagaatggttctgtaaattctggtaaatgtcagaattgttctgaaaattctggtaagcgtcattgttctgaaaattctggtaaacgtcagaatggttctgtaaattctggtaaacatctgaattgttctgaaaattctggtaaacgtcagaatgtttttgataattctggtacacacgggaggagggcgggggtgggggtggcgcaaaacgcccttcgtaaaatgcgcggcggggagggggggcgtgggggccaagtggcaggcacaaaaaaggataaattttgatgcgatttgagtaaaattatcatgataaaaaattttgattaaactaaaaaatattatttatttataaattatttttagaccgactaaaaagacaccaataatcgaggaaaaggcactataataggcaccaaaaattgcaaaaaaggcaatcgaaaaggcatgaaaataggcatttaaaattttttaaacgtacatttttaaaaaaagttttaaagtcaaaatcttttattccaacctagtctttaaaaaacgaaaatcatttctcaaaattgcaaatcaaatatatttcgaggatttccggtgttaatttcaaataatgaattttatgatcaaagcattgtttaagatgaccgtttcgacgattatttagcccagagcgaaatttcctataatcttaatgaagcaaattcaattaccaaaatgaaaaatccctaaaaatttaaattacccggccccacaagcgacccgcatgcccttgttcattgagcagtcagtttgccgg

SEQ ID NO: 5463 - DNA, 7357 bp, Heterodera glycines
tttacagcaaaaatttgctcaaaatccggtcatttttcggacaaaatctgttaacaaattgcactgaaattttcaaaattttctctttgtgaaattctttttgaaaaaaccgcgccgtgaaaaaaaagaagttttgaaaagcaaaaaaaggtcgtcttacatggcgaccatttcgcaaaattggccgctgacccccccccccttttttcatgtatgcaatgaacacggaggtaaaaaaaggggagaaagggggggggggggggagagcaatcatccaaagagtccaaaatcaggaaaaccccgtgatttgaccctcaaaatccccgatattttgccatcggtctcacagtttgagtcgctttagcaccgcccgccttggcacctccggcgccctttttagtaggtgattgcattgcaacgccgcctgaaaccattgtgggcgtagacggcgtcgttgaagccgcagcagtagcagcagaatttgctgcagtctgtgatgatgaaactgtgccgctgctgctcactgattgttggcattgagtggtcgtcgtcgatgaggcggaggcgacgcttccgccgttgccattgccgacggtggcgtcccgttccggcacaacggcgtgcttttgggcgcttgagtattgcgtgtccacaagcgcggccaacacctgcaacagcgtggccagcagaagcggcacacgctccaacaacgcatcctcgggctcgcctttctgcacaaaagggggtttctgatggaaaagtgccatccgacacgacttgccttgatcagttcggtgagcgcggagagaagggcacacgcctcgctggacaccactttgatgaagctgccgccgccgaggtcgacaaactcaaaatggggccggaccaattggggagaaaaggcgggcgaatggccaccgctgcgactgctgcctccgctcgtatctgaagattaaaaagtaaaaagatcagaccaataaaaattcaatgtatttatcacttcagcaaaacatagggactgactacggtagtacgcggtaacttatagacaaatatgccaatgacataatattcttaagttaccacaactttattttctagttattttcagttggttcatcaccagctgcttgtggtcttgctccgctgctctccgtcacttcctgtccgatcagtccgctcctcaatttgttgacattcccatgtggtgcggcatcgccggcattggcacgcaacaggtcaatgacgtagtcaattgccaccacaaattgggcatggtcacgtgccatcatcatcctcacctcagacatcatcctgacaataaataacatttttgaggaaggggatggacagtttggcttgttgggtccgcatctgtttgtatgggagtggctgtttgagcagaacatggatggccaagtattggtgatgggcggagaacatgttgaacccgttaagcagttcggtgtacgtctgaatcatggtcgtttgtgctaatgcgagatggtctagcaatttgttgaacagcacttcggcctgaataaattgttaaaatggaatgccaaaaaagccaatgaaatgccaaaagattcggttttccactcccacgcacttccatttgcaaaaggtgaccacgcgcggagatgatgcagctcaacagttgggcagacgcactgctaacgttgctctgacggtcggacaacattttgaacaaggccgagatgtacatttgcacttggttctgcggcaaccaacgttcgacctccttcgagtaagggtaacaagaaaattccatttttattaatttttttaacttttttttgggcttgaaccgcttgaatgacaccgatcatttcaagcggattattttggatatacttttgataatcaatgaaagtgaaataaagatcataaaatgctaaaaatcaaatgtgtttgcctagtttttagggtaagcctattattaaaatcaaaatgggagaattgaaaaaaaagtggatcacttttgccatcgccgagatcactgcccggcatttgttcgaatcgagtcggccttcgttgccggccccgaaatgtgagtccacaaaatcgcccacgtcaaacagcgtggagttgaccaattcggtgtccagcggagaatggccccggtgcaacagactgagtttgaacgccagccaaatggaacgcaaagcgaacagacggacagagccgagcgagtcgcacaggcggggacagagacggcccagaagatgggacaacggggagaactccttggcaacgcccaacgaacagtcggaggcctgcggaattggaaatgagagacggacgaaaaggtcggtcagttaaagaattgttcaatgtccccaaatcgaacattttggtgcaaattcgatgacaaatctcaccaaattctattagtctccgtgcgggtaaatttgtttttattgcacaacaattttcgattccactcacattttccgaataaatgtgcagaatcaacactgtgaaatccacagctcgtgccctttcgtggtccttctcactcccgtaaaatgggtgaatgatctgaaaatttaaaaataaacagcaaaatcaagacagggagtttgaactcgataagtacccaaaaaagcgattgtctttttgaaatgtctgtagagtctcgcgcacccttcccactcactttgagcagtttgacgagcgttggctccacacaagggcgtctctgcaccatgttgccgatggcattccgacattgcattatggtcgcctccattacggtggacgcttcgtcgtcgtcgatctgggggtttggcgaaaattccttttttttatgggtcatctcgttgaatcaaagagaccgtattcaaatgagggactagaaaaagcaaagaaacaaaaaagacagaacccataaagagaaagtacgaccgaatcaccatcaccaataatcaatcacatttcaaccaaatcgccgaaacggggcaaaaccccgggaggcctttcttaatacaacaaaaaatgttcagttggcatgccttgccgtcggcttttccattgccatcgccgttgtcggcgccccttttgcccatttgtcgacggtttgccgctctttgtcgttgctgctgatgctctcctcctgatccccccgacttcgccgatgttggtccatttttaaaagcattggccatggcaattgccttgggccatccctggcattctccgtctgtcggttgaccgttttttgagtggcccaccgagggaaggcgttgcccagcaaaggagtaaaggtggccaacaaaggcaggctgaaaggtccattcgccctgacgaagcggcgtgaaatgcggaaaaccgaaaacgcacaacgcatccaactgaagaggacagacagacagcgtaaaagaaaggaagagaaagcggacgaagcgaagaggggaataatcccatggcaaaaggcaaaataatgacgaataaaacgttaaaaaagggttaggtgtgtccaacgcaatgttaaaggaaaacagaacaaaggaaaggaaacatcaaaacaaaaacaaaaaataaataaaattcagtgccatacattcgcattcgtccgacgaaggacaaaacaccgaccgttttaagcccacttcgctcgcgacagatcgaaaagatgttcaagatgagagagttggccaattcaacaaattcattgtcactgagcggtggctctaacaggctgaaagtgttttgaaaggcttgaaagggtcagattgtgcgagaaaggtcaacctaataaatacaaattagcatcaataattgatcaattaaaaattaatcaataattgatcaattaaaaattaatgtgttagcaattaacactaattaattggtgttacagaaaacgctttctaatgaaccaatcaatagtaacaaatttagcagattttttacattagcgaagcggccgcttttgcacccaaaaggcgaatccaactgttcagctgatccggcgacttctcttcgttcaaataggtcttagaatggctttccacacaataattttgcctttcccactgtgcccactttaacataggtaaggcattcgtagcgaggttcgaatttgtagtcgcgaattcgactcggatggacggacagtgcgatcagattcaacgtctccaagtgcgcctctctgacgatggtttcctgcataaaaggtggcaacattaggcaaaagaagagaaaggcccttggaaattgtcaactcacttttgcatttgccgtgtattggcgcaggaagggcagcaccgtctgctgaaggcggaggaccaatccctcggtggggcagtagaacaccacgtagccgtagctgagcaccaaagtcgcgcgcaaattgagcacctcgacgtcgacagtccgaccaaaggaatagtcctaattggaaaaggcaatattatattgccaaaataaaaaatgatcagcattcagaaaattatttataattaaaataaatgaaataagcactcgaatgtatgaaaaaatgccaccgcccgaggaagagcttccgctgccggcggccccgccgacgccgccagaaatgccttttttggtgtgctcccatttggcgatgttctccaactcggtgagcaccaaatcggcgtggtccaacgaagcggcacagtgacccattgcctacgaaacaaaaactctaaatcatattcaacccaaacttatactatagaaacactcgttaatatggaggataatgaccagcctttgaataaaaacagaaaaaattaacactaaaattatcgccgttcccaaaccgttttacggacatttgaattttcttttttttgataaaatggaagatccgttttagtgcattttctggtccacctgagcacagccgacccgttcaggtgtcagcgcatgttgcgcttggcgaaagagcaactgcaggtgttcggtgatgaactgaggcgagtcgacgcgggccaacgtgcagcccaaacagcgcatcagaaaggctttgtcatgggacggctgaagcgctgcggacgacgcttcctgcagttgttgggcagaggcagtgaacagccccaactgcttggcttgtatggccgccaacgcctcgcgccattcctttaaacaaagcgcattaacccagtgggcaaaatccaagcaatggataatgacaaaaaattaggggcaaaaatcggctgaatgattggacaaacagttaataaataatttgtttttgcctgatcatcgacagcttcgatcagtttgcacaacatttccagcacagctgcttgccaacgctgagcgcggatggagcggaattcggtgtgcgcatattcctccctggcaccgcccgttgctgggggaggcgatttcggtggaaaatctacgacggcaccggcaccaccacagaattcttaggaattggctttgttcgcttctttctccctgttcttaccgtccagcatggccagcaattgggccgacagtttcggcaccactgccgcgtccacaaaattctcgtggaaccagccggccaactcggcgaacagtcgcagtgcttcggcagcgcgtgcgttcagaaaagcgttcaatggggcgccgttcatgcacaccaacagacggcacatcaccggcacggggccgggcagtcgagctgatgggaagaaaaagcgataaaataagtgccgaattagaggaatcgtcgatagattttatgaaaaattgtttaaacagctttacgattttcgccaaaattaaagtccaattcgcggccacattcttttgcacgaacgcataaaatatgcaaacatttgaaaatgtcgccgatgaccggcgcataatgctccaaacaaacaaattccaacagaagtggccaaagcaactgaaaagcaccttccagcattaaacacaaccaaagggggaattgaaagaacattcttaaactcatataaaggggtcgtaaatgtttccgtaattccaatttttgggagtgttccgcgcttacatcatttgccgatttgctggtgttggcaattgtactcagcgcctgtgcgcattgcacttggagctgttgctgcagggattggccttcgccggtggagggcggcggcggcgggacggggcgtttcgtctgacaatgataaaaaaggggggaatcattaaaaatgaaaaacaaatctaatgtaaaaagctaattttgtgagtaaatgtgggatttgttatccccatgattttttaattgagttttccagggtaatgcactcacataagggtcaaagcgtggtgggataaggttgttcagcaggaaatgcatcacttgttgaccgccctctgaaaatggggaaaagatttgtaataataaattcatgagttattgttttacagaatcggacgggggcaagacagaacacaaattcattcccgaattaatatctttataattgaaattttcaaatttttaaagaaaatgtcgggggaggggtataaaaccattcttttttttgcaaaaatgccaaccgtccccttgcacatattcgttgtccgccagcgacacgcaaagttggcaaaggctcattttcacacggaccgttgcgcagtcgtcgaccaaaaagggcttcagtcccatggtgatcagtgctcggttttccttcatttggacatctgaaaaatgggaaaatgcaaaaaaggtaaaatccgaaggaccagcagaattgagcaaatgccgcagcagatttattgcacccaatttcacattttcattcggactttgcattttgtggaggataaaataaatctgaaaaaagggagaaagtttggagaaatgagtggcgacggcacttctttgtcagcggagcggcacgaagacacttgaaaggagcggaacacttcatttcggagtttgatttggagcaaattcgagcacaattggtcttcgtcgatggaaactcctgaacaatttaaatgcccaagtttactgatgatgatgaagtcatttcggtactctgttccgtgacagcacaaacgtgggggaacaacagctcgaacagatcgttcaggtagtggtcaatcggaatggcgtcgtcgggacaacaagcttggagaaagttggcgacaccctgcaatacaaaacagcaatcagtttttaaaatttaatacaaggcaatacttaaaaaacgacaattattgcactgtaattcagttggaaaattatgtctaacaatttacaattagtggccgttggtaaactttccgaaaacgagttgacaatgccaaaaatcgaatccgaaaaacaaaagtacgatttgccaagatttaatgcacctttacaatggccaattgttcttca

SEQ ID NO: 5464 - DNA, 2485 bp, Heterodera glycines
cgataggcgtcgccggacatttttttgtaatttcgttctgatttgttaacagattagcaccaaaaaatgccaattttgcagttaaaagccaagagacgactttttttttcgcttttaaaaacacttttttttgcggcgtgcttcttccaaaaattttgggggataggcgccgccgggaaaatttgtaatttttaatgcggtttgttaacagatttttgtccaaaaaatgaccaaattttgcgacaaatcttatattttaagaaatctctgaaaaattcaaatagtgattattatcaaaatgccattataatgacgtaattatttagtggcgaaaaattcaaaacagtgaatgattcctagttatgaaaagtggcattaaaatgagaatttctctgctaaaatctgtttttcgtgtacttagcgctaaaagtcgcagaaaaattagttaaaaactaaaatcccatccctaattaattctaaaacttttttgatttaaggaaaaaggcgaaataaaaatttctaaaatgaaaagagtggaagagcaattgcttgagtatcgacgaacgcgaaaagcggctcttgagcagcaaagggtggacggcgatggaaaatcggacatgccaatgtcactgaatggccaagaaggtttttgggatatttaaatttaaaaaattcaaccaaaagattaccttttgatgaattaaattactaagcaaaaaggctcatttaaacagtaatgatcagtgctctgaactagggcggggattttagtggtgaagaaaaaatccaaaatacccacgaaataggggcgtaaattataaaatagggcaaaattttgaaaaattaaatttttcaatgatgataaattagtcgactaaaaaccatctttttactattttaattgtcaagacatgcccacaaattgaatgagtaaaatgagagttgcggctcaattgcaatttacacgaccagcagaaaaaactagggttgttccccgaccccgatccccgacatatttttaagaaaaatctgttaacaaatttcaaattttcaaaaaaaaattttcctcgcggctcctaacaccaccgccctcatcacccctttgttccccaaaagtttttctgaaaaagagcgccgcaaaaaatggtggtcaaattcgatcttgagacgggttcgcaaaaatttctgtttaacccaggggtacgatcgaaaatttttcaaaatcaggacatcgggcccaaaaaatcagattttggggtcgaaaatcaggacattttgcaaaattgcttcaaatcagttatttttacaatttattcgatcaaaaatgtatcaaatattatatttttgtctcccattaatgatcaacaattttggggagaaaattaacaacccatgaattttagcacattcgggatcaaaaaatcaaatttttaacaatttttttgcggcacgtttttccaaataacttttgggaaatggtcgagggagagagagtccggcggtgccgataggctccgccgggaaaatttttgtaatttttaatgcgatttgttaacagatttgtccacaaaaatggccaaattttgtgtaaacttatatttcttgataaaatagtgacattctgccgtaaaatttcaaaattatgagtttatttaagaaatcaggacaaaatttggtcggtacctccaaatcaggacaaatctgacaaatcaggacactcattttatcagatttgaaccctccaaatcaggacaaatctgacaaatcaggacactcattttatcagatttgaaccctccaaatcaggacaaatctgataaatcaggacagatcgcacccctggtttaaccccactcctttccacttatttttaaaccagggcttccatcgaaaatttttcaaaatataaacaccaagcccaaaataagattttagtgtcaaaaatatgaacatttagcaacatttttccaatcagttatttttccaatttattcgatcaaattttatatttttagtctcctattatcaattttgataattttggggaggaaaatgcaaaattataaatttcagtaaattcgggatcaaaagatcaaaaaaattttgcggcagaccttaaaatttcttgaaaaatgtgacattatgccataaaatttcaaaactataagtatatttaagaaatcagaataattttagtcactacccccccccccccaaaatcagaatattcttataaataagaacaaatggaaaccccaggtttaaaggccaacttggactcactcttactggcgctaacgaaatcagatgattaaagtgaaaaaagatttacgagcagttaaaaagaaaaaatggtttttttgggttaaaaaaaattggccattccccgatcggggtccccgatccccgacaattgagctcctccccgccccgacccccgacatgtcgccacctgaggtccccgtcccccaatattatgcccccc

SEQ ID NO: 5465 - DNA, 6494 bp, Heterodera glycines
  unsure (1)..(6494): unsure at all n locations
ctactttgtgctgtctgcgctgcttttgctgctgctcccttgggcgtccgacgtgagggtgaactgtccgcctattccgtgttcaaccccaactgtgaacggttgccgggccaattgactggcgaacactttgagcgggacatgctttttgccaggaggcagtaatcgatcgaacaccgacgggttctaaccccctcccccccccccctaagttaagccattttttgggtgggcctgtgatttttgtactgttgtatcaaatattatatatttagaaatgacaaagaagtgaagcaaagaataccaaaagcaaaatttaatttctttttaaatttatatttcgtttgtttttttagtcgattcataggagatgttctcgttttattgtaaaggtattttttgtacagaattttctgaaaatttccaaaaataaaaaccttaaataagtacaaaaaatagacatctaacatcgaagaagctccaacccaagtggaaagtgcttttttcctgtttatctcgattattaaaaatgctcaaaatttgcagttctttaaaaaagcgtgccctttgaaaagaattttttctaataatctattttcacatcttttctagcctattattgtaaatataaagtatatttatcgctaatgcgatatttacttttacgatattttcttttatttatgccaacgattttctgatatttgtcttcactgtacatggaatgcatctcttttcgggtgtatgtatataattgatttgttttttcaatttataaaatttttcatctctaacagtgctttttcgattttgccgaaaattagccttagatccccgtacgatttacgagatttacctcccccttgaccacctattatttgcacacaatattaaaattgtaattaatgagctctattttcatgaaatttatccacaaaatatagagaaattaattgaaaaaaacaataattaataattaagagcaaagaaacaagaacaatgggagaagagattgttttgtgtatttaacccagtttatgaggagagaatggtcccaaaattcggcacaaatttaagcaaattgaaaaagtcaaaaatgatttaaaagtgccaaatcttcacattaacccattaaagctgaatggacaggcaaaaacaaacatttaagaatagtcggcattgaccaggggccgtcgtccgtcggcacttccctcactcgcggcactgcttcggctgcttccctcgtcatttttgtcggcattttctttctccaccagcagcaaatgattgttggtaccaattgcgactccgttgccgggaaaagtgatcagaccaatgccgtcgttttttagcatcagtttcaactcgttgttggcaacaacaaagccgttcattagcttctgatcagcagccggtgacaaatgctcacggcaatggtggtgaacaatggcggcaccatacgcatccccaagcacattgatagatgtacggaaacgatccctaataaatttataaaatatagatttaaaaatgatctgtacggaaacaacccctaagaatttagaaataaataaaatttatgatttaaatttaatttaattaggcaattaacttacaggaaccaatcaacggccaaaatcaatgtgatgaattcaattgggagatcgacagctgtcagaatcataacctagtgaacaaattaacttattgttagttaattcaaaaaaagagttttaccattgccaccaaagcgccggagggaatgctcgcggctccgatggatgccaaagttgatgttaagctgaaacaattcattttaatttgttttttcatttaacctctactatttgtaaaattattttataaaataatttataattatttttataaaaatatacaattaattttttaaattcgttttaaatttatttttcgttttcattttccgatcacctgatcaccatcacttggccaatgttcagtgttcggcccaccatttgcgcaatgaaaaccgttgcgaccgcttcatacattgccgagccgtccatattaattgtggcacccaccggcaacacaaaacggcacacgcgccggtcaatgctcaagtgttgctccaggcaacggattgttgtcggcaaagtggcggcacttgacgcagtgccaaatgctacggccattgcctgaggggcaagaattatgaatatttatagcggaaaagaatactgtttacattaattcggaaaattacttgaagcatgccttggcaaaatcgcagaggatttttacgcgtcattaaaaagtaaatcagcggcaaagtgatcaagaaatggatagcaaatccggccattacggtagcacagaactgtacataagatgacggtattaaaaattttgtaattattaacccaccaagccaaggcgagaaagcgtgtcgcccagtcgctcaacctcgagaacttttgcggcgatcagtgaagcaatgccaatcggcgagtaccacatcagccagccaatgatacgcatgctgacctggtccagaacggagaagaaatcgatctgggaattaaaaattaattataattatggaaagttaaatataatgtcaactattttagctttgattgtaattgatttttaattgtgccaattagcacaaaaaattaaaataaattcgcaaagagacaattagaattttttttaccattgtcctcgccttgtcgcccatttgactcaacacaatgccaacaatgatggagcagacaataatgccgagaatgttgctgcttcttaacaaataattaataattaatttgtttgtgtactgtacccgtcaatgttctgtagctccgtccttatgaaacggtccctttgtgcctccggcaaatgtaccgtatgcttctcgcagagggcgcgactcgtcgtcttcctaccatcaatcacacagtaataggcggtttgctgttggcgcaacgcggtgccaagcaaattgtccggaagcatgtttctttaaataaaggatggttggttactaattaatagataattagcgcgtttaaataaataataaatattttagaaaaattggataatttacgccaatagattttttaattatttttgatcacttatcgacctgatcaggtcgagcatggtgtccatggtgtccgttggctttgtgttgctgccatttcccaaatacccattaccattcgtgtcgtgacccaaatcacccggacgaatggtcaagacgagaaaaatgccagtctggaattaaatattatgaggaacgaataatttattttttttttcaaaacaaaatgttcaagggcatcaattttttttgaaaggtaaaaaacatatgaaaggtgcaccgggaaaacttttggaatttttagccgtttttttcaaaagattttcatcaaaaattggcaattttttgggtcaaattctgtgaattttaatgaaatttcttaagataaacaaatctttcaatttttcattaaaatttttatttatggtttctacgcccttgccatgtatcgaatatttttaaaattattttctaattaaaagcacaatgaaatttaaataggggaaatatttcaatcaatttaaaattttatgtttgctttaccatgacagcaattgtcgttgtgacgagataataaaggacggcaatgcccccaattcgacccgagtcgcgaatgttcagctgggccaatccggtgaccagcgaagcaacaatcaatgggacaaccacacatttgagcatgcgcatcagaagctgaaaaatttaaaacattaaatttattttaaattttcattaaatttaattacattaaaacccaaaacaaattgcgtacttcgccaggaaatccgatcagtttgatcattcggtagttgggctccacttggcgaagtccaacgccgagcagtacaccgatgcccacggcactgacagtgagaatcagcaacaaattttggcgcaaaaaaccggggcttccattgctgttttctaggacccggctaccaccgacaattcggtaatggccaagatttggcattttttaaatattttgaatttaaatttgctgaatttcgatcgaaatttattttatatttttaaagaataattaagaagaaatttaaggaaaattgaataaccaaacaataaaatttgtgattaaatattttttaatttcgtttttatttggatttaagcttctcataaaaagcaggggatagatgatgcaatttgatggagaattgaattagcagcaaaaaaatcggcttacaaatgatgcaataattaaatgaattaattgaaagtgaaaagggaggggggggagggttgaagatgactgagataatgaaaaaatacttgggaaaagaacgaaacaaaaatttcatttactattatttgtttattatcttttatttatttattgcgtagaaaacgcaatttaaataattaaaattaaatttcaataaaatattaatgaacttttttccggtttaattttagaggaaagttgccacttttagtcattaattgtattaaatttaattattatttcacttttttgaataaatagaaataaaattaaggaaataattttataattattttggaaacaaaatgacagaataaatcaaaaattacatatgtaataatgcattgcgttttggccgatggatgtgatgatgcaatcggacaaccggatttcatagccgcttttaaaaatggaaagactcccacgagggaacaaatgaatgaatgaaaatgaaagaataccttggctaatgaaatttgagaagccattctatgcgaatgaaatgatggaaagagaaaagttaatagagaattaaatttaaacattaaatcaaatttgacaaatattttaataatgaattcaaaatgtaatttaaattttaaaacccatcaaaggtcaaataaaaaatgagtcataaattggaaaagttgttgacattttatattgtatttccatttgttccaacgttaaaatttatgacaatttgacatttttagttgccaaattcgtcaatttactcatttatttgttagttaattttggaatcgcaaataattaagtcatttcccgtccattttcattgaacatcggcctccaaccgcagctcattgacgcggaaatgaaaagagattaaacaaaagttgaagtcaaaggtcgatggacaaataaagaatgaagtgaaacaacgctctatatctttggtaattcatttttataaattaaattattctaattttttacttgatatattggaaagtaacatatgtgggctctactgcactttaggcgtccaatcttcagtttcttggccataacttttttttacatgctcaatacttatattcttggtatcaaacgaaagcttaaagtatatggaattttttgtagacgaaaattatgggctaaaatcaacagacaaaaaattattcttgaatatgctcgaaaaagctgggtttagtgttttttcgtaacttagtattagctcttttcttgtgcatatttgtgaattcccgggactttaagcctttcgtttgagaccaagaatataggcattgactaaggagaaaaaaagttatggccaaagaaactgaagattggacgccaacatttgttagtttgaagaaataaaatatggcactttgagctcacttattgccctgtttttaccccatacaaagccttgcttcatctcatctcatctgctcccggtccactttgcattttccatcctctttctcgcacttttctacctgtatattcagattgagccaatggttccgtgacggctcagtgtcactgaacgtaactttttcccagctaaatttatcatcgtcgtcaagtcggatgcaatgaaactgcgcaacacccaaaagctcacatattttttaaaaactttaaaactaaattccaaaaatgacaaaataacaaatcaagaattgatatttaaacggcttaattttactgaagaaacttggggttgacccattttggggatttattattattattattattaaaaaaaagaaattttggcaaatatctaccgcaccaaaataaatatttttgaaggctaaaattattagtttattattaaggatgcaaattatacgtaaagaaatttcacaaagtttgaaaaatgattattcaattcgtagttgtcagaatcgcggggggaagtttgggcaccaaattgttaaagtttactaaattttattagatttataaaattttacctacttaatttattttattttttgaaattcctccctatggtgcccaaatttctggtgccaaacttcatgtcaccgtcagcagaatgacttgaaatttggcaggcaaatagcttagtgtaaaggacaccactcttcaaatttcataaccttttcaaacttagtaaaatatatttacatagatttgcccanacattgttggtatcattcg

SEQ ID NO: 5466 - DNA, 1118 bp, Heterodera glycines
atgtgtgaaaacggaaggaacttcgaacgcagaagctcacttgggacctccaaaaatagtggtgcctaagtggaagtctgtattactgtaactttttattttttgcatttttgagattcatccatcaaagttttactaattaaaacagacacatttatttcaaatcccctaggcccctccgcatcgaaaaaatagtatttttgctgaaaattttagattttcattggtgatacccctcaccagacttagccgctcaccctaattttctaaaaatttcactaaattttcaaaaaatcgacattttttgacgaaaatctcttaaaaattgctcaaaatcgcaaaattcgtcacttttttggacaaaattcgttaacaattttcccggcggcgcctatcggcaccgccggaccccttgttccccaaaagtcttggaaaaaccgcggcaaaaaaaagaggagtggaaaaaaatcgtcgcccggcgggggatgtaccccccccccatgaagccgaaatcctgggaccgtccctgggcacagagcttagaaaattacgaaatccctcggcattaaagtttagtcaccttgttcggtgcatgagacacccttgggcctccaattgatcaatcctttgccaaggcaacatcttaattcattaggaaattgatgcaaaatgtctaattatattcttcctaattaccaccccaatgcctccagtttcgagtaaaggcactatccaaaaccttggaaattttggtctcgattctcatgaaaacattcaatctcaagtctcggaaagctttcaatctagatcctcatgggtaaatctcggtctcaaatagttcactaccactgcacagtcaagtcacctgttgctgatcaacaattcccaacaaatgtagcagaacattgcaatcacaacagcactgagcattccaagagcggcgaacagtgcgacaagagttgaccgatttaaacattgcactggttcatctgcggactgtggatgtgaagctggtgacgatttaattttgttgttgttgttgttgttattggcattttgtggtggtatcaaatcgcgcgggcgcactcgcgttttgccattttctgacggcacacaaa

SEQ ID NO: 5467 - DNA, 3689 bp, Heterodera glycines
  unsure (1)..(3689): unsure at all n locations
aaagacatacaatcaggcatttttatcctagacaaatacccacccaattcgtgactaaaaatctcgacgaagctcacgatcgagcaccataaatccaggtcaatcacgggtaaaatgttgatcaaattgctttgactctattgttgttaatctcaaaaaacgctaccgttgctccactccaagccgtgcagtccgtcattgattactgtagaaatggctaccacatcctgacaacagcagtttgtataatttatgccaaccccaaaatgggttcatgtccccaaatggtacctgagtgtgctcctccgcacggcgttggcgttgccgtaattcgcgttcctgaaaatggccgagagtatagagaaaagaagctgaccgataaacatgtgcgataagagtcccagcctcaattttctactcgaaaaatttcttagttttttttttgagtctcagtctcgattctcgaaaagctgctgcccacgactgggaacagagatgtgcaaaatcgaaaatcgaaaatgaaacgaaaataataaataatctttctcgtaaacaaaaccaaaactaaaaacattaaattttaaaatttaaaagaaaggaaattttttttggaatatagaaaatgaaatttaatttttaaatccaaaaccaaaacacgaaaatgaaacataaaagtgccgaaaaggcgaaacgaaaacgacacgaaatctcgcacaaccccttactgggatggagttcgtatgttatcagttatcacatacttctgctggaattggacggaagaagcgtcgagcagccgcgctaccggcacttttgttgcccgtgccgaaaatcaccaacgatgggggccaactgccgtcctcgttgtgcctgaatgattagtatgcttaatttaaagtgccgcttttttttaccattttgcttatcgcataaacactagacttaaatctaatcagttcattactgatcaagaattttgattctgtgatcagcccattattgttcaagtcaattagagagagtgtgtttaattagcatgcttaattgcttccgcccacttcaactgttgcgtggccatcagaatgcgatgttccaactccatctgttcccggcgtccttgtgctgttggtgctactgcttttgttcctgttccggcttgttgttctccaccattttgttgctcattgtcagtgtcccgccttgtttctgcccggtgttttgcgccttttttgctgctgctgcttcttggccacggccgttggagtccctggagcacttgggagggattgccctgcaaaacgctgtccaatgggagcgcatttggcggcgatgagggcgcaatctatggaacaatataaaaaataataatgatagaagatttcgtcgaaattttcaaaaatgttccccggctgtgccttcctacagccggaatcaaaaacacctcactttatcattaaaaatttttgggttttgatactgtaaccctgagaattccagcgccagtaaattcgttcaaaagggagcaaaaaaaattctaaggaggttcagatttgcgaaagctctggtctcggcccagtggttgtgaccgaaaggctgcgcaaatcaaactgtgcaacagtaggcctctacctaccgtagttcactcaccccggcgccgataaacggcggatgctgtaacatcggttgttgcaaataagctccgacgccaaccgatgaagccagcgttggcataacaaagttcggagttggcggaggatctaggaaatgccacaaattcttgcgataaagtgatgccaaagcagcgccactcacttatggtatacggtaccacggggccagtaggtggagcactgtagccttcgccgcttgatgcgcctaggccaacaatgttttgctgacagtttggaggctgtaatggaaaaaaaattttaaaagtcattatttggagtagtatcgcatccatggcatctacagtaccatttctaaactctaatttgtcaaaattgcagtgccgtcatgcgaaaaatagtatttttcctccccattctaaatttggccttgtgtccaagtctctggcctggaaaacccaaatcacacacatccaaaaccccatttttgtgccaaaatatttccggtgccactcacagttagtccttggcactcattgtccaatttgttgcacgtctggatttggcaccgaaaattcatctgtgtacggtctgggaaatggaaggcgaacaccggcgcaaatgccatgttcagcccgtcgctgtacaccggcggactttggatcactccgctgtgggtggggcagctgaaaaatggatttttcaaattcacatgaatttcgtaggaattaaaaagcaaattaattatcatattttgaagacctggatcattataatttgggggacttaaaaaataaactggattttttcaatttagatcttaaacaatttttttgtaaattttgaagcgttttatataatttttgaattacttatatttttaagtcataatttattggttttatatgtatatcccagattataggacagttgtttagaaaattaatttttttttcttttttttcaaaaatcgtagtgatgcgattaatttaaatatttttttatctatttttatcgcccggtaaaagcctgccgggcccccgggcccgtccaggctctagtattaatcatttggtttatatttgaaaaatctagtgttgttctattttctgaaactaantatataaactatattaaatttatttaaaataattattttacttttaatttttttgaataattatttgatcagtgatcacttgcacttttcgtgcttcgacatagcaccgagaaaagtgtataaggcgacgacatttacttttgcgggcaaatatttttgggttgaattgtctaaaaaaacaaaagattggttgatcaaaattcaattttcataatgtgatttttatgagttaagcagttaaggcgaatgaacatttgaaaaattcatataaacttgtccgtccaatagaacagcaatttaaatgagccacaacaaagagacaccagcagaaggcagaaacgaaggcacgagaataggccgagaacttaaaagtagggtaggatgggaccgggaattccctgtccttcgaggtcccggttcccggtcccgaataaaaaccgaggtcccggtccctgcttctcaggtcccggtcccggttttgccaaaaattcccggtcctgtcctactctgcttaaaagcaaaaacaattgcagggaccgatgatgagatagatgtggtggtggtgggcggcattgtggacttgaaaattgactgaaatttgttggctaatttttaattccgatagattggtgggaacggaaaaccagtcgaaatttcggaattttagggtactattttgggtcccctctttggtaatttttaatgcgaatttcaagggtcaatggcaactcgtacaaaaggcaaaacgtataatagtaaattttacaaaaaacctgcctaagcctaggctagacctagaaacaagatttggcacacttccaaatctcttcgttttttttactattttttgtgacgtatgaatttggatgatcggacattttctttccatttatggaggattacgggaacagaaaagttgagatttcggaattttggatccc

SEQ ID NO: 5468 - DNA, 1879 bp, Heterodera glycines
  unsure (1)..(1879): unsure at all n locations
gtctatgaaataataaatttaaaaaaatagtgataaatctttgacaattcctaaatgatttcttgttgacatgatcaggaaaatttgagttaagattttttttaatatttaaaattggtattcctaaatttaaaaaattccttaattatgggtttggaagcaggaaatctttttaatttttagcatagaatttaggtcgacatttaatttaacgctaattattattaattctaactctaattatcattaatacctaattaaaataaagtaatttcaaaaaaataaaaatggcaaattcagaaagtcaaaaggtattaaatctgtaataatacaaagcattagcatctatttagcctagcggccaaagaggtaattctttagtttttaattaaccctccgcggtcatttttctaaaataacaaaaaattattaataaaataatcatacgaggcaataaaggggacacaaacagcaggaaaagcgttaatatcgcaatgtaatgacacaatattataagtaaatttttttatataaaattttggccaataaattaaaaaagttatctctaattaaatttattaaaactctttgattagagtttcatgtaaacgaacaaacaaattgtggtgttaatgatttagcacgtcattagaaaatgttggggtaattaaaatggactgtttactaagaaaccgaaaatccatttctgcgaattcatttgtttatttttttgtaataagaaatgtttttcattattttatcaacatactataattacctttttcattcatttaaattactaattctcatttaacggagctttcatttccttttacccgagaattaattaaagtgcttcagctttgtgggaccccaaaatgtaaaaaaatgagaaacacgcaatggaatatgcagtgccattaaaacaaaaaactgattaattcgcagaatcattagtgaaaaaatggaagttaattgaatggagtaaaattcaaaaactaaataacattctcctaaaagaggaattgataatgttaaataattctatttattatttaaattaccgagtcaatggtttcataaataaaacaacaattaagccgaaatttttaattattgtagtcgaaagctggcaaaaacgaaaaattttattataaacagtgaaagataccaaaatattgtatgggtacagtaacagtcaggtacagacagtacaatgtatacggttagcaaaggaatttcctgatgcacagttcctggtccacattgacgaagaacattcggaggaacaaatgcaatggcgcggcgcccgtgaacatgtcggtgtggaacagcgcaaaatgaccttggcgaaggatacggtcaaatgtacggtagaacatttggtgggtgtaattggccatcaaaaaataggggtcatgcacctgcaaaaaagcaaaactacaataattaaatggaagaaacaatttggcattagcaagaaaagaataacggaggaagaaaaaaaggagaaaatgaaaatttattcgcaaataaaaagagaaaatgcaaaaatgtgtgataatgaaattgctaaaattgtgaacacaatcatttgatgcaatatttggagaaaaatggaaagaaaaagaagaaaaacaacgaaatgagaagaaaaaaagagaaataattggaaaatattataaaataaaagacaaaataaagcaaaaaggaagaaaatacacagcaaaagaatggagtaaaattaattcgacnattgcattaaattttttctaaatctctttacattgtgaaattattttatttttattgaaanatatgttattattttcgaatgagctccagtagaaagtaaaataaattttatttaatcattaat

SEQ ID NO: 5469 - DNA, 3444 bp, Heterodera glycines
tttttattgaaaatatgtttattattttcgaatgagctctagtagaaagtaataaaattttatttaatcattaatttaccaattggcaattattttgtcattaagataaaattattattattattatttctttgaaattaaacaggatttccttattttattaagtaaaataatgatttattcagttttgtaatcagaaaaaaaatcatttaaatgcctcaaaaaatgaattgccatttaattgaagaaaaataaaataaaatcatttcgagacgacaaaaatgaaattatttccgctacttttattaattatattatttttaattgtaaaaattggatcggaaaagaaaaaattgcaacaacaaaagtcatttggcgaaatatttggagaaaaatgggaagaaaaagaagaagaaaaacgaaatgaactcaaaaaaagagaaataattggaaaattcaacaaaataaaagagaaaataaagcaaaaaggaagaaaatactcaacaaaagaatggcataaaattgatggaaaaatagcgaaaaaattggggacaaatcgaaataaaatttataaatggattaaagaattatgcctatataaatacaaaacaaaaactgatgatgataaattagaaattatacaaaaatacattacaatgacaaatgaatacaaacaaataagaaaatattcgccaaatgaatggaacaaaaattatgccgaaatttgtaagaaaattggagttggctatggaacaatttgcagatggaagaaacaatttggcattagaaagacggagaaagaaaaaatggaaaaaatgaaaatttatccaaaaatgagtgatgaaacaattgcaaaaacaatgaaaataaatcgaaataattttttaaaatggaaaaaacaatttgaagaataaatgattcgaagaacaattcgcttttttaaaattattatttaaaattgtaattcttttgtttacctttattttaaatattttatgcaaatttaaatgatctgggcaattttttgttaattttgagatttttaaacaaattattacatacaaaaatttttttccaatttatggaaacaaaggtttacacagaaaacattttttacaataatatatttgcttgactgatcacagatgccaataaaatggtgaatgacggaaaatcgaaaatattaagcagaaaagctatcatgaaatatttatgattgggattcggtattccacagtcctaatttaaaaaaaaattcttgggattttgaatactcaaattaattgaatttggttgactaaattctgtacacaaacgacgccccgacttcattgtcaaatctttttcgttgccaatttcaaggcggattatctgccgataattagtagaaatgtaatttaaagttgctaaaaattgtcaaaatggttattttttaggttataaacagccaaaataggtgctaaaaatgggaaaagaggtgccaaaaagttccaaatttaggggtgtaaaattgtaaaaatttaacctaaaaagcaacaaaattaagccaacttagtattgagatatataatttttaaaaaccaaattcaaaaaaataaaaaataaattttggagacgaaaaaaattttttcctttattatgcatgtctttagaaatttttgggtcgattcttaggtccttattttccggaatttttggggtcgattgtttgggagtatttgtcactttattgcatttttgttaataaatttttgggcaaagctccaaatagttgaaaatagcttttttcaaatttttttttaggttttttatgttctaaaaaataaaaacctaggaaaagtgataacgccaaataaatacagaaaaccgcaggatttagacgaaaaaagattactattttgcggagctcgagactttattcgagttaccgagaatcttcaaatggctcgatactgaaagactctcgaccgccattagtgcctaataattaccttttccccaaaaattcactggctgtcccgtggccgtttcaccgccaaccgccgcctgcacaaaagtgccgccaatttggcgcgtcaaattggcgttgatttcagctgccggatcagcagtgaccaggcggcattctgggaacatttgggtcaaattgcgttccgcgtttaccgcatgtccaacacataatggtaatttgtacaaaaattactcatgtaattagtacaaaaaattaattaaattgattttctttgaaatttaataaagaattttgtggcattttgtgcccaattaaacttaacaagggtgattaatgtgcagtgtctctctacttttttcgatgagaaggcgataaaatatttgtactcttcaccgtccgattgaagtttaagcacgttaagcttgttgaacagattgccccaaatttgctataaaaaaaatgccaaattagtagaaaaatcaataaaaaattcacattaattttccatttaatctctaatgtcctttttttggtcgtctacggctaattttatgtgctgcattagaaatttgcagattaaatgaaaaattgggagctaaaagcccgaattaaattcttatatgccaaattttttcgttcacagtcaaagaagtaagtattattaacagaaaagggcttttttagaaaactgaagtcccgtcacgacctattgattactgtatatgcatagttgggttctgtaatggtgagaaaatattgcaaattctaattggccgcacattataatgttgtggaatcaatgtccatgtgccattcacgtcgagctgaccattagcgagaaatagctggatcaacccgcatttttggtgttcaattgcgctttgaaatgccgatgagttaattagtggacacgtttctttcgtgaaaaactgaaatttgtctgggatggcttggagtaatttaaaaattgtcgtggagaaaattttcattaaaactcactcgtaaaaaaagataaaatatttttttaataaaaaaaagtctttgaaattcatttaaacacactctcatccgatttcgattgcaacagaatacattggaaattcgccgaattgggtcgagaatgcgtatccggacatttggacagtgaattcatttggaaagaaacggacaattggacatttggacagtgagtttatttataaatggcttgcacaattactaaaaattatttttcttgagacatttggcaatttctccggtctaattaggcaattcataagcgcctggctttttaataaatagcgataaatttgaacttgtttattttttcaacaacattctttatcttggctttagaaggaatcacttaactactttaatgccggatcagacttcagaaaattcaatataacttgataatctaaaaaaatatattttactgtcgtaatattcactatccaattgtccttttc

SEQ ID NO: 5470 - DNA, 3376 bp, Heterodera glycines
  unsure (1)..(3376): unsure at all n locations
agaaacaaggggggggggacaccatctaatagtatcaaaattacaaagcaaaattgaagcataagaaaaaaagaatctctgtacaacatggcttaggacaagtcgtaaaactcctaagggaagattatcattaccttgccagatatctacaggaatcgaatgtcaaggtcaatcgcagttaattccccacgttcatttggcacaaatcttcggtcggacatgtcgcatatgtttccaagtaacttttaggtaggtaccttagaggcctcctcccccaccccccccccctctaatcattaattctttttgtttttaaccctttccctaatttacaggctttcaaaatggcaattgtggcgcggcgtctgctcaaaaaccgggccattcaaaaacagttggagcgccgccaaaaaagtcggttgaattttgggcaaaaaattaaaaaacaaattttttttttttgtttgaagacatgaaaacgcttcgccgtcaacaggcggcagcagttggtcagtcgcccattgttgtgcattcggtggggaccggtttgccaaggaaccaaccgattcatcaggtaaaaagttttttgcacattaccgaaaaacgccaaaatttcagcgccagcaagtctgcaccgtgccctcccatgaggtcatctacgacgtcccatgcaccggagaggaccagcaagaaggatcggaggacagcttttgagaaacactgaggatccgacaatctgagctttaaattcacacacacacacatatatcattttgcattttcatataatcatttttaattgcattttcatataaccatttttaaattgcattttcatttatcattttcaaattgaaatttccatatacgcattgaaataaaaatttgaactcaatataatgccaaataattatataagattatggtatgattaatgaattttgtccaatggtagaccagaaagggtccatatttaatcattaaaagtgaaattttgaattttgggctttgtgtaaatgattcataaataagcagtttgcacacgatgggatgttttgcatattaaaatgggtcagttttcgggatctcacccaaaaatttgaattttgagcttcacatttgggcttagtgaataactaatcgcgcaaatattggtgggcatcaaagaaacggggtgaaaatctgggtcatcaatcggcacgcgagaacatattgtcaacatataaaggcgcaaatccccgcagtcatcctcatttttaaatgtaattcgtccaacattgttcataatttatttttatttaatttaatttaataattcaaattttatttccatttctttaataattaaattccaattaaaataattaaccactttttataattttaattccattttccctaaatctcaatttatcccatcattttcaaaaatgtccaactcttctttaaaaaatggtaaaaaagacaattcctcactttacaattaacaatctgtcaccttcagtaccggacgaagtcgactgcgaaatgcccgatgaacgtgttctacacctcgaatgttttgaaagcggcgattatggtgtaagtaactgtgatgaatcctatgtttaaatattttattctcaattttaatccattttagatgatggaattgtacgggccggaccgtgctaaagagatgctgatcgacctgcgcgactatgccgaggcgaatggaatgccatgtcaacatgtgaagatgctgctctacaaactggacaaggggctgatcaaatggaaggggacaaagccctgagaatgaatgaatgatgtgtgatgatcattgtgttggggagcgggaaaaattggtgatggtgtttattttaaaaattgaaataaaaagttttgggaaaattggaaaataattttgtttgctcatccgctgatcggtcagacgggggctcatttatgagcgcccatcccgcccgctttgctgttaacattataaaagtgggcgtggcgtggcaccacacaacttttgtggcccaactttttgcgtataaatacgggcgcatcgggtggcacatttttcatttggcatcccattttcactcattcccatggcaatcaacatctccgacaaaaaatcgttgtgcaaccaaatcctcggccaaaccgatatcacagtgacctcgagtggcataaccatcagcggtccccgcctctcgacacctcgcttcatcccatttgatgaagccggccgttgtagatgctgtaagggcactgagtccgaaattgacactgtgatcacgaaagaaggcatcacgctttggtgcacccgcatagagaaggcccaattcatcccgtttgatgttgtgtacgatttgcctggtcattgctttttccgtttgaaaaataagtctcgtgtgttcaacataccctacggcgacataccctcttctgacacgcacaccactaaacggcgcaccaatgaccaacagcatgagctgaagcgcaaagcaaaggtagctcttgacttagtggaggccggactaatggccgatgccatgcaggacggcgcacgctggaagaaggcgaaaacagcaatcaatgtgctcggcaacctccttttggcggaatcgctggacaacacctccgctaatgtaaaaaatgatgtcgcggacatcaaaaaagaagaagaagcaactgtggcggaagaacacaaagaagatgatgatgaccaacaaaaagaggacctcggagacattgacaaaacgcttgacgatttcttcaacagtattaaagcatccacagcaaacatgtagaccctcattttgtgtaaaaaatgttaaacagccaagcattcagcgataaagacatttgctttaaattaccatttggtctaatcatttcggggccttcgtcgtcgggaaaaactcaatttctgctaaaattcattgccgaatcagaccacttaatcactccaaagcctgtgtccatactgtattgttttggtgaaatgaatgcggcggtgcctgtgcttcaaaaggcgggagtcgatgtgtacgcgggagtcccatccgaggaattgattaagcgcctccctaagcctcttttgctcgtccttgacgacttgatgctgtccgttgatgagcgttatttgtcggatttgttcactaaaaaggctcaccaccatcagtttgcagtggtgtttgtcactcaaaatttgtttgagcgaaagataaaagtggcccgcctgtccgcccagtacttggtactgatgcgtgccccaaattcactgctgtccatccgcaacattggcgtgcagctcttttcgcgtcagcttgacttttttcttgacggctaccgtaaggcgacgncccgggcctatggttat

SEQ ID NO: 5471 - DNA, 2397 bp, Heterodera glycines
aaaggtgtaattgggggtttgatattgatttctttcctttaaaggtggtttgttttgagagaaattttgatatggttgtctctgtatcctgtttgagtttggtcgattagaaggaaagttccggatttgacgatttgagtcttccattcgttccatgtcttcacgcgcttgtgtgtgagcatttaaaaagtccattaactgctttgttgaataaattttaaatttttctctcaatttaagtcttagattatatggaagttttgtttctatagactgcttaatttggggatgatttatgtcttcgccttgggattttaattgcaaaattattcgatcaattagtaaaataaattttcttaattcaatcgtggattcaataggccttctcaagttacgtaattcactatggagattttctctgattaattcggggttaccgtaccgtgatttcagcaattttattattattgggtaatttttgcttgtgaggggatatggggacacaatccggtagggttcatcatgtaaaagtccacgaaggtacttaagtttttgtatgttttccatgttagaatcgttatgcactgatgatttataatcgtcccaaaaacttggccattgggaaaattttcccgaaaagtgagttagagtttgtgccggaagctttattcttgatcgttgatgaacaaatggtatgcgattacgatgtgtttgatcacttgaatgcatttcttgtgattcgtcctcttgatcactatcatattctttttcatcttcatcttcttcttctccggcttcttcatcatcgttttcttgctcttcatcaattgattcattctcttggtcggattctgaagaggaatttggtttgagcgctttcagccttctttttacctccaaatttatatccttaattgtgtcaaggatttcgtcaatttccttaattgtttttaaataattatgcttttcccggaatattttttgtagtttccattcactgttccattctgttttattcattcgcctcattaaattttgccatttttggtgcaaaatttttaatttttcaaaatttggttcaattctttgaatgatttctttagttttattaaaaattcgagaacagtcatcaaaattatttttatcatactcgaaattcccttcttctaattttgacttaattttctgtatttcttttattaacactcggttaagtaacggtatttttgctctgatttgacccgacatatttaaaaaatatacttatgagttgaaagtacaagaattggatgatagcaatatggaccccactgttttttaatctggttagatgttcgaatttctattctcttgagaaattttgttaatttaatttttctttggtctgtttcgattgagccaattaagattggttatgtaaaaaatctgataaaatactgctagttatttcttcagaaattgtctgacaaaaattttttatattacggtgagacaaatttctgtgtgaatgtactgtgagggcaatagtaattttaaatgtatatttagaaggattaagtttaaattttttgactttaataataaaatcttgattaatggtaaaataatttgacaatggttcagtgattaaagccccgtagaaattttcaaagattaaatcgtcttggtttattatttcttcagtttcgttaggttcaaagatttcgatattttgattttcgttctcaattattattggttcttcaaattctggtaatatttcaaaattctcgatcggatttaactgatcgggttgatttaacgagtcaattgaatttaaatcgattatatttttaggacacagtttgaaattttgcttagaaaagcgaatttaaaataattaagtgaactattgttgtaaatttaacttgaaattcaattgattacaggtgaattattagtttatcacaggttaaatatcaagttattatcacaattaaatagaattaacaaatattatcacaatttattttttgatcacagattagtgcttgatgattgggttgtagtgtctgattcgttgtttgtttttgccttctgttcagttggtaaaccaaaggttttttttaaatactgtgccgttctttcttgtgctgttaagtagcgtctttgatgcttcagattgttttcgattttgcggaggctgaccagtgcttggtcttgaccggctctggttgagtaggctgttgactgaaccaggcgaactaatttttcaatcaaaattctattgaactcttcccctttcactgctttggtagtggcttccaatatgttgtttgtttgagtctccacgctatcaattcttttttgttcaaccttctttgcgtggataagtgcttgatcccaaatctctttgtg

SEQ ID NO: 5472 - DNA, 2221 bp, Heterodera glycines
cgggttactcgtttcacttaattgtttgggttttttgtttgtttaaattgggcttgttgacccgtgtggtttgggttttggcaaacccttaagtgtttgttttttaactgtttctcactcgttctttgctgttcagtcgctttggacttttggccggattttgatgagcaattggtcccggcgggtgtggcaccaatttgtcgtttgtggcgacgacaaagttttgggttgggtggtggaaaagggagaaaagccacgaagtgatcgagtcgtgagtccggactgagtgattcgaaccgatcgggagtgctgtacacggccttgattttggccaagtactttgcaagcagggttgacgtattcagagcgagttgatgaccgaagaaatgcaaaagagcgccggaattcaatttatttgtaccctcaaacttgggtaattaaaccgagccctcaaacttggcgacacaatacaaaaaatgatcaatacaaaaacataaaaaataaaaaatgggcaaaattgaacggtatatgggaatggcataatggggatgcgagagggcacttcggaaaaggacgggcggagagaggcacaggacctttcgagatggggcgacacgggggaaggcgtagggcacttcgggatggtgcggcacgggggaaggcgcagggcacttcgggatggtgtggcacgggggaaggcgcagggcacttcgggatggtgtggcacgggggaagacggaaacttcggagggaaccaatgtcgaactgaaaatcactgaaaagcccagccgcttttatacggcttttttgcatcatagtacgctccaatttctaattttaattaaaatttgtttttatgtttatccctttggattttgccatttttcccattaattgttgtttttccattttttccctttacaatttcaatttctttaatatatcaaattaatcattaataatttgtttacgaacgtattttaacagaatttgccaattacatattaatcatttaatatttaattaatttccgttcctttcaatccaaggaaaagcactattattccgatcacattttttaatttattgttctaaaggttttttcccatttttatattaatatattttaatagtttttaatgtgttttttctaaattaaatgtagaaataattttaaattatttttcccatttttatttctaatgttttttattttttacattttttgttttgggttttatcttaggatttcgcgtcgtcgcgacactcccgcgcgaaagaggaaggcagcgacacataaatttatatagaatagatagtagacatggaattaggaaaattataatgagtatgaatatgataataataaatatattgaaaaaatttgttttaataagggaatagacaaaatttaatatatcagttacttggtccaatgaagttccgctaataggtttttcattagtattgttagcaggaataattttattatcttgttgggatatatattccaaattagctttcaaaataatttcagtcttaccatcggggcagataacttcacaattttctataatattttgcttattatatgtaagttggatttgttgttcttttccttctttatcacaattcacttggaccttttgacttggacatttaacattggctaatgcggtaccaaaatttgttttacatgataaagtccaattagcaccactagtacaggaataacatccttccaatgatattgtaacaatattacaaatatttttatcataaatagctttaaccttatgtcctttaagtgtgacttgcatttgaagagaagttgtttgctgtattttagctttaatttgggaatcgaagtatacgtaacttccctgtgttttaatgggtaaaaggttctcttgcctagcaaatatttcggtaagtggacttttttcgcattcacaatgtacaacggaatcacctccgtggcattgacatgcttctggtggaaaagtgcaactaaaactttgcgcttcttctttgttttacaccgtaatatatttttgagtaaattatcattcgcaactattgctgcttttaattcttcgcgaactataataatgccgaccaggtaacggcgtcggaggaattgagtcgaagtcaggtgacagatatagaactattagactcgtcaccaatgtgtggtaaaattccgggtttcaagtcaaca

SEQ ID NO: 5473 - DNA, 1147 bp, Heterodera glycines
ttttttctgcatattttggccccttttcagttttttttttagtgagcagatatttgggttttaagaagcgaaattattttttgtaattaattttttcactgattccttttttgattttaattataaagatgcaaaactacaaaaatttgaaatccctctggaccaattacattttttaccacaataaggtgggcgtcgtttaataatatgtttgtctttgcataccaattgtttatagcaaaattcttttgttattttattttgtctgattgtaaaaccgttttcgatacatagagttgtatatctcgttttccatattttaggttcctttggacattcgtatgaataagatgaacataatgaaattaatgttaataatgatataattgttaacgagttttgaaacagtctattcatttttatagggactaagggattatccatcttcctttttctgttgaaataattgggtttttgattaattattagattagagagagtttcttgctctttatcatcatttgaattaatttctaacgggtaaattaattttaagggtcgatttagtactgttttatttggaagttcgatattagcgcctcttacgataccatctgatccagttatgacatttttgacaatgccagttttccacattgctctgggagtttgatcatgtattattacaatttcattcaattctggaaaagatttcatacaatttcgtggatttttgttttcgattttataacgttctcttagacttggtatatattcatcagtccaaattttccaataatcatccaataattttgtggttttcttccataattcaattgtttggtcgtatgaagtcttttttgggtaataagttgggtctttggtttcctcattttccaaaataggaggaatacataaatttttatgtggaagtatgaagtcgattggtctaagaatctgataagagttaatttcatcatatataaaggtaattggtcgtgaatttaccagggcttcaatttcacaagtcagagtttgaaaagaatcaaactcaataaatctttttccgattacttttctcattgctgttttgacattctgattaaggcgttcaattgctccgttttgccaaggggctaattctata

SEQ ID NO: 5474 - DNA, 1450 bp, Heterodera glycines
ttcccttcttcctcagcgtccaatggtctgaatccgctattacaggaacgctttgtgttccatgtgcggcacccggagctgtcactgctgcgctttcatgtggaagacggcgatttcgtcggtccgaagacggatccgttcattggacaggccgtgtttccgctcgactccgtccgctgcggcttccgctccgttccgcttcggaatcagttcagcgaaccgttggaactttcggcacttctcgtccatgtggaaattcggtgagccattctaaattaaattttgaaatgtattttaattgaagcccccctcctccgccttttggcataattttgagtgttttaaatgcgcaactttttcaagtgcttgggaccctcctccaatgcattgccgcctcggattggccgcgtctttgggccgtcggcacaacgccaacactttgccaacgaattcttcttcagcggccgattttggcaccaccaatttcggcaatcacaagtaagtcagaacacgtgtggagcaagggataaaccaaattctggaatattttttgggattttctggggtggttaaaacgcagtttcgagacccaaattggcctcgagaatgggtcggcacccatagtttttatttgtcggcactaattttcagttcagttttatcgcaataaccaaaaacagagattcgcacatgtgagaagcacgactagcaccattgtctcaacttgaatccgattcaatgtttcttccccatttttagcactttaaatgccggcaaatccgccgcctctgacaaagccctgcatcagtgcgccgtcggcccactcattcaaaatccgcacaaaatgcttcaggccggccgttctattttggcccagcagccggatgccgtcaccgatggcattttctccgccgcggcggcgccgtttggcactgccaatggcactgatctctcttttggccaaaattggacttcgctgcccgggccgctgaatcgacgaaatgcgtcgattgaccaaatacgactggggagcagcaccagccaaactgcagcagcacatcagcagcagaacattgctttgagcacgcggtcaattagcgtggagtcgggcgagtgagtgcatttattttttcaatgcctcgtacaattcgcccccaacattggacattttggcatttcttttttacttttgtttgggtttcggtacaaaatggcaaagaataagcccattgttattcttaagcaatgtcaagtcgtccgtcccatcgtcgggacagcgaaaggccggcaccaaaactctccgccgcatcttccgactcggcggcggaaagcacaattgaaaaatgcattacaaatattgatcagaggaggatgaaaagaaacatatttatttatttttatcttttgttcccatttttttttgatctgttgtgaaaattgtgtactcttt

SEQ ID NO: 5475 - DNA, 1519 bp, Heterodera glycines
  unsure (1)..(1519): unsure at all n locations
agttctccaaggagtttttcatacacanttttgaagaatataattagcaggccaatcagttagtgtatactggggtagacctaactcatccatatccaagtcattcatactcaaactcatcaatgcaaaaaaaatgccataacgcaggcgccacgatgcaagaaatgccaggacgacgacccgcatcatgctgtggatgaattatgtatggatgagttcggcatgactcatttgtactacataattcaataaaccctaatttttaaaaattaaaatgcaattatggccagcaattaaaaatggggagaaaatacctaaaaggcaacaattgcctcactaaaattagatgtaccaaattgttaggtctccatatataaagctgattcctttgagaacatttctcatttcctttctcttcataaatcataaacttttttatttgttcgacccttttcattttttcatcttttattttccattaattctaagaaacaaaacaaatattttttatcttttaaacaaatgcatcgaactaaaaagcgatcgcgcggcggaagaggtagaaacgcgggacaaaaactgctggcagcagcagcgcacgcagcttttcccgggggaaaaaatggtcagcattgggcacgatttgatggcattggcattatgttactatttttagtttcgattttaaattaaaaaaaacaaattttcttttctcacttattcctatccaacccaattcttacgtattcccttttttgtttttgtacttcaaattcactgctaatttcttagaattgcttcacacaatgtcggcgatcgaaaatgacgagacaaagagcagaatttggcagcaactgaagaccaaactccactcgacgatggtcgccttcggaagcgggtcggtgcagttgcccaagctgatggacacgttcaggtgcgtctccgatggactcaaaaaagggcactttcactttttaaatccggcatcaaaaacatggagataggaaaaacaaaaagttatgcaattttcatcgcattcaaagatacatgcaaaattgttgaatgctttggattttttaactttaatttcttccgtttttttgttacgtttcaatttttaggcatgattggggctccgaattgacttcgtacgcggtccaactcggcttcggctgcaacgacgcggcggtgtacaaaatgttgctgacgatgcccgacgaaattgaaagcggcttcatatcggccactggcaccttcgcgttcaaagtgattccgaaggcggagaccagcgaaaacttgacgaagatcgaccagagcaaccaataccaagagtttgttgggtgtggggggagtgactttgagagaacactgacaaatggtcaaccaaattggcggttttcgcttttgaaaattaatttgggttttttagtgaaatgcgaagaatatttgcacggcgtcgctcctcaatgtcgagcggcttccatcgtaaagtccctttcaaccagtctttccatgtgcg

SEQ ID NO: 5476 - DNA, 920 bp, Heterodera glycines
  unsure (1)..(920): unsure at all n locations
cagcccttcgctatgagcagtcacaacccgaaacccgcgcgtggccctcctccttcaatgctgtacgtattcagctgtagttacgcacccatttagcccaaaaaatcaaaatgctataattttgctgtgcccatatcctttttgaatccaattcatcaatttgatttaggcacaaacaaattgaaaacattctgcgcagttcacgcggtcgactgcctcccaacggacatcctcccatcgtgcggaaaatcagcatccgttcgcaggtccaacaggtcgtacaaaaggagcagcaggtccaagtcgtacaagaggttgtttgataagaaattgcttattgtattcgagatttgaatttgtaattttaggacgagcaaagtcacgatcttcagaagccgaaacaatcatcgaatgctaaggacgagtcggaggacatcatcggacaactgatcgaacaatttaagagattgaaagtgagtgattgaagtgatcaattttgttgtttttggctgtttgccagttgtgcactacatatttttctcattatgtgttttggttggcaataaatgatcctattcaacagagacaatccattcgagaaaacagaggatttattaaagtaaatgtagaaatgggtactccatcggttaattgtaagtaagaaaaattgaaatcttatggcgtttcaagcagactatgatttgatatcggttaaagttctttaggaaatatccttcaaatcgatacaaaaaaacaaattaggtagataattaaaattaatttcttttttggcattatatttcaaaaaaaaaaaagttttttctcgatgaaaaaatctttcattcatttacagcaaaaaatctttcgactatttcctcaatggttaatttccctnatatttaattgttttaagtaactaa

SEQ ID NO: 5477 - DNA, 3228 bp, Heterodera glycines
tcatcaaaattttagcaatttttttagtgcacagctttgccaagttttcgacgaccacacgaaagtgattcatttcttctcctctcgccatgacttctttttatgctggtttaggtcaatgtccttgacagtgcggatgcggagaacctggccttgatcaatcgtcccgatttgggggtgaccttcaccaaattgcattgctggcgactcactcaatactcaaagtgtgtgttccttgacgccgacacttttgtgagttgatcagtccctcaatacttgtaaatttggcatttcttttttgtaaaggtggtcaaaaattgcgacgaactctttgaacgacccgaattctctgcggcaccagacgttggatggcccgacattttcaacacaggcattttgcagttggtccatccatttacatgcctttttcttcatttcaggcgtctttgtctttgtcccctcggagcaaacatatcgcaatttgcttgattttgcactcgtttatgggtccttcgacggcggtgaccagggacttctgaacgcatatttcaggtttgattgttttttgccatgtcgcacaaacatccactaattttcaggtcatttacattttttctctttcagcacatggcgtgaatcagatgctacccaccgtctcccgttcacttacaatgtcacgaccgttgccatttatggctatgccgccgctttgaagcggtaatttgtttgctgaacagcagcgacaatgcaattgtttgttgcttttagtttcgcgccgaacatcaaaataatccattttcttggcaagcaaaagccttgggctctgctctacggggacggcgctgcggggatggcattcgtttcggactatcacaaggtgaaggggatgccttatattgaacgcattcttttcaaaaagggtgcacttcacttacaccccgccggttccccaccttcccgaaatttgaaaaaaggttatacaaaaaggtttagattttttcttgaaaaatttgtttgaatattttttcaaatttttcggccgggtaacgacgtgtaagactccgtttcaaaaatacgacatatttggtgtttgttcgcatgcttttcaatgttttaacccatttcagcaatggtaccaactctacgcaaacattgtccagcaacttctgcctccgtcctcttcggtaatttcttcttccaccccttcttctcttccgtcctcttccttctctattattcaacatccgttgacttcgttcgaaaaccgtcccattgtcgtaagctgtgcagtgttttatgtgttcttttttaactattattagggaattttttgctgcttaaaattgcagttttagtgcagcatgtgtgtccctttttgcgtcccgttcaattttatttacggtattattcgtaagcggatcgccactagtaaacgcgtacagatttatgggacaggtcaaaatcatgggacgggttaaaattctatgggacgcataaatgggcattttgactgtaatactaacaatttcatgtcttattgctgtgttaacagtttccattttttcttttattttctaaatccgttaaaccgatttcagtcgcacggtgctaccgcaatcccggggcgtgcgcctgctggcggtggttacgaggcttgggaagcggggtcaccggattatttgggtaataacaactcttttattttacaaattatttctgttccatatattcgaatttttaaggtgctgactcctttgccaacattcagaaggctattgaaaaagcactcaaaggcgaatgagcttaatggacttaattttgttgatttgttcccttaccacttttgacctagtctcttttctcaccatctttcatttctcagcggccttcgcttcaattcgtgttaacactaaaaaatattctttgacattaatctaatcaaatgaaaataaaggacttattatttatttctgaattaagcttcttcggctgggcaaaggtgtagaattgtggtcccgatgggaaaaaagtaaaattttaaaaagcattttttctggggtagaaaaatacgctgatcacgaatctgaactcagattttgaaaaatcattgattttatctagagtgcagcgggaccgggaaatttgggcaagaccgggacttttttggttgaattttcactaaaatccacttttattgtccaaaaatgattcaattagacttaaatgaaaagtgtttttcctactaattaggctatggagaatccagaaaaaaatgtatttacataaaaaaggaatccctgatgattgaggttatagcaataatttatagtttttttagaatttagaaacctaaaaaaaatttattgacataactaatttggccttttgccataattaccgtatttgctctttttatatgccagtctccattaatctgccggtctccatttatgtgccttgggggataaatagaattttttaataatttatttggccggcttcttcgtgatcgtttcgtccatctttaaccgtttcagttgccctaaactcgcgcaaaaaagcccagaaggctgtttctatgcctcaaaacataaaaaattacaaaaaaaaaaacttcattttgatcacgttaaaaatttcgacattttgaccgacttgtcgacactttgtcccactactcccaaacattgttagacctgtcaaaacattgtttaacccatttaaaaacaaatatcaagctctacacactcaattacccccaaaatcccccactcactgcgaaaagccgacttttttgaccaaatttttagacaaatgaccaactcaactttgggctagggactcaactctttctaaccaaaatgctaaatttattcttttttctattgattctaaatgttcaaagtgattttgtacccttataaccaaaattattagaattttcgaatttggtgttttttcatgtgttagagacatgaaaatagtacgccaaaaggagaggaaaagaaatgcatttttactttttgaactctactacaaaaacgggatgtctaacctaaaaaaatatttgataggttcgatgcagaatttttttctctatcgatatacgaaatttggagtggacttaacgtgcaggaaaaaagttaaacgtcacgaagtaaatgttgttctttacattattaagaatgaagagatagtacgtaaaagtgagagaaataaagataaaaa

SEQ ID NO: 5478 - DNA, 1513 bp, Heterodera glycines
ggatcatttgttatgcgtttgccattgccattttattttttttttactttttttttgtctttttgccataatttttccattttccactgttcagctccaattcatcgctgaccatgaacgttcgcatataaccaggaccagaaaatggtcggccaattcaaccaattaattggccgttaattttttcgatttcaggccaaaaaaggaagagctgtcccctccgcccgtttcttctccgtcctcctcctcctcttcttcggtcgcacgggcgcgaaaacgaatgccaaaagcatcgccgttggacggaactttggacaattcgccactttcactggtccaacaactgacggaagccgcacaaagtgcacgggaactgatcaaagcaagcatttgatgggagattcaattgaaaggggcgggggagtgacgtcactttcttaataatacaaaattaaataagtaatgggagagggattaatcggtcgatcaaaatttgaaatttacagtccgaagacaacgccaaagaatcggcgccaccggcggatcaaagcaatgggattaaaatggaaaatgacaacagcagagaagaaaacggcggggacgaagtcggggacggggaggaggaggacaacttcggggagacactgggccaaattttcatgctgaggtcattgggaaacaaaaatggaatgacaaagacaacaaacagtatatccgacattttacagtaagcaaatcgctgagaatggcgtcggatgcgcacccgcaaaaaacaatggcaaaagtcaccaaaatgccattgggacggaacaacaaatgacggaaaagtcggcacaattagctttttgtaataactaataatttaattgcagcgatttgccaattcgatttctgctgaacgaatggatgctgaagggagggccgagcatgatgacgaatggcgaagggacagccgaagcgaacgcagcgaacaacgcaattggcattggcaccgacggcaatgcttttcggcaccatccgtcgccgccggcgccgaaacgcatgcgttggacggaagagaatggcaccgcaacagccgcttctcaacaaaacggcggcggcgaccaatttgacattttcggtgggaaagcatttaacaatataaaaaaacatttccgatcactccttccactgatcatttcattctgatcgctctgtttcaccaatcattttatttattctatccactgatcatttcgtttccccccccccccaggcatgttcatcgcttcccaagtgcgcactttgtcccttcactcgtctcagtcagcccttcggcttaaacgcgcactcaccgaactttgctttcaatttgaagcgcaagagaacggcacgcggagacggacgacggcacattcgggcagaaactgagcagcgataattaatgaaaacctgtcgagttgttattttaattttattttatttcaatctgagatttaacaaatgataaaatctatttattttatgggattcg

SEQ ID NO: 5479 - DNA, 1231 bp, Heterodera glycines
tccttttatcaccaagtcattttgcttcgttttgctgtttttgtcccgctaatttaatgctcaaaaaccaattttcggcttgtgcaatcgcgacgcataaaatcttaaaaatttatattattattaaataataatttcattttcattttccactgactctcaaagtgttcgcgggcaccgtctgattgaccttcaattcaccctcaatgttcacgttgttggaagagctcaagtcgagcatgtaatgcatttgactttgctgcaaaagtcaaatgcttttcataaaaaggacaaaaaacaaattaaaataattaattaatgggtccattggtacgggaattccatgccgaaatgaccattcgttattcaaatttgccttttcattaaaactgtccaatttttcggcaccccatcccctcccattttggcattcttttccattttcttcactacctttggcattcctttccatttttgattattatttttctcccctcttttcccccaccgttctgcccgccaccagcaccgcataataatccgttttgaattggcgtagtgtttgaatctcgcgaaggtatggcaacggtttgccgtgctcccaaaagtgttctgccaaaagtgggtccaactcgtcccggtggaaacaatcgacacggaacggctccatcagcaggggaccctcggagcagaataactccagccgaacgggacacatcttacaataaggggaggggggggggaagtttagggattatgccgaaattccagggacggatcagaaccgaattcgaacaaatttaaatattctttcattttagtttgaacttgctagttcaacagattataccaatatatgcttgatcatcgttcttaaactattttaattttatttgggattgcaataataggaataattaaactcttagaattgatttaaaagatttaattattttaatggattaaaatattaacgaagaaaccccccactaattgtatttcgcgtgccatgctcagcccattaattaccgtgctgacgatgaaccgtcggatatggcccagtgaccgcaccgccttccacatttcctccatattcccccggaggacgtacgtctccaactctttctgatgcatttcaatgaatgttttcattgtgacatgttgctgtcgtagctcaaaatttccgcaaattttgctccattccttcaccgagtaattaatgaattaattg

SEQ ID NO: 5480 - DNA, 1488 bp, Heterodera glycines
aatcatttaaaatgtagcaaatgcagcatatttattcccgactatttccaaacccaccgaacatgtcaaacagattcatgagcatgcatttgaacggtttggtcagtcgtcccttatgatcgatgatttggtctgaccgttctggctcaattatttttagtgctcggcagaaacggactctgatcaaatggtttccggccggcaccgacacccaatccgtggtgcatttctgtgatcagccgacggtcacaatatttatcattttaatgatgctgccttccactcactccgttttcctttcgccgcgccaccgcgtggacgcgcgcgttcgactccaattcggaggacatgagaatgccgaggacggagttgtggaagcggctcagagagtgatcgactgaccagcccgggggagggacggacaattgggcacggcacccgacaaaacaacaactcactggcttcgttgacgcaaatggacagacgcattttgcggggcctttccaaagagaaggcatacgcaatgcaattggtctcgctgagttccctttggatgaccattcccttggaaatccgatcattccatttttgcccgatcaatcattcttccctcccccgccccttttctctgatcagttattagctaatcaccaccaccttcaattggattcgttcttctcccctctgctgatctgctgttcctcctcctttgtccccttggccatttttcgttttttctcctcccgcggccgatgtcccagcaaatttttcgtcggccccttgggaagtcattgtacgactgtttctgttcgagaaaagcgatgaaagcgattcagccgactcggaacgggccatcataaaatgggagtggtggaggagacgagagccggacgaaacattggacactgtgaaaatggtaaaggtaattaattaattaatgacaaattggtcaaattgtgcgaatgaaagcatagaattattcatttcaacttatcccaactaattttacaaattatcatgaccatttcgggaagctcccccccccccgctcccccggcggggggacgacccttccctaagtccgtccatctgttcgttcgtttctatgccaccaataattggcaatttattaattaaatgctttgtcgaccaaattactggccaaagctaatgagtgtttaactgtttatctttttgcagaatgaatgaagaaaaatgaaaggtgcgcgggtggacggacttcgcctttcattttctgcgaattccccggcaacggacggacgaataaattaattaaccttccccaccttcgccaccctcacaaaatgctcattgatgtataaatgaacaaggaaatgggagatgcaaaggcagacaatgaattaataattgaattaattagtggcagaaaattgggagacaattcgacggaaaatcaatggcattttgaaatggcattttgcaatttttcgtcgcttgtgcctttcg

SEQ ID NO: 5481 - DNA, 2469 bp, Heterodera glycines
agtttttgatcaaaagggtccaaccaattggcacttgcattttcaatgtccgttcgtcgatggaaatgccgacgaagccatttgaccaattcggcacggccttccttacgtttccaaaaatgtcatttaaaaaatactcttccaatggcacagagagaccctttccatcgtttaccctttcaaatctatcgatcagagtaccgtagtccaactcaatgccaccgtattccgctgctcccccttcgcccggcggggggtcatcattttcaatggaaaatgcatcaaaaacatcgtacaaatcctcaacacttgtggatggcagactttggtatatcttggccaaaagtgttagtttaaaggggaatttggcatttgcaattatttggccaaatttaaaattgaaagccgtaaaaaatgatttaaaattataaaaaatacttgaaagaattcatcgaatgtgaatatttcgtctaaacaaaaacataaataaacaattgtcattttcgcccttttctcaatgcctttttccgttgcgtatggcctaagtcgacaaaggtcctaacaaaaatatttattattttttggcattttcccatttccccgttggcattctctcccccctttcccccctggcgttgtgccatcactcacattggtcctaccgcttcacctgaatggtgcagtctttgcctgcgcaaatgatcacgtccagcagttcgcgcagcgacgcaaggcggcggccctcggcgaattcggcgcccaattcggtgacaaaggcatcgtggaaaatgcgaagggcgtcggcaccgccacgcgcatactccgcgggcaaaagacagtccatttttccggtactttggagcaaaggcgatggcacacgccgaagggggcgaaaggtgaaaaagtgccgggattgccaagccgaaggaaattcgcactgacaattatttaatgacccctcggggaaaatccccaccccccccccgccaatcattcatcatttgtttcccattcttcaccatcttccttttttggcgtggcgttcatttcctcgccatttttcagctcgtcgtcgtccgggcaacccccgccctttttggcgatgctttacaataacaccaaaagatgaacggtgatttttggcaatttgttgttgaatttgcgtacaattcgtagggcaaaagtctattggaagaaaagataaaaggacaaacggacgaatgggagaagcgaagaacggattatcagagtatgcaacatttgaaaatggtaaaaaaacaattgaaaaaagtgataaacggagaaagggaagaaaagcagcggataattgggcggcttttgcctttaaagcggctgatcagtgattaatccgatttgttaatttgccattgtgcctatgctatttaatctcgttttgtgctccttttcatctcttattcctcggcctccatctttgttcgcgtcatttcacctccactttcccacttccttctcatttccccttcaaaagtcgtctcaaatttcggaatgcccccgggggataaaagggcaaaaaacagacggacaaagtgagcagctgttgccgatcaccgaatgatgatgggtcagtcgccttttgttcttcctttttcacttttgtttttctttttacttttctcattttgaataaatttaatggaagtcctttttttgattttccgtttcacttttcaaatagaaaaacaaacagtgaattggccaaatttgtctaatgggtggcgtcggtgcgattggccgaggcattgcccccggggaggggcccatctggcacattgtttttctgccctccgcttcataaatttggtccaaattaccaccattttctcactttgtgtggccctttggccgctctgtcatttattttccaaaaattccattaaatgtgccaatgcccgcgaaatgagtgaatttggattgggttcagtccaaggcgtgctgggtcgtttcttaaaaactgccaagttgtaggaaaataaaaaatgtaagacatataaattcgtatcttggcttaaattcaaccaaataaattttcatggtattatgttttataccagaatataattttattaaatttttacttaagtataaaaaaagttatggttatttaattccacaaaaacttaagccggaattttttgtataaattttttggaaattttcaacctaaaactgtccataattaattaaatattattcatatcattccatagccctaacatttctctattagctcacctaaatttcaaaaaatttggtcaaggttgagcaaagttatggccaaaagtacccaaagtgccgggttttcaaacatttttagctataacttttttgaaacctaacgaaatttgttgaaattttgcaggttaatagaggactcataggggtagcgaatgatagtaaaatatctttattttgttcgttcaaagaatg

SEQ ID NO: 5482 - DNA, 2133 bp, Heterodera glycines
aaaattaaaaattttttcttaaaatttttttactaggcctggccaaaattttttttcccttatggaaattgttacccgtaatttcagaactcaaaacgtctttatttccacaacacgatccgtaatttcgctcccaaaaaagacccataatttctttaacgcgtaattggtccagccatgctccaaacaacggatcaattacgttttgcgattccattcggtcaacagccgttaaattgttgtcatcaataaaaacattcatcgtattggcccaaaagcgtaaaatctgttcgatcgaaatgccaaattcagacatttggaactaaaaattcaatttcaaatatataagcgaaaatcagtaataaataaataaattaattgttaattcattacatgtagtgaaaccaattctgaagcacttagtgttcgcaaaaatggtgttggattaggctcatttgcttcaccgagccttaaatttcgtcggacagcgttactaagccaattaacacattttgaagcgacatgcccagtaaaagcagtcagtgtgaaataataaatgcaattttatttaataatgaataatccaccatatatttaatatttaaggttaattccttacgatatatttgaaattttacagtttatatggatggacccataaggagtagagatgtgatatacaacatcagtgtattttcttcgttttgagcatgttaaggtcggaattttagatgatcaaaattagagtattgatgaataataaattttagttagtaagtattttcgctttttatttttttgttattagtcgataaccctatgtgtcctcaaatttatttggtagaatttaagccaagatacgaatttatatgtcttacattttttattttcctacaacttggcagtttttaagaaacgacccagcaccagtccaaagggtggtcagtttggcatttggcaatgctcctttcctttgcttcgttttttccgtcattaatttgctatgtttttcgtcgtcattttcatttacttttttagcatttccttaaaataatcaaatcacgtcaaatttaatcaaaaaattggcttaaatttacccaaaaagagcaaatatttgcctttttggctttcccatcggccgaattttgatgttaatgagtaaaaagtgccgtcgtcccacttaaaaaatgttccgtcgtcagtcgttccgtcctttctcattttatttgctgatggcaaagttgtgcccattatcgccgacttttagttccccgcggggtcaatttacacgaaacatctcccgaggggggggggggaggacggcattggcttggctttatctttggatggcatttgcattcctttggcaacttttcctcgtcatttgcgataagttctcgaaggaatttttctttttttatttcctcaaagttttttcattttatataaggaattataacataaaataaataaatttgtggctttaataaaattccgccgcccccccccgcccattggcattatttgcataattaaaatttgtaaagcctctcactcattcacttacctattatgtatttcctcttcaaaatttgccttttttcgtccaagttttccccgccatttgttttttcccgtcagccgtccccgcttctctcatcgaatattccattttgccaagtgtttttttactttacgctgccttttcgatttaatttccgaatctgctctttttgccaaattcgtatacttttcaatggggcggatgacttttgtcctatgacatggcacactttctatttatcggttgcccccaaatgccattctctccgattttttgtgtaatttttgcctttttgctatttcccccaatttgcaattaaaaagggaagtcttttcgtttgtcctcttctgctggcttttccattcgttcattcatcaatttgtcccattctctcccacttttcttgcactaatttgtcttcgttcgttctcccaataatattttgtgctccttttgacatttcgcctctttcccacttttccgcttaaatgactttcggcactttcccattttaattgtcaacattgtcattttttatttattttttgatttaaacattaaaataaaaa

SEQ ID NO: 5483 - DNA, 2850 bp, Heterodera glycines
attggcaatcgcttttgccaaaagtcggcttttatcctactcactaatcccttattccaacattgtccaacttttcccccctcccatttccttttttctttttcccaaagtttgcttttctctctttcaatcgctgcgcttttcttttgccgcttttagacacgaaaagtcattttcggccatcgcttaatctcgcctcacttcttcgcctcatccgtcatcgtcatcattccctttttaaaattgtccttcatttatcgttgttcatccttcgcaacaaacatttggcacttattttaatcattatccatccatcatttatcagtaattatttaaaccgttgcctatcaattggcacttttccatttgtctgatgaactttttttgttgtgctgctgaaatgctgtgcatcttctaattttgggtgtcgtcatttgtcatttttttactccttttgcaattttcgattttccacttaattgggctcattatgtgctttttcatgccaatttatgtggtttttcatgccaattaaattcaaataaagcaacaatccccataattttgctttctctcgcgcacaaatccgcaattagcattctttgagaagaccctcggctaatttgttccccatgctgcgcttaattagtgaagaaattgtgccgcattgtctgaagcaatcattttgacccggacgaaatttggcattggcactcacttttgagtatggacaattgcgcaccgttccaatatgccgtggagaacatcagtcgatacgtttatgacaagcttggcgaacgctgcgcaatggtggtgaagggcaaaaaaaaatttttcaatgggtttaaaaaacaatttttaatttgatttgataaaaattaatcatttgcccccccccccccccctcttaagccttccattgttttgccaacggtggtcatttatggactgatccttctgcttggcattctcggcaatctttgcacttgtttggtgattctgcgcaacaaatgcatgcaggtcgaacaattggcgatttatggagggaaaagggggaaaggggtcgaacggaaaagcgaccgattgattcgaccgatcatttgatcgaatgaccaaaatgcttgtttgtttgcccaaaaatgccaattcgattcagaacccaaccaattattacctcttctcgctggccatctccgacctgcttctgcttgtgcttggccttcccatggaattacacggcgttttcggtgccgtttacccatataaatttggcgaattcatctgcaaaggtcgcgcatttctaatcgaagtctgtggtcgagaaaatgataaaaaataattcgacctcccctctttcccctaaagttcacaagttatgcctccattttgaccatcacttgcttttcagtggagcgatggctcgcaatttggtattaaatttgagaatgttctttttgttgtgttaaatatgtaattggttttatttaagaattagtcattaaaatgccaatttttcttggccgtgtatcatttgtctatttgtcattgtgccaattgtccatttacaatttctcagttttccgttgcgcatcaaaattttctcaactttggaccgtgccgtcaaagtgatcgtcgccgtttggctttgtgcttttctggccgcttcgcccgtcctctcaattgtcgtggtcaacaaattgcctgttcccgactgggccactgatcagccttggctgcccctcgtcagtcatttttgattacttttggcaaattagtcttgtcaggtctcctccgacggccaacttttgatcggcaccgaaacatgcgcgatggattttatgagaccattcgtaaaaatgggggaggcaaatcaaaagaaccctggggcattttttgatcgaattaaggcacagcgcaacttcatcttcattgccttcaccattttcttcctcctgcccgcccttctgatcactcttgtctattttcacatcgtttaccgattgtgcgcctcgggcgaccgttcgctgacggccgagtcggccaagcaaaagacgcgttcccggaagagtttgctcaaaatccttggtgaattttgttggcatttggcagtgccaacaatgggttctcattttcatcccccttcagttcccgtggtggttatgtttttcctctgctggttgccttttcacgtccagcgtttgctcagcgtttatctgaatgagtcgtcgatggaatccgtcgaggacgagcagtacaattccgccattcacactctgttcagcatcgtcttttacatttccggtcggtgcattttcagtgccatttggtgccacttttccttgctcaatttgccattttctgttaaggttattgctactactccaactccgcttgcaatccgatcctttacaacattttgtctgccaaatatcgaattgccttttgcaaaacggtcagttaattttgcttcttttcttctcatggctttcacttataaattttccgcttagattctcggcgagcgtttcgcccacaaaatattgtcgggtcgaaaccgcgccagagactccgccatcgctggcggcaatggactgaatagcaatttgaactccaaagtgtccaccggtggctcgtcagtgcaatggcggacactctctccaaaaaactcttcaatggccaaaatccacaacaatcggccaacaatttccctcaccaacagcccattactgctcaaaattgatcaaaatgcctcccatgtatttagaatttggcttttctttgcacaaaattggcttttaagcttaacagtgcgccatcgatcgcaaaatgccattccgtcgtgccattgcg

SEQ ID NO: 5484 - DNA, 3618 bp, Heterodera glycines
  unsure (1)..(3618): unsure at all n locations
actggccatggatacgcccaagttacatgaaaaaattcatttttgatttttagaaattatgaaccaattttggtacttttgttaccattcgaaagctcatcgaaagctattagctaataaaattaaacaaaatcgattagacaaactgaaaaaaggttaaaaaacatgaaactacattttccccctcaagacatacataacctttttagagttctgaatcctgaaaataaaaaaaatccgtcggaaataggcaagataaacagaccgcttcttgttcttctgctgatagggcaattttaaaaaaaccagaaaatgagtgctacccgggcggtttcacggaaaaaatccacttttacaccgtttttcataataaagtttgggtacgaaaaccctcccaaaaaatggataaaaatataaatatcgaacacacacacctcctcgtccatgtccagcgggaacagcatcttttcattggtctcgacgtccaacagttcaatgaatgacggcgttggcggaggtggtggcatttccccctcctctccaggctggtgctggtggtgttcatcattttccgacgtgtccatcatcatgtcctgcggcgtatcaccatcggcggcaacattgggctgctgctgctgttggttttgagcatcgtcctgcatcaaaacaaataaataaatgaaaattcgggtatacatcaaaaggtagccggaacaaaatgtcgcaaaaaatgaaattttttcaaataaatctttttcaaaacctaagttttaccgacaaataaaacgaaatttgctgaatttccagaaaaaaacacaaaaaaatttgaatttttttccatttccttgagttttctcaataaacaattttttcgaattaggataggcaccaaaaattttttgaattttttaaataaaaaaattttgcagcgacattttgtcccagtgacaattcgtccggcgtctttttgtcccactcccaattaattgtagtcccacaattatctcctcacacactttgatgatggcatcgtttgaggaggccgccggagtgagcggtgacggcacaacatcatccagcgcatcgtcaccggttgcggaagtgaccacaatgtgaccagccgcgttcgacgacgacggtgaggacagcgacgaagacgagggcaaatcggctgccgatgccaccgctgctccagcgcccatggtcggactgccgccaccggcaccgctgaggcgtgtgccgctcggcgcccgtcgtgccgttcccccactgccaggctgctgcggcgacgactgcgtgcctccgccggtcaacgacaggtacgaggaggaggaagaggtgccggaggagggcacgatgacgggcggttgtgccatggttggcggcgtcatggtggtggtggacgacgacgacatggacagggaagaggagggcgacgagaaggaggcgggcagtgccgggatcaaagcggtgcagtaggaggaggagggcgcggcggaagaagtgcccgcgtcaccacagtcttcaactgcagtcgtcgtcgtcggcgacaaggacaggcacagctcgcgcacccgtggcaccagttcggcaagcagcgcacgacgcgtcagtttggtgggacgtggaaagaacaacggcggagaggtggccatgaacagattttccacctgacaattgggagatgagatgggaaattaattagtggagctcgtcgtgcctcccccccccccccttccgatttttttttaaattgggaaatttaattttaatttcttatggggtttaatatataaaaattgaatattattttaattggattattgtgcaagttgccctttctttgtacgagttggcatcgatgcatctcaaaattttaaatgggcaattttatgaaaccaatttacatacaacaaatttggatgcccaaaaaattgtcagaactgttggcactttttgggccaaaaaaatatggcctgacaatgaaatcaataaaaatctaatgaatgcaatttaataaaaatggatggatatgattcatggaagagagagactgaccaaaatgacggggcccggcttcacagcgtaggcatacagtttcatactgtaattgtacatgtaggtggaggacaatgtgctgtcgtccttcaatattcggttactgtaggtcgaataaatgatcatctgtcaaaattgaatggaaaaattattcatttttttttgggggggggtcgaactcggaccggtgaacattttttcaaaaaaacgagtttttttttgctagggttctaaccgatgaagaaatctgaccatgcactgcttgcccacctgtgtgttggaaggcaactgcaactcttcacgcagcatttgcttcagctggccagccgtcgttttgctggtgtgtgtgacgtgaaactgtgcagggaaaagagaatgaatgccatttaaaaaaaaaaatacgtcatgtatttcttcccgaaaattttcgaccgtctcaacctaaatcgcattttcgaccacccaatcccgactgttttctcgtcacgcgatcaaccctatgtttgtttaacagattttgccgcccccaccagagacggtcccaggatttcggcttgggggggggggggggggggggggtatctccccccgggcgacgaccgacctttttttttgcttttcacaccacttttttttgcggcggtttttccaaaaaactttttgtggaacaggggatccccggccggtgccaataagcgccgccggaaaaaaatttcattttataatgcgctttattaacgaattttgtccaaaaaatgacaaattttgtatgccatggcaatgcaccgtacctttgcccatttctcggcccgcataaaaacgatcgtcgattgggccttgtgctccttggtcggcaccggcacggacaggaagcagaacggctcgaacttgatgctgattttgctgcacactttaccatggaaaatggggggggggggagaaaaatgttagacgaaatattttttttaccaaataaaattctcaccattgcatgtgagcgtcgatttgtgctggaattcggggggagggggaagaatggtgaaaaataaataaataatcgttagttttaaacacacctgtccatggagcaggtcaacaatgatgctgtcatttcgcttccgatagtcctcccaagactgcttggcagcctgaacatgaaacttggtttacaaaaaaacttgaataatcggtacatataaccataaaaaacacacaaaaaataatatgttgaaaataatgaaaaaattttttttcccattcaattaaattactaaaccagaaattttcaaaaaaaaactctcgcaataatttgcttggcgaatgtcatccgcgaacaaatattgttttcacaaagtttgatttgaaattgcttagacaattaaatttactgacggaaaaacatgctcgttccggcgagttttttcctctttttttttgaattggtcaatttgtcaaccaatttcgttgtaaatttttgaaattttggggcctccgtccgctgacctgngcttcgtcctgtccgctcagctccttctcctccacgtacggcttctgcttgat

SEQ ID NO: 5485 - DNA, 1548 bp, Heterodera glycines
  unsure (1)..(1548): unsure at all n locations
aaattgggaatttcncggggctctaaaaataaataaataaaaatccatgccgatggacttggatagaaaagcccaaattttgccaggacttctaccgggtcatttttccgccccgaaaggggggtgacccaaccaaagccgccctgaacccgtccagactccgcaaattggaatttccggggctctaaaaaaaccatgccgatgaacttggatgaaaaagcaaattttgccaggacttccgccgggtcattccctcgacccccaaaaacggggaccaagccgaattcccggaacccgtccgaactcaaaaaaacaacacaaaaattttttccgcgctcacagcattgcttgcgagtagcgagtggagtagggccgtggcgcgctgtttctgctggtggacgacgacgacgccatgcccgcggcggcgttgttgttgtcctccatccgcatatagacattctcgcgatcgtacgttttcacccgtttgccgccgtcaaacgacaatctgttttcctccccttcgtacgcctccttcggccatggcccgtacatgttcccttcctcatcgagcggggcgccgacaaaatcgtcgccgcctccaccggcgccgccgccactgtcccggctgaactcgtcgtcgccgccgccgccatggttgctgaccatctcgttgctgctgccgctgctgctgccaacggtggccatggtggtgccattgtcgtcgccaatgtcactggtgtcggccaacaactcgctgctgttgccaccgacagtgccggcggcggtggtggtgccaccattgtcatcaatgccaccgtcgtcgttgttattgttgttgtacacaggagaggatggtggtggcgttgttgttgttgctgtttgttggtgttcttggctttgacaattttcaaaattttcctccgaattcatcacttttaagagtctctgtaaaataacttttttttttgaaaataaattacaaacggttaatttaaaaaaatgtatagtaaatggtatcataatacaaaggtttagaacacgttaagtgcaaaaaaattaataaaatagttaaacattgtattcatacggcggcacttctgctaatttttgttttcctatttagctttttggcattaaatttttggtgctagttgtaaaataggctaggtaattcttttttaaattaagtgaaaaaaaaatttttgaacgtcaaagcttaagaaaacaaaggaaacgaccctacaaagcctcattttaggttattatgtcaaaaatgatttgtttaaaaagtaaacctgaaattgcaaagtgccggatgagtgcaatgttgtttctacaattctcggtgcaggcgaatattttcggcgatttcaacaaattctgtctttttttatactcgaaagttcatagagattggttttaaaatcctattttagtttggcacaaatttcagcaaccagacttgcttggaactgtttatattttctggacaaaaatccagacgcagaaaaagccagatctggctggacacagactacagactcttag

SEQ ID NO: 5486 - DNA, 3622 bp, Heterodera glycines
  unsure (1)..(3622): unsure at all n locations
ccaaaattgcatgctgtattaaatataagcgtaaattggaaaattaatgacgaaacaaagggaaaaacaaaaacgacacgaccgtaaatgattttgagagctntaatgcatcgtaattttttctagaagcattcaatntaaacatgcttggtatcatttgataactccaagagtcctctattattctatgaagattgaaaaaaatgcacccattattttaaacattggaaggattttaataaaataaatttctctatttttgatttgattttttagataactgtgggcactaaagttttcatttttactgctattcattcaaaatggctcaaaatggaatgacaacagccagcaatgagttcaacgagctcaacgatttcctgtcaactcgtgcctatcttcacgggttctgtcttttgcatattgttgaaaatgtggtttcttagggcaggccaaactccaaaaaaaaaggatttgccacaatttcatagcaaatttttaaatcccaaagtttccttgctgcaaaattgtcggactttcagaaaagcaccaattctgagacttttataccatttatatttttgtgctctaactctaaccaatttcttggaatttataggccaataaagcttttgaagcaagatgaatgctcttttttaaatcaacatttgcaaatacctatataaattgtacaaaattatgagtaatttttggcattattttgtattaccgactctttgtttagttttctgccgtcccaagaagaccaatatgtgttcaaatgcattgcggctgctccctccgtcagcgaatatccgcacattgcgcgttggtacaagcacatcaaaagctacgaggatgctgaacgtgccacgtaacttttcttctccattgtcccttcggaaacaatttttaccggtggaaaaatcgaaattttttttttttttggatttttgaggcgggcttggtatttgaaaagtgaaaacaccgctcatgttgttgtaacaaatgcttttaagttggccaaagaaggctggacagccgccgcagaaagtcgtttcgaaagacagtgcaccaccggcaaagaaagccgacgccgaggtatgaaatttgcccattttccaaacaatggcatttctttaatcggttttataccaaatagtggttcgatgaacacgaaaattggaaatcgcaccggtttcacccatcctgattaaaacaatccaaaattcgaatacatttcgagtaaatgaaaatactcggagaaggctcatattttcaaaatatgcacacacaattgaatacattttgttacatgttcattaattaaatcgcaatgaaagagttccccaattctcaaaatcgaattaattttggcagttttgcattgaaatgccgaaaaagtgttggtgccatgtcatgccaaaacgctgcattttaggaagacttcgacctgttcggcgacgaggacagcgatgatgaggagaagaagcgcatcaccgaggaacgtctgaaggcgtacgcggagaaaaaggcgaagaagccgggcccggtggccaagtcgaacgtcatctacgacgtgaagccatgggacgacaccattgacatcaaggacattgaggccaatgtgcgctccatcgaatgcgaagggctcgtgtggggcacgtcccgaattttgccggtcgcattcggcgtgcagaagttgcaggtatatatatggcctgcccgcccgtttaactatgtgtagttgtacaagaattgctaattttcggttttggagtgcaaatattccccccccccccgaaaaataaaattttaacggttttttttaatttttagggagtcggggtaattgtacaacctcctcccattttgattggttaacagaaatcagacacttttaacatggagggtgtgtttaagtttgttcaatgtaattgtgcaactgcagaatttgtccatccataaatgtatgcctagaatttatttattttttgtctgagccacgggtgtatcggaagtggctcagttaaacggagtaattaattttcttcccatttcttagattggatgctgtgtcgtggacgagaaggtgtcgacggattggctcgaggaacaaatcacaggcaaacattataactaaatactagagctcgacctggacctggatccaggcctggatttttcctggatccaggtccaggcaaaacacgaaaaacctggattttcctggacaaaattttagaatttattatttcaagtgaccgatgttttttttaattttcaaaaaaagatttaattaatttaaaaacacattattattattaagtagatatttttagaggtttctaagcaattaattaattttttcaaacctttttttgatttttaagatgagtttcaaaaaatccaggtctcgaagagcctggattttttgtccaggtccaggtccaacatggaatccaggtccaggcttttttcaaaataccgagctctactaaataccccaccaaattcatttaaattgggtctaaaccctttattaatgagatgggtggactcatttttggcccccatttacggtgtttttaaccaagttcccatccaagtaatggaaatttggtctacccctctactgatgagatggatggacccaattttatcccattttcggtgtttacaacattttccaatccgtttttttcaggcttcgaagacctggtccagtcggttgacgtggtcgcctttaacaaagtttgaaatgatgacagacgaatatattgacaatgactatttcacacacacacaaatattattattattatgatgatgcccattgttattttgttggtggtggctgttttgtccattgttgttgatgttgtatagtaagtaaaaatggttgacactctttctcacaatcggaattgcctatttcaatggtatttggccattttaaaatgaaaaaaaagattttttttaaattggtggtttgcttgctgtccaagcaatctcatatcattttgcggcaaatttcagtcaaatttcatgtagatgcaaaacaattggtcaatttttattcgattttcgggttgaatcaatgtaaaaggcaattgaatgttgtcgtacttgttgccgctgattgtgagcaaatggatgtggcgcaaaagcgttgccaaatgtcatccacgcgcgcctccaggcgcatgatgaaattggcggtcttggccaactccgtctctgcactttacagcactggcgccggtcatcatccgccttaatgccaagctcgaacttgaacaacagtgtgtgtggccagcaaatctgacgagagaaaaagttaggatgggataaagagacaatttatttagccaccaattcggtgcatgaatttgatggaataaaaagaatgtagcccattctgaattggccggttttgttgacacccgcttcaacagtttaaatgtgatgcaaaagaagtggtaaattttactttgctttttgttgaatcaatgtgacaggcaatgaatatggtgaattttttgtgtaaaatgtaaatgagaaggtgaacaataagtaaaaaacatttgaggatgaaatgaatgaaaaataaagaggaata

SEQ ID NO: 5487 - DNA, 3348 bp, Heterodera glycines
aaagtaccagaactttattttaaacataagtttcaccgactctttttgtgggagtcatcgctatcgccggaccaaccaatctcgcatcttcagattcattaatgaaaatgaatgaaaatgtttttttattaatattttttcttcataaaaaataattttgaaatacaattctctttttttttgtccaattggccctttttgccggtatttcccgtttttatgccaaaatagaactgtttatggcactaatgaacattttgtttcatgccaatcgccacaaaaatttatttttttttataatatgtaaaaataattaagtctcattttggcaaataaaaaatataaaatttccctgctgtaattttaaattttatcttgttcatcgatttaattgattaaaaaaaatagtaatcaaaaataatttattatttacagaaagtgattttataatttatttctcattatatttataatgagtttcttaatgcatttccgattaatattatttacaatttttgtaataattgaaaatatccatgaaaatatgttgagcaacgcgcaattatcagacgacgaattggatttgagtattttatgggaaagtgaaaaagcaccgacaattgacgagttgacaatgaaaaatgaagtaattaggctttttaattaaatgcttgtctatatttctatacattaaagattaaataaattcaattggttttcttttatttttttagtcagaagacaaaaaagaaaaagccactgaaaaagaaagtaatggtgccaaaatgcacaacgcatttcaaaatgtaactgtcaaacaagaagcaaacaattatttgggttgctttcgcattttaaattaaattaaattaattttaatttcattttgaaactaagagaatggcaaaaacggacgacggcaccaaacattcggagacgaagaagattttgacggccaatttttacacaaagtggagcgagaacgaggcaaaagacagaaagttccactggaaacttctgattacggtaagagaaaaaagacatacggtacgggacgaaagttcgcgagttttaaaaatggaaagtgtaaaatttggaaattaattttagttgtaacggtggaaagcaaacctttggacttacgcaaaatcgaccgaattctcgacaatttcgaagcgtaccaaaagaaaaggaaacaaattaccaatgatttgttacggcaaattgcagtgctcgaaaatgccaaccccaacaacgaagccaaagtttggttcagccgtctcagaattcaaacgttggccaatgcaaatgccatcgacacggcgatgattggcatcgaaatttcgttgataccattcaaaaatttgtggcaaaatgggaaaagtttgctgctcgagtcaaacgaatatttgaggttttgttttgccgtggttttttttatctcttccgaaaattttgacatattatcaaaagattaactcacaagcaaaaaaaaagggggaaagaatcatcggaatttaataaaatttaacatcaagaattatgaaaaatgcattttctttttttgttactttttgtttttttttattaagagaaaaaaaatgggaaaaagaggtggactaagattttatccgaaaaaaaatttgaaaccaaataattaaggaaacggagggccagaggtagaaaattattcccaattttcaaactcccttccctactagccctcccctcttttacagccccccctcttcctttcctcgctacgaaaggtccttccttaatttgaggtgcattgacgttcctttttcatttataagccaaatttacgcgaaaaacttccgaaaaatgaaaaacttagtcagaaattgagagaaatggtcaaagcattggtccaaatgaaggaagacataagcattgttatgaagcaatggattggggcgatgaagcgacaaatgttggcaaacggtggtgctaaatacgacatatcagtggacaatttgcttaacattgtcgaggtattaaaatgaacgattcgcattaagctcggcacatttgtcatccgagcaaaaaaaaatattatttttttaattttcattaaaatgccgtctaaaatggacgcggggtggtggtgattttcctaaaattattattttttaatcaaattacacacattgaagcgcaaattactgttcattataagcgtaatcaccataatttagagtttggtcgacattattgaagccaaacataagaatgtttctcgccatcgtcacatttccaatttgactttttccgttgcgtttttccgccaagtgattggccattgttcgccaccgctgactttggaaaatattccgatacgttcgaaacgtttgcaaataatttgcgaggcaattcgaaacttttgcaactcggcaatttacgaattgagccaatttttgtgtctctacggaagacgaaagtaaaaataaattaaatcaaaagtttttcataattattttttattattgttttctatggctagaattttcttttagttaaagcttttcacattaaatttatctgtgcatttgaaggaataaacaagggtagagttatgaaaaatgagagaaaacaaaagaaaacaaaataattgcaattgtttaagcgtggaacggcttcttctctgttgggagctaaaatatgcaaaaatgttttatctttcctttatcctttggtttccctattaaattattttaattatttatttcttttttataagtcccccctctctcatcccttccctctctctctctcttttttaagatgcgctgcgctccctttttgggtacttgaagccaatttttgtaataataatggtaattgcgcacatttaggcaattgacttatttattttaagtgttgattcgtcataatccgcacataattatcccattttgtagcaataattagagcacttatagtattaatatcaatccatctctgaaattccctcattctgtccctcgccttccctttaatatcatctcagatcaacctgatcaattcccctgatcactctatatacagttctccattcttctcccatctctctctcctgcgatcactatgatgagtcctcgctcaaccttcctcttcaaatcactctgatcactccttcccctccggcgcgtcatttcgttcttttccaatccgtttatgcataatttaaaccgcctggcgggtcggaatgtgattgatcaggcgaagaatggatgggaaagtgctcacagctgagtgggtgctgttggggctgctgttttgtgtttgcttgggatggaccgtctcggggaatggtccccactcccc

SEQ ID NO: 5488 - DNA, 2610 bp, Heterodera glycines
ccccccgaagacgacggtcgactgtgcccgtagtagttgttggcaattctttgtgatggtttttgttgttgattgcgtgcaaatgccaaaaaaatcaaccgccgttggtcaagtgcattccgtgggtgagaaagtgctccagcttggcattcagttgctgaactgctgtacatctcggtgcaccatttgagcccgtcagcaacggtttttcctgaggaggggggggggattgacaggatccgcctcccccggtcttttgctttaaaaatcaactaactcacagccaactcgtgcaggtcgacccgctttctgttcatcctcgccctccgcttcctctccctcctctttccggtgccattccttcatcaattgtcgatgactgttcttccacaatcccttccgcattttggtcgtcctcccgtttttggtgtcctcttttgacgccccctcccccccccccccccccccaacgccatacggacggacccgcgagggatgagcaaccggtttgaagcgtcgaagcgtattgaagcgtcggtcgtttggcagtggcaccgccataattccattccaactccgccgcatttgctgggaaaggaagacatcgaaactttgtgcaagtgatcccccaccggggcatggggcgtttcagtcaaatgcccccgggggcaaaagataaagcgaatgaaatcctcctcattgtcagttttggcacgccattaatcgctttcggatcaatgagaacaaaacggaagggcagaagaagggattattagccacatgtaaaaaaaatgggccagctcaaagcttatgcaaagattaagattttaacccataatcttttctttttgtttatttttcctaattgcaaaataaaattgaaatttctattatttttttataaaaaatttagtaaatctcggagtttaataaaaattttgacccaaaacgctcaaattatatttttggcaaatcaaaatctgttaataaattgtgaaaatttttaacaaaaatgtgaaaacaagttttaaaatgtctcatcccaataaaggagtgaaatttatatgaaaattttttattttctataaaaactggaaaacagggacccccgttccccggtttacaactcttatgaatgctctttacccgatttgaccagctcccccgccctccctattttcttaccataatttatttctttgatccgcataaatttgtacaaataaaaatgaaattaatcaaagctttccgcagttatgcaaatatcgcttttcttcttttgaaaattaattttaattcttttttataatttaatgcgttaaaaagaaaaaaaattctttcgttttcattggtttttcattaagcttttttcacaatttgtatcattaaaaagccaaaaatgtgttgttgcgggcgctgtgattgtgggcaattatttgctgctgcccttcgtcggtgtcttttcgtttgttcccaacggcagaagaagaagatcacttggcgctctcataaataatcccgttggaattagccaacaaattttgaaacaacgcaaaaagcgtgcgaaaagcccaaaaaatggtcaaattgaaatgactaaagattttttaaataaatttgttttttaattttattttttcctttaaagttgtcactattgcgtgaaatgtttccaattcttccgttcacttcgcttcacaatctctgtctgacccatccaaatttcaattccaatctgagcaaaccaaataaaatcaaatactaatttcaatacgatttcgattccctctgatgcttctcactttcccttcacatccgtcgatgcgtccatcccaaccgaaacgaaaacattcaaactttttgaggggaggcggcggtgggtcactcattcgcttccccccggggggtcattctccccccccccccccccgctgtgatccagcggagggagaggaggagaagaagcaataatcggtatctcactccttctttgcccatcggcaaataaccaaatgaccctttaaattgtcagtttgatggcatcattttttttacaaattaaatccacattttgtcggtataaaagctgtacctttgcccatcaaaataaaaaaaaatgaaatataaaattaccttctaaatatttagtgaaaatgtgactaattattttataaaatatgttcttacatttattttagttgttattttatttctttcattttatcgacaaaattaatttcaaaatgctaaatcaacaaaatgtaagaagaagaaatgttttttaatattcacaaaagttgcttcttttcagaaggaagtcaaagtggcgatggttttgttcagcttaattcatttattcgcagctgcttttgactctcctcaatgcaatttgggcctcaaattattcagcatcgaaggcggaaaggtaaattagggatgctccccgacccctcggggggcaaataattaagcaattcattattagttagttgatcattaatagcttttgaataggtaattagctttctcgggattaacagctcgttttaacggtgacacttcttttccaattgcaagccagagattgattaacccggcggattcccttct

SEQ ID NO: 5489 - DNA, 1317 bp, Heterodera glycines
tgcgagcacaggcatggacaaaaagcaacaataaaggacagattgttgaaatttgagaatgcatttttcccctttcagctcccatttcatcgcttttcgcgggcgccgcacttttctgtcggggattgtcctatcggaacagagcattcttctccaatgctgcgcttcgttggccacctccgtggaattaggcaaattagcacaataaattaattacataaaaataatgattaatcgaagcaaacccattaaaattcgagcgataattaattatgataaatatttcaggcgatgaaaaggaaacgaagtgccattggagtgaggaaattgagactgtcgtcgaccggccgaatatgcgctttgagagagtgctgggcaaaacagaatattacagaagtgagtaaaattaaatttgcaaactacttattaataaaatgcaattacaatggaattaaattaatttttaaagatttgggcgcagtacgaaacggacggagttcgattaaactgcgcgtcgaagtgtgccgttacacttctgaaaggacattttgcgagagaaatgtgtgccaaaattagtcattttaaacagaaatatttatttaaatggtaatagaaaatgtctggagatgatttcaacaaatattcgctgcttttaatgcgtcttcaaagaacgaaagaatttatgcaaatgcgaagcaatgttttggagcaaaaggagtttaagtgaaaattgaaattattaattaattactatcaatcaatgcagaagcatgcttaatgagaacggcttttccccgtcgccgttttcaaattcagctggcggcggagaagaaaaagaaatcgaaagcaaccaaagcgaattagccaacagcaggtgaaagcattaaagcgattcactaattacctaagtgttcaatttaaggaaagaaagtggcagagcaatttttaaaaatcggacaaatccaatcggagcattgctaagggaagcgaaaacaaagcgaattaataacaaaggcaaaaataattaagtgctgaaaaccctttaaaatggcatttccattggaaataataataacaaatatgtaatttaagatgagcaaattttgttgaacggcgaagtggcggatgacacattaaaaggaccaaaattgggcgcaaaatttgttgaagggtttggaaggcgtttttggggcgaaagggaggaaataattggtaagacaagaaaaataattaactaactctcttttaaaaataataatttttattaatttgataattttgaaaaatcatcgaatttatcagctgaattattatgcc

SEQ ID NO: 5490 - DNA, 1404 bp, Heterodera glycines
  unsure (1)..(1404): unsure at all n locations
gaacgaattatnttcaacgacccgcgaagacaaatgaaaaagcacaacagcagcagagaaatggggaaaagcgatgccaaaacatcggaaaaagaagacaaaagagagggaggagaaggcgaacaaagcgcgaaaaagtaattaaataattaaattaacagttatatttaaaaaataaaaaaataattaaggatgaaacaaacggaaccaattcaaccgacactcaaccatgaagcaacgattggcccacaacatttggccattcggcgaattcgctacccccaaatgatggagcagagaacgggcaaattcaattaattaattttataaaaattaaatagcttttcctattttgcctttttcaatttatcattccctttctcagctctttttcgtccctccgccgcttcgccgatgggtcggccgaagggaccgaagcgacacctttggcccgttttggccacaaattcgacaaaggtattttttgtatatttttggcattcctttaaatgagacaggaatttttaaggaactgattccagcaaatattgaccaaaaatggaacaatgccaaagaaaattggcgaggcgcctaccaaattcggagcggaaatgtggggaaaaattggcaaaatttgcgccaaacgaattactcatttatggacacaaaactaattcgacaacaaaaggtgaaaaatgcattaaaactaaagcaattaaaggttcaattttatcagcaaaatcccatcgcaattcgggcgctttccccgcgcagtcaaaacattcctccgacaactcgtcacgaattgcgcatcaaaaaattaagccgaaaagcaaattcgaatggaatacagacaaattcggcagttatgaaacagcagttgaaagctgaagaaagtcgagaaaaagtgaataaattgaaatattaaaatacattcaatttaagtatgtaatttaataaatatttatgaaattatcattaatgaattaattaattaagcaattattctcttcggtcggaagtgcctcaggcgctggtggttcgtttgcttctgccgaaccgcttgaagaagctggtcaaagcttcccaactttgtccaccattcttccccaggcgttgcctcaaatttcgacgcatccgttggaaaaagcgccgcaatttaaggcaaattttacacttcatattggattgacctattcagaatggaactaatttttgataattttctctccgttctaattttttgaccattttgcaattttgtttttttaagtttctttcgcttatcgatcggccaacggacgcggcaatccatcgccaaagtctgttcggcacggaaagcgttgggaatggtgccgaggaaaacgcaccgaagttgggcgatcggctgatggagtgttgcca

SEQ ID NO: 5491 - DNA, 939 bp, Heterodera glycines
  unsure (1)..(939): unsure at all n locations
ttgcttcttcttctgctgctgcttcttctgctcctctcgttgcttcttcttcctccgtttcttcggttgtgtacaccgcgagacagaaacaacaccacggcaaaaaagagcgcgaagcaaaagtaagtttttttcatttaaattaatattactattatttaaaaataataggggcgtatgtttgtggatgcgccagaggggtcgttcggaaaaagggttgcaaaaaacccgaaaaagggtaaatatgaagttgctaaaattttggcaacttcaacatatcggtgccggggagaacaaaggagaatgttctatgttgattggttaggtaataaataaataaatttcaaaattttttcataattccctttttcccaggatatactaatcaggagagctgggtcctctcggagtggatggacgcccaagagatcactgttgactttacagtcgacaatgtcatctcttgggtgtttgcttcactccggggggagcctgtgccggaggaggtagcggaaaagctgcgcaataacagtgaatatttagaaagtcggtttcatagaaattataatatctatacacaattccaaaacttttaagtgatgcgggagctcggacggaaccccgcgctcttttcaactcgaattggttttgcaaagggtgtaaagttggacgaaaaattggtgggttttaaaaatattatctataaattttcaaatctttttcatactcatttttatctgaatgattcggtgtgtccacagtctcgaattgtgggccccatttcattcctgttttggggacgaggcagacaaactgcacagtcttgaattgtgtggtctctgtcctcttaccctttctattctttcataaattgaactacattttttannatttgacaaaatgtatttaatttcaggtgacaacgaaattggatgcatt

SEQ ID NO: 5492 - DNA, 2042 bp, Heterodera glycines
aattcaattgctggatcagtgtatgccttttgggtggccatttccactatcatttatataataacaatcttattttcaattttttatttgtcctataaataaattaaatttttcgataattatacagagcgaaaattttccctccctcattccctactgtaccattggtacggtagggagtcccttgctcctttttttggtatttgttttgcttgggcttctcgtcgtcctccaggtacaattgagggttcaaatcctctaaatttttgatagctcttcaacatgggattgattatgagtcgctctcgttcccgttatcgttctcgtccgtctgctccgctcgccaaaccggcaatcgagatggtaagaaatatctttttattttattttttttatttactcctaaggtggaattttcgaacaaaagagatgttgttcgtcatcgtcgcaattttccggtaaaagatttgtgtgattttatctgattaaaattttaaccagccactggctattccccctcttcccaaaaaggaccataaaaccagcactgaagctggaaatagtgctggttttatcgaggacagttggatggctgaagttgtcaccaactgtgagcagcgtgctgctgatggtcaggtaaaccccaatttaaattaaatataaattttctttaataaaatttaagttcaaggctaatgcgaccatcgaaaaagaggtcgtcgatgacttgccggtgacgccgaatgacaatggaaaatacctcgacaaagaggtcgtcgatgacttgccggttaaaccgaaggataatggtaaatcccattatggtaagtgcctcccatttcatttatataataaagaatataaaatttttcagttttgaccaccatccctgaggaggaggaaaaggaaaaagaatgaggggcggacggacggatgaaagaatgagtgaatgaaaggattaagcaatgttgtaagcgataatataattcatcgatcaatttttgatttaaaataaggtattggtgaatataaatgaaaaattataatgaattggaaaatcccttcaccagttaattaggccaaactccttcacctcccctttcaaaatattgttccatgcgtagccacgagttttagttgaatcccttctttattgcgtcgcctcaaatatttcatttattttgtcaataaaaaattaatcaccaaaattagtgtccccgtaaggaattcccaggagcgaagcggcagaagtcgacatttcttcagctcccatttgatggttaatgtcgaaaaaattaataattattgaaaaaaaattattaaaatacgacaaaataccacatcagtcctccgtctgcgtttacagccatttgagagaaggcttcgccaagctcctccgtcgtggtgaacgaatgctcgtgaaactgttgctgcttctgctgatgttctgcacatacgcgtaggtgttgatgtagggcttcaatgtagagtttccccaaatgcttcactttttgaagcgattcgatttgcttctgttgcataatttccatctcttttttatggatttgttgttgctgctgcaacagcataatttgacgcttttggtgctgtttctggtggtgtttgataaaaaaggtccgagagtctgatcggtgatgggctaagataattgtgattaatgaaaagaataaaggtgagactaaaaggtttgaccttgactctattccttacctgcggaccagtgcgcgactcctcctatttggtgtcttttcttcggaatacccttgaagcgacggttatttggaggcatttttgtaaaataaatttaatagccaaataaacagaaatttaatgaacggaggaattgaagaattaaaaagccaacatgttgattaaattaggaaaatgggttatgaaccatctgcgcagagaactgctaccaatcgccattgcgtgacttaagtctttcaccacttcccgccttcatcactcagttgggacaaaagattaatgtttggaatatttaaaaataatttaatggg

SEQ ID NO: 5493 - DNA, 1880 bp, Heterodera glycines
atggatcaaatttggcctcatccttccttcgttttttggcatcgttcatttgtgatccagttaatcttgcaccatttttcgcacatcttgaaaccaacccccactcttccaatatccagccggcgtaccttctccttgttgtgaaataatttgtcccagtcatctgaaaaacattaataaattaagctaaaattttttttaacctgagcagagtcgaatcgccaacataaattgacccctcgtaattttccaaaggaaacggtcatcaactcgtggtttcttagcttctttcactccgtcctcgggtctttggtgttgcacaaattgctctgacatttttgatgatgtttcgcaagactgatttgattgctcgtgaaaaatcggcttaaatacctttgcaaagtgggcgtggcctaattttccgggagtataaaagaccctgcaatttgtcagctatgtctcattcgttctgctacaatggtcctcgtcatcgaattttgtgcccaaattctcggctgttccccgaaatcactccgcgacaagctgaatcatccggaggaccgggtgaaggcactgaaggagctgattggaaagaaggtccggacgacatacaaggatcggaatggaatgcagaaaacattttttatcgacggaatatcggaccaaggagcggctttgaccccgacgtatggcagactcagacaaccatacaacatcaacatagctgctcatttctacgctcgccaccgaatcaagctgcatctcccatacgtgccgtgtgttgttgagaaattttccggaagtggcgaagacagatactacccaatggaactaattgaaattgtggatgacgactacaaagagcgatggcttggcaaattgtttacggaaattgaggacgactcaattcatgtcaaacgatttggccgaattgaggaagccgaagaaattgacgacaacaatgatggtcgagatgaatgcagtcagtcagcatacatttattggtaagagacataaaattttactgtccttaattatgcacttttctacctaaaaatgacaagttcgtgcacataataaaaattgtatctttcactccttaattttaaacaaattgtaacttctttcgcttaattatgcatttttctacctaaaaatgacgttcccaaatgcttaataatttacaaaattgtaacttccattgcttaattctgcatgcatgttaatgtccttaattatgcatttttctacctaaaaatgacaagttcgtgcacataataaaaattgtatcttccactccttaataatttacaaattgtaacttctttctcttaattctgcatttttctacctaaaaatgacgttcccaaatgcttaataatttacaaattgtgtcttccattgcttaattatgcatgtatttttattaaaaacgcaaaaaaatgacaaaataacacaatttgaggtataaaatagagaaaataaaggggtacatgtgtggatacgtgtgtgtgtgtgtgagagagatacaatgaatggttaacaaataattacaaagtgtgaccgaaattaagcacattatagttggggcccactatccctttacctacatatcgtcgataacatttttggagggggcctgaagtgacgtgtccgccacccctaatgtcgggtctcaaaaagttagggtaaatcacatttattggctcatactctcctgtttcggcgtaccgcaacacttcttctttgaatgtgtcatagcagagggattggttctgcatcacgtcgtagttcagtgtgatgcccctcagcttcagcacaaattcttcctgtccatttcgccgaagtttaaagcccatactgaatcataaattgcaatt

SEQ ID NO: 5494 - DNA, 2754 bp, Heterodera glycines
  unsure (1)..(2754): unsure at all n locations
aatgagcttctgcattattgntgccacggacgacttggacgaaatttgttcgagatttatttcgtgatgacccaagccaggaaagtaagcgaaaatttttaaatttttaatgacaacacaaaatttttagtcaattgccattgggaatttgtttgggcttctgcttgattttgcaaccagctcgccaactccttgggtgatgaaacggccaatatgctgcggaatattctaccgtcaacacatgccgctttctgctatttgataaaaaactaaaaaaaaatgatgcagacattaccatagattaaaaatttctcgctaaattgattttttgttttaaatattatgacaaacatttcttgtaatataatttttttttaatttccaaatatcaacattacttattttcaatttttctatgtttatttctttttcattgataaacaatctttttcggaaaaattcaataaataggtttttagttttattaaaattatttatttattaactaaaacaattttaaaatagcatattaaaattttattttcggtaaatatttttgtttttaacaattatttattcaaaatgatcagtttcgaaagtcggcttctgcaagtttatgaaataagttttttctaaattatactttaaaagtaaacaaacatttataagcattattcatcataatttattaatacaattcgaaaaattcaaagataacccgcgtgatttgaaatgatacaacgaaaaaatacaactctatctaacacatttaaaaaccttaatataaatcattattgcaattgagtacaactgagtaccgaagtcccggttttgaacagttttgaccggtaccgggaaattcccgggttttttccggttttcccagccaaaaagacccggtttttcaatccgaaaagtcccggtcctggttttgcccaagattcccggtcccgaccaaccctagctaaaaaggataaatggtctaccataaagttgaaagtctcagcccgagtagtttgaacaccaaacaaatgtgcctccactgaaagtcgcgctttcttttctgtgcttttccacaaactcaaaacatactgatcgttgaaactgtccagtagttggctttatatccattcttttattcctttaaaatatgtatacccaaagattatagaaattatgcttatattagttctcttttttataattttgatgttagaaataagatgcaattattaaatatttgcaattttcatctatttatttatttattacaatattttatcatctcgttgactcgctgtcatcgtttttagcataatcgagctcctttttagcccatagtgtcacatgaatttttgatattttatttcatttcattattttaattaaagtaaaataaattgtaatgggaaccgaaaaaacaaaaaccaactttaaattggaacattcattaaatttcaaaaattattaaaatattttgaggttttgtttaaattattctgatattatttatcattttttcaaattttagaataatatttctaatttattttactgaataatcgtttttttcagctgtgttctcttccaacaggttgattataataatgtgggtttcgacctcgataactgattttaccatactataaatagtcagtaatttactaataatttaattaacacaacattttattatatttattgcttaataaattaattactttaatttttaatcatttttcatatttacattatttattaaacatttcgaaattttagttacaatattcttttctaaaacataacaatcgaatatgcgaactcgttgcaagcgctgctggttctccctacaactttagagcccttcatttggtcctatttgaggtcaaacaactctccccagaatttcgatgaatccatcacatatttatttaaatttttaaatttattattttattatgtttattatttaagctattaatcacttcttgttagttttttaagattttaaaatttatcattgttattaaattgtttctaagaaaaatttcaaaatttttgttttttacaaatctttttaattggcagtttaaattgtggaaatttcataattgagttctataatgttacaatcacagatgatgtgttgcttatcaattttttcagctttcgcattcataggtttcatattcatacagaaaatgctcaatgtcaatttttatgttatattaattcgattattttataagaacaggtcagaggtcaagaatatttccttatatttttatttcgaatttttttatgtgaaataaataatttataataaatatcatttaactttaaattggacaaatttttattatggtatttaattttaaaaaatattttaagatttttgaatatgtttagttgtaatacaaatattatttatatagaattgtattcttattctgtatatccttatttagtttaattgacaagcttccattttattacatatcttcatttattagttttttaaaggcttgctccgatttaaatgaatatggtaaattcttttaaatactttattattttgtttctgttttttatacaaattatttcttttaaatataatatttttgttaaaaactctaaattttattaaatttcttggattttatttattaaaaaagtgagaatcgcattgtccggatcctcatttacttacttatgttcttttttagaaattttatattcatatattttttaaat

SEQ ID NO: 5495 - DNA, 830 bp, Heterodera glycines
tcactgacgaaatcatccactgtcgaatgtatttgaaagtaaataggcatttaaatatttaagttttttgcggtgagaaatagttaaattttatatactagtattatggtgcttaagccaatttttgaataaaataaattctcagctattaaaagtacccaaagaaaattgagcctgaaatatatgtagtcactgacgaaaatcactgacgaaaatattaaccacgttcaaatcacttattttctttagaaatatttctgtttttcaaataatccaacgaaaatccgcgtaaaatgtctaataagcaacaaaaggttggttttgagtttaaatgttgccatcggtgccttcttaacacaaattctttcagaacgcaaactttggacagagatggcaacttgaatcgaatacgtccggaagtgattcgaagacctttctttgggggcagccacctgattttggatttactgccaagactcggaatgatttggtcgggcctcttccgccctcacaaggcgtcagtccgtcgaaaaaaaagccgagttcaaagagtcgtgtagacgcattccgtcccccgtgggaggacagttcggaggaagaaaaggagggcaccgcgacagagggaaagggcacggaggaaaagcgctgggacatggaagagagtgggtgggggcagcgcacgacggaacaggtttttttacacagggttgaataattggagacttttgtaggcccaatttcaatcaaaccccccccccccccaaaatacaagaaagtaaaaatttttggctctagtgcactttatgagtccaattgagttttatgagtcc

SEQ ID NO: 5496 - DNA, 1015 bp, Heterodera glycines
tggtttcgtttctctcattctcttcgatgcttaggtcggaagttcgtccgttccgaatgctgaagtcacaaatgtcgcaagtacttccgtcgatgttgaccaaaacaaagacaaaaaccgagtggcccagcagcctttcttcggtcggcggcgacgtgtcgtcagcgcttttgagaagatcgttttccgctcggctaattccggcctcaccattctcatgcccagggtcacttaaataccaaatatgaattatttgtatggtgtttaaacacagactactgaaaacagaaaaagcaacggggacagtcttatgaaaacccctttttctggcattgtatcattctgtgttcctttcttaggaccaccccgatttggcggcggcctttcgaattgcttccgagacgtactcccacgggtacaacactgccaacgcgtcaaaggcgttggaccgattcgtcaagcgcaaattgctttgcgtcgagcaaatgcaatgtttggcgaaggaggcgcctacggcttggaattcgacggtgcaaatttgcagaaaattcatcacagtgccgtcaatcggcgtacaaaacaccaaattcgaagggcacggggcgacgctcaaagaagcggtggacaattgcgacttggccattctgtacgaactgttcgactttgacgtgatcaaggaggccaacgtggagataaacaacatgcaacgaaaggtgaacgaatgggggaggcaaaacaaaaacaatggcaggaggggggaatcggggactgaaaatgccaaaaagaaattcgtttatttattggcatttcggtgcgtttctattgtcttctttaagttagaatctgttggatacggcgcgaaaattggacttgaagacgcaggcctggctcgactgttctacggaaaaattcgccaaaaaactaaaagaaatttccgagcgcaaagaactcttctattgatatttctttaccgagttggcatcgtttcagtttgcatgtgatatgatattccttt

SEQ ID NO: 5497 - DNA, 2484 bp, Heterodera glycines
cattcatccgtttgtttttgctcacttcgccaatttggtgcacacggtatcgtccatgcaatagaagtaagtgccggagagattctcggccctatcggacagcagcagttgcatcgactcgaccattatggaggcaaaattgccggcataaatctggcattgtgtgccttagtttggccaaatgccctcgcgaatggcattctgtccccctttttagtgatcccgtccctctcacatattgcaacattccatttgatggcccggcaatttcgttgatctgtccgtgccgttccgcaacttttttaagtgccattggcaatctcttctccccttcgccgtacacaaaagtcggacggaggaaaagtgcgtggaagggctgtccttaacaaattggcaatttgtcataattaataatttgccatatttattttcacttcgcaccgtttggaaggattttcccgcatttttctcgcccggccaattcggcctttatccgcgtctctccgtaatggccaagcaaaaatttggagggcaatccgcgatggatgtgctcagcgcttccaaagttgtcgcccgggggaatgttggcaaaggcatcggaaagggagagaaaaaatgtgaaaaaggaggaaggaatttggaattaattaggaagaaagtgccaatggacggacatagacaaatttggcaaaattcgatttgagttccgtttttcattttgcaaatgattatttacgttaggtccactatttttattttgtttattttattcacctccgacatggaccaatcgcggaacggagcatttgaaaatggtgttgagaagcgaatgagtggcttaagtattattaaaatggcaaagtgtgccaattcaatcgaaaaccttccaaattgtctctgctgtagcgatcattcagtgctttttgatcagcgaagaaaatatattcgaaagcctttctggccaaatggaataacacgtcgacaccatccaatgccttttcaagtttggcaatatccagcaaatcgcattggaaatgaatgagtgagggaaaaccgacggaggaaggagggcaatcatctgaagaagaacaaactgaaattaggaggggggaaggtaaaaacgacattaaaagggccgtccctgtccttacatcctgccaaattacccaccaattgttccgagctgtctgaacggctttctgtcgatggttctgatttcgtccacatttgcgtctgccctcaggcgtttgatgagatgagcggcgagaaagccactgccaccggtgatggcaactttgacgcccatttgtgaacagtttggagaaatgaagaacacttcacggtcgaatggcccgttgaatgaggggaaaggcgagcgaagtttaaggaatatttaaaatgaaaaagtgacgttcgccaaaaaggggagggggcgggggaaatgagggagaacaaagatggaagaatgggggcggggaaaggacaaagatggaaaaagagggggggggggagatggagcagatgagatcctaatctgtctgtcgcttctgtcgttcttgccctgccccactcgcaaaactcgcgcagcaaattggaggagtcgaagtcactccgccgccacgccaattgctccccatcggtcgtcgacgtccgatcgatgcaatttgagaggcattgggggaagagcagcagccgatccaacagcagcaaaatgcgcagttgcaaatgacggggaaattttgaatttggaggcatttgccaccaaaacgatcggaccgaccgaaagctcaaaattgacaccaacaggcaataatttatttgatggcttcatagaagcaaataaatgcggaaatgcaagcaaaataaatgataaagcgagtggcaaatccgatcaatcaatccaatgccaatgatcaatcatcttcagatcgcttcttccgccgatcaattccctttgaccagagtcaaaagtccgtctttgtacggcccggaacagttgctttcgatggccttctccagcggagtgttgaacatttgcatgaactgctcctaaaccaggccaattagcagaggatcgattaaatccatcgtttgtccttttcactcactttgatctcgaccatatcgcactcggcacgagtgacaatcagtcggatcaagtccgagtcgcgcctgccaatgccgaggaagcttttggtcgagttttggagcactttggcgaagaaggcgtgccgattgtgcacacattccaccaccgccaaataactgaagcaaggcaaatcgtttgaatttgccattgtccactgcctccccttccttcttttcctctttttgccattatccgcctccccccccccccttttccccccaaataaaccgacccgtccctcgtgtctccgctgaactgttgctgaattgcctgctcaatgggatgaccgatgacccttctgatactccccaaaaatcaaatgcaactgaacaaaa

SEQ ID NO: 5498 - DNA, 702 bp, Heterodera glycines
gagagggagagaggggagagaggtaatagggaaaggaaaagccaaagagagtgagagaggggagagagataataggaaaggaaaagccaaagagagtgagagaggggagagagataatagggaaaggaaaacccaaagagagtgagagaggggagagagataatagggaaaggaaaagccaaagagagtgagagaggggagagaggtaatagggaaaggaaaagccaaagagagtgagagaggggagagagataatagggaaaggaaaagccaaagagagtgagagaggggagagagataatagggaaaggaaaagccaaagagagtgagagaggggagagagataatagggaaaggaaaagccaaagagagtgagagaggggagagaggtaatagggaaaggaaaagccaaagagagggagagaggggagagaggtaatagggaaaggaaaagccaaagagagtgagagaggggagagagataatagggaaaggaaaagccaaagagagtgagagaggggagagaggtaatagggaaaggaaaagccaaagagagtgagagaggggagagagataatagggaaaggaaaagccaaagagagtgagagaggggagagagataatagggaaaggaaaagccaaagagagtgagagaggggagagaggtaatagggaaaggaaaagccaaagagagtgagagag

SEQ ID NO: 5499 - DNA, 2082 bp, Heterodera glycines
ttaagcccggtggaaaaatctgcgcataatcttgctgttctcatttgcctttttgaccaccaaaatgggtgctgaccaatcggtatgatcaaccggggtgataacttttaatttctccaatcgatccatttcggcatttattgtcggcagagttgcgtaaggaacaggacgggcgcgtttaaaaataggatttgcgccggatttgagcatcaattggcccttcattttggtgcagagtccaaggccctcagagaaaatttgcttatatttgttctcaaaatttgcaattgtgtcccgaatttttgttgaatcagtggaccaaatctgattaatatttttggtgccgatcagccgcttcatttcttccagaaatccaaaacggtccaaagcagtcaggcccaaaagattaattgttccacttttggccacataatatggtagctccgttcggattccgttgaattggaagttggcaacaccgcggccaaggaatttgcagcgcgtgccgtcaaaaaatctcccttcttcctgacacgcctgaattggtggtcgtccaatatcattgtacgtctgattggtgacgacaattatttctgtgccgctgtccaaaacgaaatcgattgatttgtcgttcattaaaattggtgcattcattagacccgccgattgaacggaattgatgaaagtgtcgggcaacatcacaatattcacttttggattttggctcctcttatttttgtgatatgcctgaattttgtcacactgtcgctcgatgtgcccgctcctctggcattttctgcacacattattcttctttgggcaattttgggcccagtgaagctctccgcaacggaagcaattgttcggaggatttttgcgttttgatgtgcttgaaattttgtgtgatcgactgaaatttgtttgattttgttgttttgtcggtgatgatttagtgtgctgcactgcatttattttaagcttcggctgttccaaaaattttgcctccgcttcagttttaagcactgtattcaaatcatcaacaaccgaatcaaacaacttggccgttttgttgaccttcgcatcttcgacagttagacgggcaagaatgtgttgtcgtaatttggcatcactcgaggatttgagtgaagtcagaagaaccaggcacttaaattgctcctcatttaattctgagtagcgaaattttcgaagcagcgcctttaaacggttcacaaacgcgccaaattcttcgccatcgtctctgcatgccttaagacattcgtatcggtcgattgccaatgatggcggatgcgagaataattttagcagtcgggattttgtgtccgcaaaattgaatttcgtgatttcgtccggtagacaaaagcgcttgtactcgctgaacgccgtcggagacaatttggtcatcaacaatttgaccttctgttcatcgtccaaatttgaggcagcacaatccaaagcaaattggaaacgttccagccactcctcgaattcttcagcactgttcggagaaaatgtctgaatgtcaggtaatgtgatgttctgtgctgtttgtgttgtggagggcgccttttgttgctttattgcctgggtgagtttttccaaaatatcggcgagagttttgtccatcttgattgacgatttgaaattgtgacgaattaaaaccacagatagtggaaccgcaaccgcataggtatcttggttttttgatgattccgcgaaatttaaaaatcagcacgagatttttaaatttcccaaaacaagcaattcaacacgagaattgcttgaaaattgatgagttcgggcgtcgccaatgttgtgcctttagggtcacaaacaaatgttgttgaatacaaaatatttattaaaacaacaacaaaataaaaagcagaatttggagaataatttggggtcaatatttagcggagcacaatatttaagcgagtccaaaggagaaccaaaaagagaatgaattggggaaaagaggggaagagacttaatgagcagaatgggcaaaatcaatagtacaaaggacatggaaaagaggaatgataaacaaacatcatt

SEQ ID NO: 5500 - DNA, 6758 bp, Heterodera glycines
  unsure (1)..(6758): unsure at all n locations
ccgaaattttcaaagaaacatagtattttgctgcgccggcggacccactgtccccaaagttttttggaagcgcgccacaaaaatgtagaaaagcaaaaaaaaaaaaagggtcatcgcccggggttacccccccccccaagccgaaatcctgggaccgtccctgagttcagggcctactggacaactaataataatagaacttaaattattccgactttcaactttaggattcctacaattaaaatgtttttagctggacttatgaaaatttttccgtataaaaatgatccccgcttgacttcttttaatcccttaaattttgagcaaaatccttttttttgtcagaaactgacaacagacactacgcccacgtggattgtccgggccatgcggactacatcaagaacatgatcaccggcgcagcacaaatggagggcaccattttggtggtggccatcactgatggaccaatgccacaggtaaaagagggaaaaggggacggacagaacggaacgagtggcaaattggcaaggaatggataacatggggagagagaggtgttgtgacgggagcagtaggttcggttcccccccccccgcccgtatcagtccgcccccaagaaatttttgtttttttctttattaacttggtaatttaaaaaaaaattgttgaaatttttttcttggaatttccgtataagaaaacattaaatttttataagttaattaattttaaaaaaataaaattttctcggatgtgtgggggaaattgcggtggtttttatgtcaatacacgtccggctcgtttccataattgtaagaggatggatcctcccgtttcgtttcggctttcaggggcataacaaattccacacccacccaccctacccacattcaaaattattttgacacagaatttttaatgttttggcggcatattaaaatgcaaaaacatttctcttctattttgtagacccgtgaacatttgctgttggcacgtcagtgtggcattccgcaggagaacatttgcgtgtttctgaacaaagtggacgaagtcagcgacgccgagacgcgcgaattggtcgaaatggaggtttgacgtatttgttacaaaacttgtacattcaatcactcccatttgtcaggtgcgcgaactgctcaacgagttcggctacccgggtgacacggctccgatcattgcaggttcggcactgtgcgccttggagggcacaaagccggagcttggggaggagtcggtgaagcaactgttggacacaatagacaacttttcgatcccaaagcgaacaaaagaggacgagccatggatgccggcggagaaagtatacacaatcaaaggtgaaaatcggggggaaagtggggaggagagagcaattttccattttaaaataaaaaggattgaaatgcccgtccatctttcgcattttaggccgtggtacggtgatcaccggcaaattggagcagggcactctgaaaaagaacgacaaagtgaccattgttggactgggcaaaaaattggacaccacaatcgccggtaaacccaatggtttactctcgtattttaaattcataattttgtttataggcttggaaacattccgcaaaacagttgatcaggcggagcccggagaccaattgggtgagtgatttaacgaacaattgacacatttaagtaattaatttaaaaaaaactgaaataccggagtaggtcgtttccaaaaaattttattgaaatttcaaagatttggaaaaaattttaaatctccaatatttttgcccgttccttccacccgtttttgttcaggagttctcctcaagggccttggtccgaaggacgtgcgcaggggaagtgtgctgctcaaacagggccaagacgcacattttacggacaaagttcgagcgcaggtgagcgaaatacaatggccgtttttctagaccacggtttcttaaacatttttttagtttaactgctaacaataagttctttatcggcaccgccgggcttctcccccccccccctcaattccccaaaattttttttgtgaaaaaccgcgccgaaaaagtctgaatagcaaaaaaaaaacagcagaagaaaaaattagaccttcgtatgaaaatcggccccgaggtttttatgtttttttaaattacgaaattttcaaaagctgattttcctgtcatcaaaaaatttcatgtcattctgttaatgattaagaaaatcagcatttttaaatattttaactcattgggttttcattgtttgctaacaataaacaaaacacacgctttcacagatttacttgctgaaaccggaggagggcggctccaaaatgccgttggcccacatgttcaaggagcacatgttttcattgacatgggactcggcggccaccgttatgttgcagggccgtgacttcgtcatgccgggcgaggtgggaattgtctggcaaattggtcaccgcatttaaaagaggggctatttaaaaaaattttcttcaattgcttattatagtaatattattttcattgtttcccttccccctttagactgttgagctcgagtttctgttcaagtactgtttggcggagtgttcaaatgcacccatttcctcttccaccccctttttaaagcactccccaatttgttcgtccccaacagcgtttcactctccgccatgacaaaaccacaagttggttttgtatatttgttatgaaatgggcagttgcctcgaaaaaacgaaaattcaattccaattgccgattaattaatataattaattgattgaattctttgtgtgtgtattgtgtagcacttttccgttttcagtcgcctgcggcgtctttttggaggctcttcccgagtcggagggcgaaattcgcgacaaaaagtggaggaaaatgcaaatgcgaggagtgatggaaagtaaggccttttgaaaatcaaaaattgtttatttgtgttcggtcctttccttttcatcgtatttctgttttctcatttttcaggggttggtttcaatccgttcggcaaccgatcgtttgagcgagcgtgcaaagtgagttttattcgctgcccaatttcattcattttaaccaggcacataagcagagggatatggcagttctcctcccccacaaattttttcggaaatgtttaattttaattttcagcaattttaccctacattttccctggcgttgcctaacatcactgccggatcccaattttcttatatttgtgtcatacattaacaaggggtgcgtcggcgcacccccccccccccacgtgcgtcgtaagggggcggctgtaaaggaggggaggaggtcgtaacgaagggggaaaaagttaaaatttgaacaatttccgtagtgaaacccatagaaaattcaacaaaattttcccggcggcgcctatcggcaccgccggaccgccccaccccttcccacgaagttttttggaaaaaacgcgccgcaaaaaggtttgaatagcaacaacaacaaaaaaaggtcgccggggaaaaatagggaccgacgtaagaaaaagttggtcctggcgcacccccctgcgccaaacgtccgacgtatgggggtctgactggcgcaccccttgttactgtatgatttgtgttaaaattttgtttcgaaatggctacaaatttcccctttctcacaaagccagaaacttttgaaattaatccctccccctttcgctttcagcctgactataccaattcgccgaaggacaacccggccgaggcattgttcaaagccgaggcaaaagcctagaaagaactttagcgaggggatgactttagatgaaggatttgttttttcattaattaaatcactcatttccgtttcatttatttggcgttctgtttttattccatgataaattcctctttaccaatcattgcttttgctgattccctctatagtaagattctcccccccccccctaactcacttctgagcaaatttaagactttttagagagtgttacgggcgacagttgggtctatcgacgcataatcttaagtgctataaaggaaaaacacgggttttcctaaatgtttagaactgttcgaaaaactaaccaaaaatcgcactttttttgtatgacctatttttgaacggtttttcataccttaaaaaattcaaatcaaaaatcgaaacaatttcgcatgctatacaaagtgttggctttcagatgataccacatctttttaaatttcttttttccctttttcgggattatcgtgccttaaatgccttttttggcatttttccattttggtgttatttttggcgtttttacgaaaaatccattaaaaatgcaataaaatcgggaaaatgcaccctaagaaatgacccgaaatttttttagaaaacacacccccttagaattgaagatttttttttcaatagacctctaagaaatgagaaatttctcaaaaattaatctccaaaataatatattttttgataaaaattttggtttaattatcaccaaaattatctgcgataagggcggagggaatggaatataaaagggacgaatgaatgaccaatgaaacgaaatgaattcgcctttttggcgcttatctccgcgccgacgaataaacgcggaaaatgaatgaatgttttgattttgtgcatttatttactctcctttttcacctctgtgtgcattaaattaaattgcccaaagtttaattagtaatttttaaatgcaaaaatatttttgttttaaaaattgttttgggaacaaatagaaaataaggggaaatgcaaacaaaatcatctttgcatatttaagttaagcctgtaatttataaaacaatttaattcattaaccaaaatgaatattaaattaaaccaaaaaagtaaaaattgcagaaaataatgatagattattaataaaccaaacgcttttctcattaactaaatgcactcattaaaaaggacaaattttgcaatattattttttatgcggcatttttttttaattcgagaaaaattttttaaaaaatttctttccatgcctttggttttgccaataattatttcatttttaataaataaatttcccagaaattcctcccacttttaaatgaaattgcttatttttgatgattacgaggcgatgagcgctttcggcgcccaattggtcgctcgaaggataaacaacgctttggaacaacgaaaagtcactgccggcgcagcgaatgtgccaaatgggcgctctctgtactcagttggccttcccaccggtgggaaaaaatttggctttctgagaggccattagcgctactgcaatgcataataatcagaaatttctgactatgaaaagcctaaaattgtcattttttggacaaccgccgagaaatccaaaaagatgcattttttctggctgttcttttgtgtaattggtctttttaatcacttcctgattactttttcaatctgatcatttgctctcaatagaaatcatctctgattatttgtcggtcttgtgccattgttgaccgatttttgccatttcgttttcgactaaaccgtcacacgaattgctactctttctgatcagtttttccgatcatttttcaggtggcacccctctgggcttgtactgtaagctgacagagatgcacaaggctggccaagtgtcgtttgccaatgttgtcaccttcaacatggacgagtaggaaaaaacgggcgcattattagtgccactttgcgtgatctaattcaaaccgaaccagcagcagcagttaaatctgctgatcggttttcgaggcgccatttgattttttgatcagagtccaaatccggcactattccaacagttgaaatatattaaccgattttaaatgaattctttagtcatgaattgatagaaaatgtcttttttgcttatcctaagatatgttggcattccgcgcaaccatccgcacagttaccacacattcatgttctccaatttcttccggtgagtacatattttgaaaggatagaaacattttgaagggaaaaatggatgaaaaatccttctaaaaagtgccaaagttgaagaattaccttatttgcctctgatcaattattcactgatcgcccccaattttccctttaggcacattgacatcgatccgtccaatgtttggtttttgtccctccgccactaattttgtgcccccccctcccctcaaaaggtgcatattccgaatggaaacgccgccgatctgaccgcggaatgcgcaaactacgagtaagaaaggcgacacgatttgctgttcaataaattgacgccttttcactattttaggcgttcaatcgccgccgccggaggcattgatttgtttgtgtccggtgagtgattgaaaaagcatggaacattgtgttgaggttttgatctgtctgtttggtccaacttaagctctgatcagttggcctggcaatttgacacaaatgtcattctttctgccaattttaggatggcataatacgcacaaaaatgcttttttagcttggtttttgatgcttataggacactttttatgtcctccctttgtgcccttttcttgtgccattctcaaactgacaacttagtgatcagttcttgtttgtctttcctgatcaactttttgtctgatcnaccttaattgtatctctgttatcactcggccttgtctgttttatctaattttcggatcagtcatctgctgatctcgtctgattttc

SEQ ID NO: 5501 - DNA, 1541 bp, Heterodera glycines
ggcaatgttttgcctgtttctgttcgtcctgtcgccctccctttttccccaccgtccgccgtcgtccgtccgttcgctttcttccacgccgttgcgacctttgactctttctttgtcaactcattcgctcgcgacattaatcactctgttaatatttggaaatctgtcggcggaagggtcgctcaaaaaagcgacccccggcctttgctgataaaatcgtatctgtttgatcattgatcggtgcttgcatgagctttaataatctgattggactgggatctggtcccccggtcgttttacttcataggaaggcaggtaaaaattggtaaattcggcttttctcttgaaagttaaatgccgtgatttgccacaacaaatgccggtggattctgttcgttttgtattgcccaacaaaatgacgaggtccgtccaattttcggctttctttcgattctcgagaagagtgggatgacgacaatcactcgacaatattagcttttctgtttgtttagcagcagcagcaaagtgcactcggatgaacgaaaaaaagcactgacaaaaaatgaattgaatgataaatcatgacaaggcggcgccattctttggaattcgtatcattatttaattacctatgtaattaattacattcattgctttttgttttcatatgcccggacgtgtcaaaaattaaatttattatttttaggatttattaaatttttccttttatttaaattttttaaaattattatattactatgtgttattttatcccggtcaattagctaaattagtaaattaattagactttcgcattcctttaaggtgtgataattacctaattaaaattaaattaattaaattctctctcctctgccttcttttttcctttctctctctctctctctttctccttcactttttctctcttctttgctttttttctgttgttcaagtattacactatgggtcaactccactgtgcagaaaaaagcttagtactatctcgtcgtttctctttttctttgtaatttctctcacttaaccgtactatctcttcaatttttaatggaaaaaataacatttacttcatcatgtttaactttttttctgcttgttaaattcacaacatagagaaaaaaattctgaattgatttatgcaaacattactttaaagttataaaataaaacataaaaatgtatttattttcctctgattttggcgtactattttcatgtctaacacattaaatataaaattctaataattttgcttatacggatagaaaatcactttggacctttagaatcaatagaaaaatcattttgtttagcattttggtcaaaaactgcggcctaagacttgagttataacgtaatgaaaattgaaagacgcataacctttctcttatgcgccaaattgcttagcattcgcttagaaaaagattcttattttcaaatactttttttagatatcgaatttgttcagtttaattgggaatgaagcgagttacggctgatcaaaataaacaatacaaaaa

SEQ ID NO: 5502 - DNA, 4279 bp, Heterodera glycines
ccaaaatttgctaacaaaaatgcaataaaacagaaaaatacacccctaagaaccgacccaaaatttttttcaaaaaatacatccctaagaatcgaccagaaaattttcaaaaatgcgcccctaagaaatgaaaaatttctcaaaaatttatctccaaaatttatttattttattttcttgacgataatttttgattttgaaaattatgtatatccttaatgacttggcaaaatatttttgctttttgatgaaaattttcgattttacaccccctaaattcggaactttttggcacctattttcccatttttagcacctattttgggggttttttagaacctaaaacctacttattttggcagtttttagcacctaaaaatcgaagccctaataattagggttcggaccccgtgggcgggggtggcttttcacgggggcgggggatggcgggggtcagagtcgcgggggcggggacgggggcacgataattccgcccccgcgggggcgggggcgggggtttgatttgaattaactccaaaaaattttacaaaaaattaattttttatgaatgatgtgatggctccacattcctttagtcaatgtatcgcctcaattcaattccttttggcataaattacacagattttgtctaaagaattaccaaattttagagatttttggctaattttttaagaaaaaataggtttttggggggccggcggtgccgataggccgcctggcgaattttgaaatttaagctcgatttctaacagatgtttacaaaaaaaaataagatttttacgataaatttttgtttttttaatatattaaattatcatgatttactcaagcaaaattggaactcagatttgtaacatattttcttgaggcacatttttccaaaaaaaaaaaaaaaacttggtgaatgtgcgagcgtagaggtccggcggtgccgataggcgccgccgggaatgttaatagattttgtccaaaaaatgataggtttttgcaatttttagagaatttttttaataagatttacgaatttttgggccctgcgatgccgataggcagcgccaggcgaattttaaaattaaaaaaataaattaaaaaagaaacggtcaacctgaatcgaactcacgacagaaagtaatgtcaaggttgattcactaaccactacaccacactacactccaatgaccaataataaaattaactttaattcataaaaaaattgtcaaaatggttaaaaaaatcaaaattgtataaattttttgccttttatcaatgaatatgtcattcttaggggtgcattttcacccccgcgcccccgcgggggtgaaggtcgtgggggcgggggatggcgggggtcagagtcgcgggggcgggggtgaggccaaaaaacctgtcccgcccccgtcgggggcgggggtgacgggggcggggtccgaaccctacaaaaaagcatttagcagtgtaaattttgaattagcgcgcaaaaaattacgccaattacatggcgaaatgtataattcctttttttcatttaaatttttaaaatgatgacaaaattactttgaaagtttagctgtttatttaaaattccctttcaattaaaattcttattctttgacaattcacaattttttgttttttcaagcttcagcaaaatgacctcgcaaggagttgaaaattatttaaaggaccaaacgatctctgacattccgacgatcgcggaaggctttcaaaacttgatgaatctttacatcaacaagtaagcaaaagttaggtgcaagtttatgcgtccaataatgactagagctgggaatttaagtcaaatgacttttttttttgctgactctaaatggccttaaaatgacttaaaaagtgtttctaaactttttttttgaagcttctaacatgcattttttgtgactttttttgacttttttaaactttgggatttttatgactttcgagtttttgcgacttttttcgtgatttttttgaagcaaaatttgaattttagcgaagaaaattccgaaaaataaaatttcgatcgataaaaaggcaatgaaacctggatgaattttttcttaattgttggaagaatcttttttatgcctattttaggacctatttataaaattaagtgcctaaaaatacgatcaaaatggtattttataaattattaaaatggaatttttttaacgttggcctaatttttcaggacttttttgcatttttacgtgtttttttggatttttttgtgctttttggctattttttctggacttttttttatgacttttttagtcgactttttgaagatttttaatgacttaaattcccagccctaataatgacatcctcagtttcttagactataactttttattacatctctaaatattttgtttattttaatgcttttccaggctttggaaccaactctccgccgaggccagtcagctcgtacgtaacaaattgtttgtgtcgacagtgaatcttttccaattttacgaggttaatgcatttatttttgaaaaatataaaataaaaaaatgaaaattttgctcgttgacaattgaacgttttctttccattttaaggaatttgtcagagacttcgagcggcgcattgagccattgcaattaattgagctgattacgccaattgccgaggacatttttgaaaggggtgagcgacaatgatatttccataaaaaattaacaatttgcagacagacaatcggcctacacttttctggacaacttcgataaagtgatcaagcaggacaaaagggccatcgttcggctggaggccagcaaaattcagctccgtctcagagacaaaccgacggccgaggcgaaatgttgcaatgacccggcattggttcgggtaaaatattagcgaatgttcccgaaatgacaactaattattgtggtagaaaatgttggaagaagcgaagacaatggtcgaccaactcgtcgaagtcggctcggtccacgccgcttactacggatgttcggcggagtaccaattccaaatgggcgaccacgaccgttactatgaagaggttggagttttgttcatttttaattgaaaatgcttcaaaaacccattaggcccttcattatctcggctgtgaagacattaacgtgaaattgagcacggaacagaagcgacaacaagccgagaaaatcagcatttcggcactccttggcgaaaacgtgtacaactttggcgagctggtcagttgttcataaactaatccgttttgccattccctctgcttcatttgtaaaattcgggttttttttattgaaataatttttaatggatagaaaatgatttaaaaacggaggagtagcaaaattatgcaaattattacaattttatgctaactaattcctcagtgatttttcttttttgagttggcccatccaattttgaacgatttgtccgacacgccaaacgcttggcttaacgaacttttgcacgcggtgaacgccggcgattgggacggttttttgaaggtttgtcaatggaatagcaaagcccagctattttctactattttcttttaagcacaaagagaaattggtcgccgcttattcggaggcagggcaaaaaattgaggcattggaacggaaattgcgcctccaatgtttgatcgaggtaagtgttgttttgggagattgtcgaatattgtatttattattcatttctgccaaattaaaattgcctcaattttcagttggcgcaccgattgccggcccaacgacgtgacctcaatttcggggacattgctcgtgttgtccgagcggatgaggacgcggtggaactgttggtcatgaaggcggttgccaacaaactcatcgatgccaaaattgacgatccttcgcgcgtggtcaacgtcagctgggtgcagccgcgggtgctttccattgaacaggtgaaaaacgatgctgggaatgaagtcaaaggggtggaataggcttttcctcactttagggacaattaaaatttcgtataataataaattttatttgttgttcactcattaaacaaaaccccaattaacagctcaaagctttggcgggtcggacgggcaattggtgcaaaaacgttggcgggctgaaggaagagctccaattgaacactaaggacttgatcatttaaacaattatcatttgtgtgtgtatttgaaacaacccaaatatgttgtctgcttgaataaactccgaaattaaattatataaatggccgatcaaat

SEQ ID NO: 5503 - DNA, 1059 bp, Heterodera glycines
  unsure (1)..(1059): unsure at all n locations
tgcggttttcatgatatttntggatgaattaatttagtcatttttaaattaccttcaattgattcgcgcatgttcctgtcgattaacaatcgcacgcgaaatttttttattcataatttctaccaattcatttaatattttaaaattaaaggatattaggtcaacccgtaaaaatataccacagattatgatattatattttgttttctattcaaaaatttaaaaatgaatattagcttagtcatatgtataaattggtgaaattggttgggttctaaaattgtttaaattctaattcataataacaatttaacttttttgcatattcatgtcagtcagtaataaatgatttttattctttcgtttgggatgcagtggattttctggaattaaaacatttacgataaaaggtaactttaaaactcgacaaatgaaatatgattaaatttctatttgaaaattattttcaatatcgcgggttatttgttttgtaattatttttttattcaatttaattttaatttacgcattcatatttaattatatcatttttcttatctgctgccatactggagaaaatttatgcattatttagtaatttatagactttaaatttatattaccaggatacacttatttttacaaaaatattaatactattaaacttttttttgtttagagtaaagaatttgattacagctttcgtaataacatcattaactttttttatgaatttcgtttagtatgcgtaatatatataaatagcatttacttcattttacaaaattatgtatcaaatttaaaaaaaaatacttttagttttatttattttgcatttagttagatctatagaaggcgataatatatagttacattaattaatttatatgatatcatgtgtgtgaccaaatttaagattccgtgtaccatgggatgaactttcgtcgacatccgcattctaataatttcattttaatgtataactaaaatacccatttatattacgaatctttacattttgtctaataattatatttttaatttttattaatattatat

SEQ ID NO: 5504 - DNA, 4224 bp, Heterodera glycines
aaacaattagtaaatttaattaaaatataaaatgatatggttataatttattgaagtgcatttcttttaccggctaactgtgatgaattttgaagaattttatttattctgcgttttgaaatgtaaaatttgggaaagaacaacggatttttcgatatattaatgaatatcaactctttatttagtgaagtataattgggcaagagtaaaacttttaaattaaaatttttcattattttattaatattataatatttattgacttattagttgtaaattattttatcaatattatgctgctaataaaatatttacataaaatttagtttgaatatcagtagtcattttaatttttaaaaataatgctttaaaaatttaatatacaaagtatgaaatattcaaaagtaaacataaaaagtgaaagaaaattctcatacaaattaagaataatttaaatacattttgactgaaataaaaagaggaatactttttatattactcctaataaattacaattttatagataaaaaatattacattataatattttttagttatcaattatttatgaagtttcttctattttacgagttttctttttatcacaaagtaatcaatgacttaagtgacttcagatcagtttcctagactcaattggtcgcgcctcgacattcaaattaaaataaaaaattttactattaaagtaatatattgttaaaaagctattaaagcataaatcattgaatttttcttaatgttttaagttattttcatttatataaaattattttaatcaaaacaataaaaaataataaaatagaaattttttttaataaattaaatttcaaaataaattattcttgtttaaaattacattaaataacaataattagctataaaaatgaacataaagaataagaaatataaaatcaaaaaagaaactgaattaaataaaaaataggcaactttttcggcaatctcattcgataatataataaaataatttaactcaatcctagtttaaaactaaactaaattaatgttgaccaaaattattattttaaagaatcaaatcttccctgatatcagctaattgcactacattaagaacaaataaatgagaacgcttaaacaaaattaaaataaaactattaattgctataattaaattatttttcaaattgaggaatttatggataataaaggagtttttatatacgcagaatggcttgtgtgcatgatcatggacacacacctggaaaacttataaatttaaagaaaaaatttatttctgaaaaaataggaataaaattaaacaaaaaaatgaattcaaatgaattggtaaaacaagtaatttgaggacgaattaccaactaattaatcccaaaaaagggaatataaaaacacaaatcacgataagattccaacaattctatgcaacttgcatgaacaaattatgtttagactacccttaaaaaaattttttttagaacacaagtagtataaggttacatttacacgtgtccaaattccctcccccgcccaaaaaacacccatttttttaccaatgttttttaatgtcgagaccacccagggtgatcccaacggccggggtccatacccatgagaggatttaattcacccacaagtcagggggcccgaacccaagagccaaatccagagtacaaccaacagaccatggatagtgttaacagaaaaaggataagtgtcatatatgtatgattaaaataaccaatgattttttgtcccaagggccggggtccatacccatgagaggatttaattcaattaattcacccacaagtcagaggacccgaacccaagagccaaatccagagcacaaccaacagaacaaggatagtgttggcagaaaaaggataaatgtcttatatgtgtgatttaaaatcacccaatcccgggtgccggggtccataacccatgagacaatttaattcgattaattcgaccacaaacaaaagggcccgaaccagagagtcgaatccaaaacactaccactcggacagcggtacagttatccgaaaaaggaaaatgtcagctatgtatgattaaattaaaaataattcaccacaaacaaccgaaccccagggtttttgtcccagagaccggggtctaaacccacgagaggattcatttaattaattcaccaaaaaacaattcttttaatttaaattaatctccagctaacatgggataccccaattccaaaacactaccattggccaaggatatacttatccaaaaaaaaaggataatcgttttaatataattttgattggtccatccaaagatggaattaatcaattgaaattcggtgaaggggtgggggtggggtgggggaagaaagatgtgtaaaatgcactcacatgggggggggggagaattgcactcgcgatggatggaggagaaaagaaaaaaaaagggaatgcacccacagggagagaaagaggggagggaaatgcactcacggggcgagggaaagaaaggagaaaagggaaaaggaggaaaaaatagggaaaaaggaggaaaaaatcagagaaaaaacggaaaagaggaaatagggaaaggaaatagggaaagaaaaagtggaaaagggaggaaaaaaaggagggaaaaaaaaggatgagaaagggagaaaaaaaaggaaaagaggaaaaagtgagagaaaaaaggaaaggaggaaaacgggagagaaaaagggagaaaaggaggaaaaagagaaaaaaaaagtggaaaaatagagaaaaaagaaatagaggaaaagcgagagaaaaaaatagaggagaggggaaaaggcagagaaaaaggaaaagtgtagaaaaataggtaaaaacaggagagaaaaggaaaaatatgggtggaggtggggagaaaaaaagatgtcccaaatgtttgcattcccgacccatgattttacctcatgaagcgcgccaagttgtcgccaaaaagagatgaaatatttttgagtcaagagcataaagtaaaatacaaaataaagcggtgattggctattgaattaaagatagtggcgggagaagtgaagcgaggagaagcaaaggattagcggacaaaatcgcaagtgttcgttcgctcaacactcggagattgatttcggagataagaggaggaggggaaggcaggcgagaagcaatgagggaaatttgcgcaatgtttaggggagaagctcccaattgtccgcgtaaaaatccggaaattcatttcggagataaggatgaaattttagctgggggcgcgtggaagagggggacagtgggaaaaatccgcgaaatgtctacagatagtcaatcgttcacgcaaaacagaagattgaaaaaaatagttagagggagaaagagaaaagaaagaaaaaagattgggcaattcgaagaaagtttcttgagagaacaacgaatgagcagaacgaagtttgttgatcaaagaaaaacgcatttaaaatgtgagaatgtttgaatgtgtgccaagggacagtggtcgatttggcaaattgaggttaatttgataaatattcatcgtttttcctctaaccaatctcaaaatgtctctaccaattctctctaaccgatctctaacgaatgttcacgagcgacgaacgggggacgttttaccaattgattggacaattgtcaaaatgtcaccgctcgcggagttcaacttcatccatataattaaagaattagggtaacggaagaaaaaatgctattttataaaataaagatgctaatattaaattagttaattaattatataattaaccattggcaacagagaacactcatggaaatctatggcggaagtgcaacaaataaaatccctccaaaacctttcgtagtacgttcagcgacagaaaaagtccctccgctagcattgccaataccattttgagtcatacaaaattgacaatgagatggtccaccaaatggactccgaatttgaccacactcggcatatttgccgttgggttgggggggaggggaggcaaaaaaaaacttttgtatctgaattgggtgtgtgtatcgattttccaaatgaaatgggtagaattccaataattctaaatttgtgccaaatctcaaaccaccgaccgaattgccattgacgcgttgttcgacgaactattacaagtcacgtgcgattagttcgtcgccctcccaatcgtccaaacgg

SEQ ID NO: 5505 - DNA, 1464 bp, Heterodera glycines
gggcggctgacatagcattccctagggcgacaccaatgtacagatgaaacgcactgcggaggacaggcgccgtcgacggaaagaatgcgacgcaaaagtcaatcgatagactcacagccacggaaccatgaaaaactataaagaaacaaattaaagtaattaagatagggtaaaaaagaaacaaactagagtaattaagatagggtccatttaaatggattgcttcgtatattttttctcattgttcgttcacctacttcgtccaaccaatcgacaaaaaccataagaagcggagcttccgaaacgaaagaatgccgacttttgttggctccatttgttgctgatcacattgaaaatccaaagaatgaatgacgtcgctgcgaatttgttatcataagcaccgccgttactaccgtagtctctgtttaacgaaaattgagacgagagagagaagagagtaaaagtgagaggagcaaaataataagaatagcgagagtgggttaatacgagagagagaaagagagaggagagagagaaaaataagagagagatagagagaccgagaataggaagaaaatagaaaaagaggagagagtacgaatgaatgaaataaagaaagagaaaactgagatagtgagagagatagaaagagcagataaaaagaagagagcaagagtggactcgctcagttcggccctcacggttcgtccccaacacactgaggccccaaataaatcaaaaaaaattttcaaacaaaattttcatgtaaaggttagcaatcaatgattttttaattaagtgttctttttatatttaggtttttaactattcgaacataaattctatacattttttatgtatagtatgcaacatcaaactgacagcatgatggccttctctatatatattccaagacaaatgccggtgggatgattaaaatttgacgatttgagttcaaagacagcggtgtggacaaatggaaaggaaggatttggacttcattttgagatgaattcaaccaatttgataaaccgagctgaagatgtgagagagaaaaagagagacatatatagatagggagattgatagagagagaggagagatatagatgcaaaataataacagataactagtgagaaattgaagagagagggtatgagatagagagagaaaaaacgagagagagagacgaagagatagagaaaagtaaaaagagagagcgagatggagagggagaggaactgacagagagagagagagaaagaaagagagataaacgaaaggaaaaaaagactcctagagaaggagagaaattaaaaactaaaagaaaaagagagaaaggaggaggggaaaagagacaggtaagaaaaaacaatacatatacggatcggggagaaaaaagtaaaatgcactccttcaacggaaaaaaagaggttaattctctccttggggtgattacggaga

SEQ ID NO: 5506 - DNA, 1734 bp, Heterodera glycines
  unsure (1)..(1734): unsure at all n locations
tttctctattgaccgtctttctgagcttggtcattaatcgtttagctcctccgatacggtaatttcttaaatgaaagtaaattatttttttgtaatttttaaaattttcaatttttcagccctttgtcatccgacgttggcatttggaaattgtgcaatggcaaaaatggaacaattttggtggcaaatgactgcacaaagtaaagtatttcaaaaataaattttatttattttttaatcattttaggctccttctctgctaccaaagcgaaatggccacaaacagaaaaattggaaaacgttttggggtgggcaaaggaacaattggcaaactgaaatttgtggaatgtgccgaagagattgccgaagaccaatggcacggtctgatcattgccaagcaccaagacggagtgatcagctacgaatcgaggcaaatttcaaatgaaaaatattttaaaatttggatttaattaattaagccatggattcgacgacattttcggcaccgaacaaacgaaacaaacggaaaaatatttggaaattaatttgaccaaaagtaaagccaaattaataataatattttaatagtaattaccattttacagatgctgaaccacttggaaatgaacttcaagaagcgctttcttctgcagcattttttgacgattttatgccatttgttttggcatttgaatttggcgcaacattttgcgcagaaaacggcggtaccaccaaattgtgcaaagagaaagtgcaatttttatatttaaaattcgtaatttataaataatttcattttttagtgcctttcccaaacattggtcgccccaaaaacaaaggcaccgtttgttggcccaaccaaattccatcggacaacgccacgcgcagtgccaaaaaccacttttggcattgtgccaaaaactgaagaaacctttggctttgtgccatttgcacgaaatgtggaccattttggcacaaattgtacgaacattttcttcccggcggaagtggacaaattcttgctgaatatcaccgcgaggccatacgaaattgcatgcaatgactatgaaaaacgtgccaaaattgacgagccaataccgtccgattattggtcaggcggacgccttgtgaatgcttgcatggcggtgccaagtgaaaaatgcgaaaagtaatttttggaatttattttttgaaaaatttcaaagttgaaggctcgtcgaactttacgggtgctatgaaagcattggcaataagccaagtgtcaatgccatcggcgaattgtgccaaaaacatctgaacaatgccacaaatgccgctgggttttgctgttcaaatttgtgcacatcggcaccaaacggaggcgacgaatgagctcattgttgaatcgttcatcaacttttcgttcactaatggagccgtttgctaattaaataataattattaattttattaattaaggttccaaaaaacgcaaaatttgccgatttcaattgacaaaatttgggacacaaaaaagaaaatgccatattttcttatcgaatttggccaaaacgagcaaaaaagtgcaatccgagaaaagggcgacggagaaaattttggtggcaaatggaacatgaggcaaaaagtaatgttaattaattttaatggcatgccatttagaatgatggcatncgctccatctcaaaaacatgcgccgcaatgggtcacncactactttggcaaaatgattcattt

SEQ ID NO: 5507 - DNA, 2720 bp, Heterodera glycines
accatgtgatatatacggcgcagattgtgtgccgatcagaaatttgttgttgaaaattgaggcattggaaaactgtggaaagaacgaaagcgaaaacgatgcggtaaaataaaaataaaaatttaaaaatatatttaaaaattattttagattttcaaaattccgtcatgggccccaccacttccgccaccgatgaccatgaaaaagtcatccgaaacattgttatgtgaaggggatatgttttgtgacaaacgaaggcttcaacaacagtacaacagattgagggagagtgagtcattttaaaaattaaattaattaattaaaatacctaattaaaaattcaaattcacagtttgtgggcttaagcccgaagaaatggagaaccagcgcgaaaaacgacaatacgacccataccaaaaatggaccgaatccccgatcaaaatcgcattcaacaaaacagctcgtaataatcttgccacatcatacagtatttgaacaaatgttttaagtgcctgaaaattatgacctctggggcaatgccatcagagctggagcaaaattaattatgtatgaaatgatgggttgaattttttgtattctgagaatgatctttttaagtttggttgctttcggagcgtttgtcggggtttcagccgagttttttatacaaaaaaatgggggggggcgggtggaatggaaagccgggagttataaggaccagtgatgccgcgggttgagaaaaatttcgggtttcgggtcgggcactcgaaaaatttcgagttcgggtttcgggttgagaaaaacttcgggtttcgggttcgggttggcatcactgatgaggacgcaaacccgaaagctcaattaagcaaaagcgacaaaaagtgccagaataaagtggacagacagtgaatgctgcgaatttttaaaattttcattttccaaaaaagcaaaaaatgcatatttttaaaattcatctctctttctataaacagggaagtcacctgtgttcggtttgaaattgttgatgaaatggtgaagggacagaatggcattgcgattgcagatgatgagcttggcggtattatcgtattattcatatatttttcacttgtcccaattttcattcataaaatttggcacattttattttttcaaatttttattaattttacccatttttgtagcctgcggcgtgtccccagtgggccgtggcggaggatggcaattccttcacctggcaatgactaaccgacggtgcacggatgtaattttggcagcacttaaaatatttgcattcattttttgcctctgttctcccattttgtcaatgtttattttcaatttcactcccatcggggaaaagccgggatttaatttgaatttaatttgaaactgcttaaggtattcaatatgtccgtcgttgctggtcatgaattgatgcacgcgcttggctttgtgcatgagcaaagccgaagtgatacccggaattacgtcattttacggaaaaatgatggagtaattaacaaacatttcaatataatttttcatttgctcattataaagtattccaaaattgaccaatacacgcaaaactttggcttcccttacgatttcgggtcggtgatgcattatgaatctgggggcaatcataaaaagtatgaacggttggattttaattacctaaaattggaattaaagaggcttatacgacctgatcactttgccacgcttttaccaacaaacgattggccaacgcgaacgaatctctttcaaagacgcggccataattaaccaaatttattgcaaaggcaaaccaattaaacataattaagtaaattttccatttgttcagactcatgcaaaggccatgaggacaagtgccaaaacgggggctatttgaatccgaatgattgcacaaaatgccattgtccggacggatacggtggcaaatactgtaaagaactcgaagagagtgagcaattaatgaattcaacaattaaagcaattataaataaatttgaagatttgaattgcgaggatttgagtggaattccgagagaattggtggccaatcagtcagcagtgttattgaaaacgaaggccaaatgtgtggggaataagccgtgccgatgccattggcgaattaaggcaataaataatatttttgaaaattttaattattttgagtgttattaatgcaaattttaattgcttttagcctgaagcagggaaaaagatgcgaattcagttcaaaagtttgagcaatttgtttgagtgcacatacaactgctcatcgggctatgtcgaggtcaaataccgagccgacaaaagagcccaaggcaaaaagacaaacaattaactaattaatcattaattagcaaaatgatggctcattaaggtgccaaactttgttgtgccgcatcactcactgatctgcaagcaaatgaatacaaaaattggattgaggcggaaaacccggacatggacattgtcatttccgcgcacctttcaacaaaatggaccgtatcatctaccagggatcacacggaattacgacgatttccgatcgccattcttggggttggaattccgatttccgaaatttttgataaaaattcagaaatttttggaatttttttttaattagcaatttttatacaatttctgtatataaaatgcactgaaattttgaaaaaattttcccggcggcgcctttcggc

SEQ ID NO: 5508 - DNA, 3240 bp, Heterodera glycines
  unsure (1)..(3240): unsure at all n locations
tttttacgtgttntaatacntaaanagcgttaataaanaattttgtttgcctattttagtgcctattcgaggatttttgtgcctattttgcgattttttaatgcctttttaggtgcctacgcgattttttctgcctaaaaaggaagccctagtcattacgacaaaaaattatgtcgtttggcgtttaaatatggcgtttttaaaaaatctaccgtaaatttgtcgtttggtcgtcacttttcttttggatattggatatgagtttttgaaaaaccgggatccgctccagaaaagccgggattttcggaactccgacctagtgcaaatattaatttcgaatataatttgaaactgcttaagactatgaacatgtccgtcgctgctggccatgaattgctgcacgcgctcggctttgatcatgagcaaagccgaagtgatgcccggaattacgtcattttacgggaagatgacggagtaattaacaaatattttcactaatttttcatatactcattataaaagcaatcgaaaattaatccaaacacgcaaaactttgacttcgcttacgatttcggatcagtgatgcattatccgtctgggggcgaccatgaaaagtaagaaacagttggattttaatgatcaaaaattggatttaaaggggcttatacgatcggatcactttgccacggttttaccaacaaacgattggccaaaccgaacgaatctctttcaaagacgcggccataattaaccgaatttattgcgcaggcaaaaatggtcgaaaatttcaggaaattttcatttgtttagactcatgcaaagaccatgataacaagtgccaaaacgggggctatttgaatccgaatgattgcacaaaatgccattgtccggacggatacggtggcgaatactgtaaagaactcgaagagagtgagcaattaattgattcaattaagaaagcaattataaataaatttgaagatttgaattgcgaggatttgagtggaattccgagagaattggtggccaatcagtcagcagtgttattgaaaacgaaggccaaatgtgtggggaataagccgtgccgatgccattggcgaattaaggcaataaataacatttttaaatttattttgagtgttattaatgcaaattttaattgcttttagcctgaagcagggaaaaaggtgcgaattcagttcaaaagtttgagcaatttgtttgaatgcacatacaactgctcatcggcgtatgtcgaggtcaaataccgagccgacaaaagagcccaaggcaaaaagacaaacaattaactaattaatcattaattagcaaaatgatggctcattaaggtgccaaactttgttgtgccgcatcactcactgatctgaacgcaaatgaatacaaaaattggattgaggcggaaaacccggacatggacattgtcatttccgcgcacctttcaacaaaatggaccgtatctaccagggatcacacggaattacgacgatttccgatcgccattcttggggttggaattccgatttccgatatttttgataaaaattcagaaatttttggaatttttttttaattagcaatttttatacaatttctgtatataaaatgcactgaaattttgaaaaaattttcccggcggcgcctttcggccttgaaataaccttttatttggttaagaacgtattcgaactgacgtatgaatcaggcaaggaaaattgaaaaataaataaattataccttttaaattttttaaaaattaatttattttaacttgctttcgttttaaatgcttttctaatcagaaccattacaaaatggaaaattaattgttcaaaaatctgttaaggcaacgccaaactcataaattcgaacaaatgcgtaaataccgataatttgtatgccgagaaaaggaaccccggcaccagcggtttgaagtgttatgacggggtcaaacaccaattttatgactgctcctgtcacggtgataagaaatgcctcgctgaagaaaaatgggcacacgacgcatttctttgtccaataataaaggtaattaattaattagttattcattaatgccaaaagacaccgccagatacatttcatataatattttggcaatttaatttttccgtactaaaaaattaccattttttgtataaaattagtgaaataaggataaatatggcaaatgataaaaacactctattttattaattaatttgtaaatccaaggtcaatggaattcaaatccaaggaagccgacaacaagtgtttacggacccaaaagattttcgatacgattggactcggattgagattgattgttatgtaagttgggtctgctatatcaaaaaaccctgtttgattgactaactttacagaaggccgaagcgagtaccgtaagcttttggggctacagtaagccgtacacaaaggaaatcattcgggtggacgaaatccactgtttgacttataaagctgctggagtaacaccaccgtcacagaaacggttcaagagtttgcaagttgaagaacagctgtcgatgaaattgaatccaagtacattattggacaatgcttcatcacttatccatgtgttcgtgccatttgttggccatccatgagagaaaaggggtgatcagtgatcagtgggtgatctgtctctgcagctgatcagttggccaattccaatcagcaaatttttattttatttttatttttttgaatgaatttggaaatgaacaaataattaatttaaaaacgatattgtcttaaatttaatttaaatgcgatatttttatttatatgcttgtgattttttataagattttttgttaaatgttataattgtaaaattaatttattttaacttgctttcgttttaaatgcttttctaatcagaaccattacaaaatgggaaattaattgttccaatatgttaaggcaacgtcaaactcatcaattcgaacaaatgcgtaaataccgataatttgtttgccgagaaaaggaaccccggcaccagcggtttgaagtgttatgacggggtcaaacaccaattttatgactgctcctgtcacggtgataagaaatgcctcgctgaagaaaaatgggcacacgacgcctttctttgtccaataataaaggtaattaattaattaattatttattccaaaagacgccgccacacaaacctttcatataatataggcaatttaatttttt

SEQ ID NO: 5509 - DNA, 1335 bp, Heterodera glycines
  unsure (1)..(1335): unsure at all n locations
attgatatgaacaaatttgtgagcaaaaaagtacacacacatagcacatatagcatatacaataatagtgaaatgacaattttctggatcacaaacattaatatacaaatacaatacaattagtgacaatacaatatgtaaaggtcagtttatttcctcgccagaacatcgcatcgtttaaaggtatttgtcgataagcatgtttgcggagttgctcatcatcgacgatttgacggcctggctcatctgcgttttggctgccgcctggctcatctgggttttggcggtgcccttctgcttttttgccacggcgtccttaaaaaacggaaatcatggtgatcaaatagaaatttggtacaccaaaacatacgcttagaagcagatgccgtgccggttgtttgagatccatgtccacgatgttggtgtttcggatgtgtcgaagtgccagcaatggaagacgacgttccagcagtgcgcacagtgccacggcgtccttaaaaacgaatggtgaatgatcaaatagagatttggtacatcaaacatacgcttagaagcagatgccgtgccggttgtttgagatccatgtccacgatgttggtgtttcggatgtgtcgaagtgcctgcaatggaagacgacgttccagcagtgcgcacagtgccacggcgtccttaaaaacgaatggtgaatgatcaaatagaaatttggtacatcaaacatacgcttagaagcagatgctgtgccggttgtttgagatccatgtccacgatgttggtgtttcggatgtgtcgaagcgccagcaatggaagacgacgttccagcagtgcgcacagtgccacggcgtccttaaaaacgaatggtgaatgatcaaatagaaatttggtacatcaaacatacgcttagaagcagatgccgtgccggttgtttgagatccatgtccacgatgttggtgtttcggatgtgtcgaagtgcgcgcaatggaagacgacgttccagcagtgcgcacagtgccacggcgtccttaaaaacgaatggtgaatgatcaaatagaaatttggtacatcaaacatacgcttagaagcagatgccgtgccggttgtttgagatccatgtccacgatgttggtgtttcggatgtgtcgaagtgccagcaatggaagacgacgttccagcagtgcgcacagtgccacggcgtccttaaaaacgaatggtgaatgatcaaatagagatttggtacatcaaacatacgcttagaagcagatgctgtgccagttgtttgagatccatgtccacgatgttggtgtttcggatngtgtcgaangtgcctagctaatggaa

SEQ ID NO: 5510 - DNA, 8495 bp, Heterodera glycines
  unsure (1)..(8495): unsure at all n locations
gcaccagcctaatgatgaccctccgtggcacttcctcttcagaacagatccggcagaaaaancgnancggccaccggtctttaaaagcgactncancagcnggnngcggaggccggagcnggcgggcgccagggccaacggccgagcaaaggcaaggcagagaccgaccancagagcaaccgacagcacgaccagccagcagacgacaancncaagcgngnacaaggcccnanaggcggcgaccagangaancanaaaancggccgacggcagggcgagcncaagggcaaacncaacagagcngagcacgcacaagncccggacgaaaacgncggcgcgcaagccgcacaccgccagaaagcccgcgcgcaccgccaccgccgaagaccgacgagcgaaaacaacggccgggacacagccacggaaaaagcccgccacgccaaagnacgancccgcgccgttacagggtagctgagctcggtgtccaggaacaccttgtagctgtacagctggtttgagtcgtacacctcccgctggttgatgtgcactttcaggttccggatgaacgttgcgccgggcatttggataaggccgaccgctgcgtttgccggcacatcaaccacaaccccatcatctgccacttttttgagcttgaactctgtgcacacaaacaccttgctaaggtctacatagctggtgattgggtggatctgaaccaacggatttgtctgctactgcatgtgaaaaccacctgccttaaaatgaaagggcctagagcttattgggttcagcgtcaggtactccctgtagctggagttggacacagcgcagctcgttgggggtatggtgaagaagtccagccccgcatttgccacctcagcacttgacgcatccacttttttatacaacattttgctaataataaccgagtgagtcaaatcttttcttctttaacaaaactttttggggaacagtttgtccaacaacgtctgagggtttcaaaatgatttcagcttttttcccgcctcctcttctcttccttcttccgcgccccttttgtagtgatgaagaggccttgtccagcaattttttcgctccctcttttccttccgacaccagcgcgtctttgatgttgccgccctttgacacctcgttgaggaatcgtgcacccgtctcgaggccctctttgccaatctcggcagcaatgtttgctgcatagggtcgtgccgctgtgaccattggacgaaggtagcgccacaggttgcgcagcacagagccaactcctgctcccttctgtcgggggacacccaagaaataaccgtatccccgctgaaacgttggtgccccctcaaagacgctgatcggtccactgcctccactttgcggataaattttctcgagccgtaaatttgagccgtcaaaaatcacgcgaaccatctctctctcagaacgttaacacctttttaaactgaagagtcaaaacaacttggccaaactcaaatggcacctcccttaaataagtgattagaaataattgccctgctgaagagcctaacctcccggtcagagtgcgaatctcaacgtcaagcacatccacctcccttgctatgattttgtgaaacaacggcgcctggaagtccttctctaccacactacccgactttccctcaacggcaatcacttggagcagattggcaaaggtgttgccgacaatcatgctctcaatgacgccactgttcaggtaaatgcacaggtggctcacaccaccacccaaatcaaccgcatattttgcaagctcttcatttctgatctgctgctcttgttcatagcccaacacgtaggccagttgatcagtcagcgtaatgtgcgaaattttcccgttgaaaactttgagctcaaatctgccaatttgctcggtgaagtaaaagcggaaccctttgaccagctcgatcagctcctccttttcctctcgcgttttcaccgcatagttttcatcgtacacctcttgctcaaacagctcacggaactccccaatattctgttggatgtgcgcggatgggttaaactcgggcgcctcccaggggagctctgagtgccggacacggtatttgtgtacagcattcacaaagtggtaatcatccgtttcgtgcagctgttgctgtcgtttaagctcttccaactgcttttcctccgcttgctttttcttggtctcgttttccgctctctccgcttccgcctttgccgctctttcctcttctgcctttgttaccattgccactctctccgcttccgcttttgccactctctcttcctctgcctttctttcctttgctactctctcctcctcagcctttttatccttggtctctttctcgcctttcttttcctttgctattctctgctcttccttcttttcccgtgccagtttttcctcccttgccttcttttcacttgcctctttctcttcctttgccttcttttccttggctgctttctctgcagtcttccttctatctttttctgtcttacgacgcatctcctcttcttctcgccgtctacgttcattttctcgctgctttctctgctcctcttcccttcgctttctctcttcttgtgcccatttttcatgccgcaacgtttcttgttgagccgctgattgcttggtcaaatatgaaagtgggtttaagggcgcttcgcccatattgtcttcttcctcctcaacaaacgagacgtcaagaatctcgccctcctcctcatcgtcgtcgtcaatgttcccaaaacttgcatgcaccggtgcggacctttttcgagtcaacagccgttccacttcggcaatcatgccatgatgaatgcccctctcaagctgctgtggcgagagaaaacttccctttggcacacggaaacggtattttcggccgtcgtgcaggtgaacaatcacatattgtcggtctgatgtacccagctttgcccaacttaagccaaaaatcggacccaatagccatgatttttgcccacctgtttgggtaaattatgcctgacagtccaaccatccacccggccccatcgaacaccaacttctttggcaagtgcactttgaatttgtttgttttatttccaacaaagcctggcgtattgctcggcaaaattacaaagaaagagtttgtcatttgatcaacaagtataaattcttcaaaatgagatcgtccttatatcgtggtgtgccatctcggttcactttcccccatctttgatccagcggaaactctttgccatcgtcgtcgtcgtcgtcgttgccggttcatccttctttaggtgcttcatgatcagatcggtgcagtcaaagttcagctttgcacagtcttggcaaaacgattgggtgaactcaaggcgttgctgctcgccattctgattgataagtttgaatcggctgttcccctgccggaaattgtcatcacgacactctttgcacatgaacgtgaacactccgtacttaagaaattttcctattttttcaaattaaatattagccaaaacctttgggcgggccaatttccaaaatatggtcgggtactcaaacacattggtcggttgttttttgggcgattcatccactaaaatttggctaatttaaagaaatttgcagaaaaagccaaaccttcagcttccatggcttttgctttcttcattgcggaagcaatttcctcatggatttgtccaagcgaggcttgcgtcccctttttgagggccccggttgcaggtcaagcagtgtttgagtgttgttgttgtctccaattgtgatgacatcatcatcattttgaggggaaaaattttcccgtttcgactcatccatttctttaaatttaaaattattataaaaaacccaaaaaaaatgattacttttgttctcaaacaccaattgatcattgatttttctcggggccattacgattaagaaatagtttatgattataattgttaaaagcataaaatgaacctgcgaaaaaacacgtaattattgattgatagtgagaggggtgttagcgcgcagcgacctccagacgggctatcccttttaatcgataggccacgcccatccacaaacacatagacgagagagtagtggttagagaaagatacaaaagggcgccaattcaaacacacagtgaaacccaagccaatttattgattttttttacagattatggtactccctctgactgctgccctatccaaactgctaagctgtaaacccgaaaatttagcagaatatttgaacaaccccgaggcagtgaacaaagcgaacgcttacttggccggcaaaaaactcaaaacaacctaccagggtcgtgattccaagaccaaagaggtcaagttcggcacattttcggtgaaacccgctgcggaaacctacgcctttgagggatttcttggcaagtttccaaaaattcagtttcggtctaacacatatgcgttcagaggttaaagtccaccagtatttctacataaagcaccggatccgcctactgtacccacagctgaagtgcattgttgagtaccacaacaagggccactgcaaatactacccattgggtatacaattttgtccggaaaaaaaaaatcaataatcattttcagagttgttggccgttgaggaaggcggggagagtcaacccgtcgaaagacctgccgctgaaacggactacctggactacttgaactttcgcagtgggtggcaatcaacactctactgatcaatgaagcgtgtgcggcaatcggaaaagttgggcgaattcccggagattgagttcgccgtcaacacaatgggcgtcacggtgtactgcccgcggcacctgcaaacgcctcggtttgtgccatgggaccagcccgggcggtgctcgagctgtagaagcggaactgttgagctggactacatcatccagcccgagggggtgaccatcttttcgaatcggctaaagacagacggcgagaactttgtgccgtttgatgcaattggtaagctgcaggtgtatgtcagagtttgactcttttttcttaagtggactttgccgatcgtgcgaaattccgcattagggcccggaacaaggtgttcacgctgccgctgcgacacccggaggtgcacgccgccggcccaagcttggaagaaggcgtaaaagaacaaaaggaaatgactcagatggcataaacacttgtccatttttctattgttgatattctgatggaccacccaagaataaatgaaagtgagctcgcttttcccatcccttcggggattattgtcagcggtccgtcctcatcgggcaagacccagctggtccttcgcctgttacggcatgccaacgtgatgtttgacccgccgcccaaggcaataggtatgtgcaaagggcgtttctgtgcagtgggctgttgctatttagtatgggcatacggtgagtactcgacgcagattcccgatctggagcggcagggagttgccccccacgcaggtgccccgtctgacgagatgctgaaaaagctgccaaagccttgtctgattgtttacgatgacttgatgggtgacattgaggccaagaagttggccgatctgtacaccaaaaagtcccaccataacaatttttccgtgattttcctcacgcaaaacctgttcgataaatcaatgcgggtgccaaggtccaacgcccagtacatcttcctgatgcgggctcccaacgacatgcttagcattcgtaatttggccagccagatgttccctcgcgagcagggattcctgatggatgcctaccgacaggcatgtgccctaccgtacggctacctattggtgactctccacgcgaacagagacaacattatacgcctaaggacaaacattttcccagacgacgaggagagaatcatttttgcccccaaaaatggttaagcgggaacagaagatcggtgagcgggttgtgcacaactacgactatttgaagaagttgggaaagacaacgtcggagaagaagcgccgtcatttgttgaacagtgccggttgtgaggaactgttaacgcttgtcgagatttgtcttaacgttttgaacgggagtttctgtctgagcaggaaacaaaagcagagacttgcgccatttgcaaaagacatcagacagttggcacgtgtgcgaagcgagagcggtgcgcgaaaactagtgcagcagtcaggcggatcactttttgcccctttgttggcccccattctgattgaggctgcccgatacctgctttcgcgcagcaataatggccaataaacttattctgctgccgtacgagcactacaggggctggttgcagcgaaggagacaaagaatgacgacgacgacgacattgctgagcggacaaacttgggctttgtcaaacgacaggtgaccgctgcagtacagaagcggaaggaaaacgtcagcgaacggaacgcaatgtacaaccagtacctgcgccggtacctgaagatgcgcaaggaacataaagagcggcccgtccgggtacagctcagcaacggcgctcaactgctaaataaaacagtggagacgggtgtgcaggtacggcctggtccggacgaaccgaaggacaagtccgtgatggttaccgacgaagatgaagaggaagaaattgaagtgccaaagtttttaaccccaacaagccagacgcagggaagcagccgatcacccaggaccaataagaaagcagcaaacagcaaaaattgatcgagaagaaggaccacctgttggccatcagtctgatccgcagagattcggcgcaactgaccgtgggaaaatcattaacccaaagacgggccgagagtttatcgactcggacctggcctggtcaattgaacgcctggtggaccctcgcccggagaatgccccttcgccacgcggaaccaaagagttgaagaggaaactcgcacagaatccgcttgccagtagcctactcaatcgactgtttgttgggtctgggttcgtcggacaagtcaaacaaaacgggcgttttattccctcaaaatggacaagaaaataaacaaaatatacaccgacccggccaatccgggcgggtatgcgggggcgagtgccctgtacgcggcggtgaaggagaagcacccgaagttgaagcgtgccgagtttgaggactttttgcagaggaacaccacctacacgctgttcaagccaaagagggagaagttccaacgcctacgcacagtgcctacgggtttcatgaccggtaagttgtactggggcttattgtgcacaattcagggttcagatgttcaggcggacttggcagatttccaggcactttcgcgcaagaacagcggctaccggtacctgctgttggctgtggatgtgttgtcgaggcgaatgttcggcgcgcccgtaaagagtaagcgaccggcggacatgaaaagggcgtttgaggagctatttgagcaaatgccaagggtgccggacacactgtacaccgatcgcgggctggagtttgtggcaaaaccgctaaaggagttttacgcggagaagggcattcaaaagtttgagaccagttcaaagaaaaaggccgacgtggcggagcgtgccatacgcaccctaaagacccgtctgtacaaatacttttccgccaacaacacatcggtgtgggtggatgtggtgccaaagtttttgagtgccatcaacaactcagtgtgccgcgcgaccgtacttagacccaacgaaatcagcgacgccaatgcgagggaggtgtggaagagggtgtacggcgaagggctcgcacaattggacaagacaccaaaaatcagagccggggaaacggtcaggattcccgagcctaagcacattttcgagaagggtactgtatttcacacattttttcggtcaatttattttaattttaggttatatacccaattactctgatcacgtttacacagtagatgtggcccgctcaaccaacccccagcactatttgctcaaagactattatggcacaaagttcaagagaaaattttatttaccagaattaacaaaagtacaagttgatgaaaacacaatgtatcggattgaaaagaaatacaaagaacgagtgagagatggaaaaagtgaaatattggtgaaatttattggctttccggaaaaatattgggtgacaaatgaagaaataaatgaataaaaatattacaaaatgaagaaaatcaattgaaacaataaaaacagttatggcataatatcggggtcatttaactcctcttctgtgaacatgttcacattgaggtctgggttgaacagacaggtacaagcgcctgggcaattccacttacaccaccaacatttcaccataaatcagcacgtgatcatatcgagatccttcaatttattatgtttacaaaaattttattttcaaatataccggcgtgggcgtatgcgtacgttgtcaccgactcgggtttctccccggcttcttca

SEQ ID NO: 5511 - DNA, 1460 bp, Heterodera glycines
ctagtaaaacatgtaagaattcaaatttttcaggtggcgatagggcaaactgttccccctcttcaattgccattgaattcttatcagtcggagattggcacagtcgcgcagaacggagggcgacgagaggacagtgcggaattgtgccagaacttgtctggactggaggcacatgcggacaacggcagaagcgttggacgacgacgacggcaccgggacattcagcagaggccaaatggaagtggcaaaaatgtcgctcagcgtgtggtccgtgaaaaaagagcccagcgccaacgtgatgtccgattgcaaaaggcgtccaatgcggcggagaagagcgaccacaggggtggacatgaagctgtgacaaacaataagaaaaaacaggggagaggggtcgacataaatgttcaaacgcttttttggaacatgggagtacggcggtggcgatagatgccgcagcaaaattttttgaggtgaaaaaatcgggtgccccaaaaaaactgttagaacggctcccatcagctaaccaaagattggaaattttccgaaatctaccaaatttctcaagatcgaaccccgaatccgtattcgagcaaagtcgaaaatttaatatttttggtgtaaaacatgttaataatcctttctcgaaaaaaaattcaaaatgttttttttttgaaaaaggtggcttcaagtatcaattcatttttgctgtttctgatcaccactcggccgggcggaagaagcagtgttgagaagcctccaaataaaaaaaaaataattagcaccgaaactttcgaaatggttcacccatcgtcgactccgttgtctccgatggaaatctcaattttgttcatcgctttttcctcttcgcctgcttgagaacaaacaaaaaacaaaatcccaaaatagctattttgtaacagtttcaatttctccccagtcaattcgttggtcagttcaaatggcaaaatggagtcaaatgaaatgggcccaaattgagaagtcgaaaccaaatgaacaagaattgagaagtttaatggagcagaagcagaggaaaatgcctaaaaagaagataaaaaataaggaaaatgtttatctgagctcccattctcacaatgacccatgacatgcacaattgtattttcaggagtgatgctgtcgatttgggatagacacaaggcggactttacagcgcgcaatttcttaattaagaaatacattaggggggaggggcacttaagccaaattgaaccagatcgtagcatccgcttttgttgatcagcccatcacaattttgcacgcgggaagcggtcatttggaccattttcaacaatttgtcgcggtttggcgcgaaaaaaaaggcggcaaatttggggggccctataaagcgccgggtttcgccagctcctaaaaaataagcgtttgtttggccaaagtgtgagccacctgtccgcgag

SEQ ID NO: 5512 - DNA, 3202 bp, Heterodera glycines
  unsure (1)..(3202): unsure at all n locations
ttttttacgtgatctcaatgaatccgaatccgatgactttttttggcagcggaatttgcggaattggcaattctttttcatcggaattgacaattttcatttcctttgtgccattcggtccaattttaaattttcccaatgtccatttgcgcgttttgaagtgttcatcgacgaagtagtcaaaacggcggctaatcatcgcaattcccagtccaagctgaaagggcggaagcaaacgaaacacctcaagccaacaatcggcggagatgaagcttaaaaatcaaaatgattagcatggaaaattgaaagattaattatttacatcgctttttccatttctttctttgcttctttcggattgtgcgacattttttgcgagtaattagacaaaatttccaaagaaatgaactgaaaaaagaatttttcaaacaaatgtgaatgggctgattggatatgactggaaggggatttggccggctttatatactcggattcacgtgaagagcaacaggggctgggatagtggaaaaatagggaaatattaatgctttctgataaaccacaacatgcttatgctgaaatgagcgctgacccacaaattgtctaagccacgagtccaaaagagtaaaaaaccacgtaagtgtccaatactcgaaaaagctcgtaaaaacccggaaaacgggtctattttagggttttcggggtcgctgaatacgaatatgacatttatacaacctaattcataaccctggacccacccgaataagaaaaaagctcaaaactttgttaaaacatgttctgtttttttacttcagattttctatccatcaatcgatcaaatgattggtttgaaagtttatggacaaaaaactgttaataaatcgcattagatcacaaaattcttcccggcggcacctatcggcgccgccggaccccccttgtctcccaaaattgttggaagaagcgcgccgcaaaaaaagcttttttaaaagcgaaaaaaagtcgtcacttggcttttaattgcaaaattggcattttttgtgaaaatctgttaacaaatctgaacgaaaattatgaaattttttgcggcggtgacattcggcaccgccgtacccactcccctcgcccattcaccaaaagttttttggaaaaatgcgccgcaaaaatttttaaaaaatcagcagattttttgatcccgaatgaactgaaatactctcccgtgctaagtatcaactttaaccaagcaattcctgctttgggcatggtaatttacaagaaaaattcgttggtttaaaaaaggcacctaaaaagcaaatttatatatttttagtaacttttaaagtttataaatgcttaaaaaatagacaaattggtaaattgacaccccaataaataattcaacaaaaagtcaatttccaacaattgaaattttgtggcaaaataatgaactaaaaaggagaagaaaaagagaacaaacattcttttgaacagcattagcaaatggacgaaaaacgcctgaaaacacgagaataagagacataataaattttcgtgaaaaggcgggactgttacaaaattacgtgcacagaaaatctcagaaatttctgttaacttagttggatatttaacaaaaactcaggggtccgggaatacatccagaggttatacaccccaagattatcggaaattctggaaaaaattaaaaaaaacccaaaagcaaaatttcttgaggaaaaacagagctagacctgggctttgatcgtaggttcccccccccccctaccaaaaatacgataaaatattttataaaaatataaaataattaaaaaggacacgaaatggagttgtacaaataatttataatgtattaataaaatgaaacataattaaaaattctgctgctgaacgtttacttatattatggggaaatggcacaactaaaattacggcaaatttatgacctaacaaataaaaggggagaaaagaacggagagataatttgaaattaattcctttttttcattcagcaaaattctgaccccaaaatatttttctcaaataagaagaggcaacaaaatgtaaattcacatgtaaagatttaatttcaggtgtaaagaagcatcctatagtactgggctccaagaaatgcttcaattaaaaactgttattatttttttattttataaatttttaatgagtttttaaaaaggaaaaaagaattctttaagccaagctatgttttttaatgttttggtaattttttttaaaaattaccagattagaatcacagccggaccttttcttcgtaatttacttgaaaaataagcatcatagagataatgatgaaaacatggaaaaccctatgcagaggctaatatttggtaattttttggcttgactttcgttcaaggggtaaactaaaaacatgtttaatggttttgaaatggcgtgtatttaataggcataaacgttttttggcgcaaaactgtcaatttcttggtgaaatcaaaattaaaaaaaaaaatttttactgtttttttcacaaatttttgttgtaataatggtgaacagcttgaaggagcagtgaaaatgggtccaattcattcttcttgagctcacgtcgccattgatactccaccagagtttctgcaaactggaacccagggattcgtctctcgcgaaaccagtctttcgcgggcctccaactcgcctcgatgcgctgagtatgtgttccatccacagctataatttacacaaataaatcataatttaatattaatttaaataccaacaaaacgattttccgggtctgaatgattcacgactttgtgcaagtagccaaacaattctttcaatttaaattttatctctctctctctctctctctctctgtgagaaaattttatcggataatttttgcacaaataaaaattataaaaaaaagataatttattctttcatcttttagatcattattttgccttaatttttgccctcccccactaatatttaaaagtgaacaattttgcatgagaaattctttcaaataacgaatcgctcaatgcaattttttaatggtttttcagtgggatctattagaaatctttttaactatgccgagntcataacatttaaaaaaatgttatgttaaaagtacaaccaaaacagtatcaacatttgaacatgcccatttttgatttga

SEQ ID NO: 5513 - DNA, 3255 bp, Heterodera glycines
gatcatcagtctgaagaatcccaaccacattttccgaatgatagcgccgaccctaattttttccgaatttctttctgggcgagtttgatgttgaaaattttggaaaaacgcctatctctttttctgatcatcagtctgaagaattccaaccacattttcggaatgatagcgccgaccctaattttttccgaatttttttctgggcgagtttgatgtcgaaaattttggaaaaacgcctatctctttttctgatcatcagtctgaagaattccaaccacattttccgaatgatagcgccgaccctaattttttccgaatttttttctgggcgagtttgatgtcgaaaattttggaaaaacgcctatctctttttctgatcatcagtctgaagaattccaacgacattttcggaatgatagcgccgaccctagttttttccgaatttctttctgggcgagtttgatgtcgaaaattttggaaaaacgcctatctctttttctgatcatcagtctgaagaattccaatgtcggaattttttattcctatcgccgatcaatgatcggcggaattaagagggaggaggcccttcaccaatcccccgtccgccgcgcgacatgttttcgccgttccattcctctatcccccatttcccttcaaattgtcaattgtttttgtgtgttcctcccccgccccgcgcacaaattaatgaccaatttgtcaaaccgcaacttttcgccgccgtccccaattcggcgaatgagactccaaagaacgatgaacccccaatttcccgttttcctcccaatttgttcattcgttcatttttgtgccctctttttcaattcatgcccaattttcggcccattttcgttctgctcaatttcgccactttttgttcaattttgctcgtatttaatgcgacaaatccccaccaattcctacaatcagaagcaccagcaaaggcaagcaatgcctcttccgtccctctctcagtccccctcatttcattgtccttttcccccggcccaattgtccgttccatttctgtcattcacccggtccctatcattgaattttgtgatttttccatttgccccatttctgaaatttctgtcccatcccggtgcccaattccatttgtgataattccccggtgatggcatttctgtgatcaatttgtgataattcgttcaccatttcaaaatttttgtttaattacccaagtttgaggtcatttcccggaataaattttttattaattccgtgtctcgtccctgcctgcccctgaaccccgcaccgtggaattcatttggcccgaccccagagcaagtcgggacaaattggcgctcctgggtggatttgctgtgaaccacggactgaaatcgacggatcccggtgacaaagggggaagggaaaagcaaattagagagcctagacaagaccctctgaggcttgtctagtgttcatagtttcgtgtagttattgtcctccgaggcataacttcacgagggacgtagcggacttagtgtttaccctctgaggaagcacttcgtccgaacagagggttggaaggtgttgtgtagtggacgaagtacttgccctccgaggaagtacttcgtacaaaagggtgttcaagcgcgcacaaggccattgacaaataaggaaaaaaggcaaactaacagtcctccgaggctttagtttagccataaggcaaaaggcaaactaacagtcctccgaggctttagtttagccataaggcaaaaggcaaactaacagtcctccgaggctttagtttagccataaggcaaaaggcaaacaccttgtcctccgaggcaggtgtttagtcacagaaggtccaggaccaaggccagactgatctcggaaaaagacacaaaacaacaagcacacacacacacacgcacaatcaaacagcacaatgtctgggccaatacaaaaagggatcatcaatgcactcaaagctctggacaatgccaaaagcgccacctcactccttctacaccccgacccggacctgtcaaactgggaaaatgccgtcaacttggaggctcaatttgatcgcgtcgtcaaggaaatccgtacaatggaaatgcagatggacagtctacgagactcatccaacgcttggattgaacttctcgcccacctgaccggagacgacaaagacaacggcgaaaaagaatacatcaaattcgataaaaatgagaaaatcgccgagcgatacgacgcagcatcaaccaaacttcgggatttgcgagatctcgaagcaacactcagtgccgcagccaaactgcacagaggcagagccgacagagaagcaaaggcggatcaattggccaatccgcagcaacaaccgcccatgccaccagcaatggcagcaccaatgacaatgccaacattcacagcaccgctctaccaattccaaccaattcaactggagaaatttttcggccaaaagcgaaaatggcccgaattctacgaatccttcaaatcggcaatcggcagtcaatcaatcagtaaagcgcagaagctgaacttactccgcaatctgctgggtggagaagcgcgagaactcatagcgggcttccggctggaagacgcaaactacgagacggtccttcagctgttaaaggacacgtacggagctccggaggaacacatcagaagtcttcacttcgaactggccaatctcaagccgtgccgaagcctccgtgagaccaaagactttctgcttcaacttgagcggcttacaagggagctgaacaatgccggagaggacatcgaaggtcctcaagtgttcctcatgctggaaaagaagctgacgccagcattcctgcgaagcatcctcaacaagaaaggagaggatccggcaaattggacgacaaccaaatttcgggacgtgctaaacgaagccgtccgaaaagaagttcaaatccaagaagtgatgggagaatatggccatcactacgtccaaccaaaagcagaagtcgtctcagcagcacctgtacaagcaccgagaacaccaaaccaaaggtcacgaaggcctaaccaaccaatggcactgcgtgatatgacatttatcgcctcatcactggacgagggccacagacatcaagggtatgtaagccaacagcacacacaacaagcaaagaaacactgccaacaaatgcgaaaccaagtacaaagcgtcaaaaagggtcggccatacccctgcattttctgcaacagcaatcattg

SEQ ID NO: 5514 - DNA, 1432 bp, Heterodera glycines
  unsure (1)..(1432): unsure at all n locations
agacggagtgtcaggcttgattggcatcaagggtgaaaagggctacncaggattggctggtgccaagggcgacgccggaattcccggttttcctggaacaaagggcgattctggaatgccaggactgcctggttcgccagggctaactggtagaaaaaaatcgcggaaaattacaaaaaaaaaaattactgttgtcaagggccacctggtttgcctggttttcctggcataaatggagacaacggactgcccggcattggcctgcccggtctacctggcgagaagggcatttcaggcgtgccgggcaagcctgggaggcagggtacgccgggcgagcgcgggttggacggcgtgccgggagttcccggaatgaaaggggacgaggcaagaattaaaaaataataattttttaaatgctaattttcttgggacaattagccagaaaaatattggatgcaattatgtggggaggcctttcttactcttcgccaaaaaatgtttcagaaaacatattttttaaatgttgttagaattatcaacattttgctcctaaaagcatttataatttttaatattttgtaaattatttattaaaatacattgaataatctgaccaaatttttcaaagcgcttttaaattttagaaaaaaaccattttaacaacaatcgaaaacattaaaatgcctattataattgtacttcttaaaaatcatttaatgaagaaaatttctttttccacattttcagggtttcataggcaattgataatttcttagcaattattttgtcttttgtttttggatatttccccttgatttcaaaatattgcttcatctttttttgtttgtcctcattagaatatttatttttcactaaaaaaataataataatttaaatgaataaattacaaaatttcttactgtgactcttatggtaatttgccattaattcttttttccatttgaaaaatgtgtctttagaaatgcccaattccttcgcaaattctttctgtttacgttggccatataaactttttaattcatcaattcgttcaatgaattcttgctttttcgcctcataaaaactctttttcttcgttttatttaaatttaattcttttttccatttgtatattttgtcgcgatttacgcctaataattttgcaattttacattcaattttgacactgtttttccattcatattttcctttttgcttcaacttttctttgattgcttcaaatttttgaattgtttctcttttcttttgatcatttgcttcttctttcatattttggtcatttttgataattttttgatcattttgaatttgatcaattgtttcggtgccattttcttcttcgttttcgtctctttcatttttgtcccactcgttgccaaatatttcatcaaaatttgggcggattttgctg

SEQ ID NO: 5515 - DNA, 6130 bp, Heterodera glycines
  unsure (1)..(6130): unsure at all n locations
agagcgcggcatcgatggatacgccggccaaaagggcgaccaaggcttccctgncctaccaggtggttaatttttaaaaattacaaataaaaatgcagacactatccagaaaaagggacctntgggaatgttaatntcagaaaaatacccaaattccaatttgttggttgctattttttcaaactttcgcaatgtaatgccaatttttcttgagatgcttgagactcagttgggccggggcccagtcgcccagttcaaaccctttgcctgagcataacgaaatcttattttccaggccaacctggcctccctggcaccaaaggagagcttggcatgcccggcttcccgggcacaaagggtgaaccaggagtgcctggacgagacggatttcctggcatggatggtgaaaagggcgatgccggatatccgggacagccgggccaatacggacctcaaggcctacctgggccaaaaggcaatgctggactgccaggaatccctggattatcaggtgaatgcatttgttgactattgtccattttgtttaaatttaaaattgactttttaaagtgtaacaattgttaattaccatgaagagctagttaattcttctgtaattttattaattttaaaaaactcgataaatacaacaaattgcatttgatagacattcgaaatttgcgacgttttaggccctaaatcaagattaattaaaaataatgtagtcaagaataattaagtaaaaaattattaaaatattttctcaaatattaattactaaaaacccattccattttcgtctaaaacccagggtttttggacaacttgctttttgtaacttcttttattcttttcagaatgacttggaactttgcataaaatattttttgatagagaataaccgaatataaaataatagaaggttttataattttttaaatcctaaaatttatgaattttgcctaattaactatccaattcaaggacaatcgcttgggggagtgaaaggcgagcctgggttgcccggactgcctggccgagacggtgtgccaggaccatcgggtgaaaagggcgactcgggtgtgccgggagtgcccggcttcgatggtgaaaagggatccgtcggagcgcctggatttccaggacaaaaggtcctgaaaacaacgcccagttcaaggacagattgataactgatcccataaaattttagggagaatcgggattgcccggcatacccggacaacgtggccaagacggaatgcctggatcgcccggatttcctgggcctgtcggagagcctggcccacttggtgaaccatgcttggctggcggaccaggcatgcctggacagcccggatttccggggaccaaaggtagacggcgtttttaaaattttaatttatttttttaaatttaggcgaacttggcatgcccggctttcccggcgagaaaggtgaaccaggctttgcgggccaacctggtgttcctggcctgcccggtgctaaaggcgatgccggattgcctggacatcctggacctcagggtcatccaggacaggacggtcctcaaggcccagcggtgagtgaaaaagaaaataaattaatatttaaaattaaatactaaaacagagcactatgaaaaacaccaaatcggattcatcgaattaaatctccgagttttgggattttcccaattccaacatgtcgtcactccgtgggtgtcccactacttccaacaaaatccggatccaatcaaaccatgaaaatcagcccagcttcagacttaatgtcgagctctattaatagccgaaacccaagcttaaaattaaccaatttttattagaaaacttgtaaatttcttgccagccgttgtatccgtatattttgatgaaatttttttgtcaaaaattgtggactttaggttagattaaaatagaatcaaatatttttttatttaaagggtatggccggacctgagccgttgactcagcatgggcagaaaggactgcccggggcgccaggtgttcctggactgcgcggtgaaaagggacagcccggattggacggaccacctggaccatcgggttggctaaaaatattgaatttttaaatatttttcttaaaatttttcaggaattcctggctatcggggcgaaaagggcgagtcgggctatcctggccaacccggattcccgggcgaaaaaggcgctgccggcttaccaggctttcccggcacggagggccagtctggacctcccggtctgacacattatctaattattatttttaattatttattatggatttttaagtaatttttcggattcgctaaattgagacggtgttatgagcgttacttcaaaaaaccatcaaataaaaaaaaaattttccataaaactttgctcaaaagcaattcaattttattctttatatcgttcgatagctttaattattttctattaccctgaaaaatatcgaatgttcttaagatttctctgcgaatttatgaataattttttgtctatttttttacaattcaataaaacttttttgatcgttgaaaggctaattcaattaatgaggcgcgagcgatctttgattcagagcaatttatatattcaaagttctttctgaactaatttttggacaacagttgaacaatatgccaaattaaaaaaattttaatgatttattttaaggtccatcaggccttcccggtggcccggggccagccggacccgctctcagagatggtaaaataaacaataattaaattttaaaaaatttatttaaatcaaggctttgttgtggtcacacattcgcagacgacgcaagtgccgaactgtccacaaggcactgaaaagctgtgggacggcttttcattgctgtacattgaaggcaacgaaagagcacacaaccaggaccttggtaatattatatatatttttcatattttttttaaattcacattttaataatatttaaatcggatttatattttacaaaaattttcaaaatattgacaaaaaatttataaaaattgaataagcatggacaaaaaactcaaatatgaacaaaaatggataaattttttgaaaatattgacaaaaaaaacgaaaagatggataaaaattggcattctcagaaaaatcatttgttatttttaaaaatttttaaatcttattatcaaaatgcaattcttgaataaaaacttatttttttaacattgataaaaatatttcaagcctgattccataaaaccgaaactgtgcattaacctttaattataatttatttaatttttttttactcaaattaaggcgatgccggctcatgtcttccccgcttctccacaatgccattcctgttctgtgattttaatgatgtttgcaagtaaaaaatatttgaattaattaaattttttaaattaaacgcattttatttttcttttccatttttaagttatgcttcacgcaatgacaaatcgtattggttatccaccggcgaagcagttgagctgattttatatatatatatatatatatatatacatatatatatatataatttattgcttttttaataaaaattagaagtgtttaaaagtaacaattaaatttccttaatttggaaattgcggggatttgcgatattaatctccttcgggatcccttcaaataatcccaaccctgtagcggattgcgcaaattgaaaattccaggtttctattataggcgcaaaaatttcgttggctaaattaaaaatgtatattatttaatgaataaatatatttttttctattattatttagcttccaatgatgccagtgaacgagcgcgaaattcagccatacatttcacggtgctcagtttgtgaaacgcctgcaaatgtaatgccactttggtttatgaactgttattacttaatcatacaaaatgcaaaaatattttaatttgaaattatgttaattttatttaattgcttttttattatttctgatcaggtgatcgctgtccattcccagtccatccaaattccaaattgtccaaacggttggagttctctgtggatcggctactcatttgccatgcacactggtgccggcgctgaaggcggtggacagtcattaaggtagaaaattggcattttcttagaaatagtccaaaaaatggcgtgaacaaaaaatgccaaaaatggcggtaattacccaccaaaagatggcatggattgcttgccgaaaaagagaaggatgattcgggaaattagcttttctatattaacgagatccttattgtttttggcgccttaatggacatgtcaaggctcaatagaatcggaatttggccaaaaaaaacacgggaaaggagcgattgagggcgggagctcccgataaatgctataaaaaaaataaatgtagatgctttattgtaagtttattatcatattaattagcgcttaatcacaatttggggaggggaagtcagcttttttttaatttatatgatttttttaatgaatttttagttcttcgggctcctgtcttgaggattttcgaacaacaccattcattgagtgcaatggcgcgaggggatcttggtaatatcataatttttgaaattttaatttcaattttttcaataatatttactatctcacatcaactttcagtcactttttcgccaacaaattcagcttctggctgactactgtggacgaaaaccaacaatttacggtacatttacatttgagaagactcatcataatatatattcatgaaaaaaataccaatttttgatttatgaccattttttgtagcaaaaataaataaaattttgaaaaaattgactaatttgtcggcgaggaccaaaaaatctgcgcatctcatcagatttttttgtttatcttttcagatacctcaaagtcaaacagtgaaggccggcgcacaacgatcaagaatttctcgttgccaagtgtgtatcagaaatgtgcgataaaaaagaaagaaaaattgttatggcaaaattttgatttattttatattattttatcactgccatttatttgttcattttcattaaacatttttagaaaataatataaaaacgaaatttatcagcaaatatgctaattaatattaattactttcattaatcactaattaaggggatttgtttgcctatattttaattagggtgttctttttgcagtagttcaaaaataagaaaatttttaaattaatttattatttaaccttgaattgggcttttataatgtgcgcgggcattaattaaagaccgcagaagttacgaaaatggaaaaaatgaattccataaccttactcaaaaacatcacaaattttatattaattggattatcgtaaattttctagacaaaactaattaaattttttaaattagatattttttttgaaatttaaataaatttttgaaattatatgttctatttatagagatatcgaatgattcgaattatttaaaatttgatgatttcaaaataaacttatgaatttatttttcgttttcaatatataaagttttaaaatcatatgttctatttaatcaaatttagatatatcgaatgtacaatgtacaaactatttaaaatttgatgatttcaaataaacttatgaatttttttccttttcactgtatttttttccggattttcaatgatttactttttttataattaatgataaaagatttttaaaattatctgtgggtgcttatttaaaaaaatcatctatgaattttgtttgcgaactaagaggctcgaagttcgacaagccctagtcccaaccttaagcctaaaaatttaataaaaaaaatacatattatttaataattttaatcataagatgaataaatagtaaaaaattgattatttatataatacaataaaattgattcattataatatgtaaaaaatatttgtgcatttatattcattatatgtatgtaaaaatcatttcataaaaaaatgaatttattgcattttatatttataatctttttccttatttctaacatcgaaagcggcaaactccgaccaaattttgatcaaattttcggcaaagaatgggacaaaaaagaaagtgaagggaaagtgat

SEQ ID NO: 5516 - DNA, 958 bp, Heterodera glycines
cccaaatcggaacatttcttagaaataagaacataaagcattcctgtattaatcagaaataaaataaattaaaggaaaacgttagccggagtcggtcacgggggcgggagtctgaatcgcggaggcgggggtgaggcaagaaaacctgtcccgcccccggcgggggcggggctcgaaccctagtattttaacatcctcaccttaacacaaaacacttttatttttcaaataggaaaagtcacctttcaaattctgattaccaagcaaatatacaaaactgaatatttctttatttaatacaaagacaaaacatatacaggaaattggagatcggacattcatttgttaaccagattatcacattcttccagaagcataagcgaactttgtcccttctttgggacttttaaatatgtaaatacataatatatataaaaattattgtgctggacagagaaacgagcggcaaggaaacaaaaaataagttgaaaagtacggacacccaaggcaaagaagttacacgtccacattggtcaagctcatgaacacttgctccagcgaattctgagtgagcgaaaagtccacaatttgggggagtccgtcggtctctttctcgagtttgacctgagacggaaatgaaaatcaaaaagggaagaaattcccgagacggaccgggaattggtcggccaatgcctgcgctcgttcgaacagcacgctccaagtggtgtccttttgacgtggcaattcccagcgcaatatggcagaattcagcgggtcttggcactgcggcgactgcggggatttcggattttgccaatgcatttatctgtattattcaactcacagccaacacatcacggaccattttgtccaatttggcaccgatggctttggacgggttggcaacggtgatggaaagcagaaaactggttgcaaatctaagaaaaagtaattgcac

SEQ ID NO: 5517 - DNA, 5467 bp, Heterodera glycines
  unsure (1)..(5467): unsure at all n locations
tcacatttttccaaaagtatanagcgaacttntgtccntcttcttttgggaaataaacatacatatatatatatatatatataaataattattgtgctgaacagagccgcagggatacagaaaatcgcttgaatccaaggcgaaaaagttacacgtccacattggtcaagctcatgaacacttgctccagcgaattctgagtgagcgaaaagtccacaatttgggggagtccgtcggtcgctttcttgagtttgacctgagacggaaatgaaaatcaaaaagggaagaaatttccgagacggaccgggaattggtcggccaatgcctgcgctcgttcgaacagcacgctccaagtggtgtccttttgacgtggcaattcccagcgcaatatggcagaattcagcgggtcttggcactgcggcgactgcggggatttcggattttgtctatgtacttatccgtcatattcaacttacagccatcgcatcacggaccattttgtccaatttggcaccgatggctttggacgggttggcaacggtgatggaaagcagaaaactgttgccaaatctaagaaaaagtaattgcactaaaattatgaacagaaagacaagtaaatttgcaaaaattagcacatgaattttccataatttctcaaaagttctacagaattcgttcaactttttagtttttttttgccaattcaaaatggtttttttaaaataattagtttttgtatattctttctgctttgacttataatgaaactcaaaagaaaactcctaaatttttctaaaaattggtccaaaataaaaactgaaaaattttccgcttaattaattcagttctttctcatttatctatcataaactttatttaacaaataaataaaaaagcgttcaaagtcaaaaaatttaaaaataataatgggcgaaaacacgtagaaaaatgggacccgaacccaagcaaccactccatcactaaagacaggcacactttacctgcatccttccaggatttaaacaataatgttttttgttgcctttttccacattttctgccccttcccccgctgttcgattgttctacctgctcttcaagtgttgggcggtgccaatgccggccaatctgccgcggttcaaaactgcaattcgactgcacagcgcctcgcactcctccatcgaatgggaggcgagcagaacggcagtgccctgctggcgaattgcacggatgagatgccaaacatcgcgccgcgtgcccgggtcaatgcctgcggtcggttcgtccaagagcacaaaattggcacaagtgagcaacgcaacgccaagcgaaatacgacgacgctgtccaccgctaaatttgaagttggattagttacctctttattggggaattgatattcaattaaaaatttcggcaaactatttcgtattgttagattatcagtccaaattttgcgtatattttggcatttcatccattttaacacaaattctgttttttgcctgttgtgtttaatccgtttgtccgcttgtttgtccatttgaatgcatttcaaaatggtctccgtcttttgcgacacttcggaaaagccgtttaattgagcaatcaaatggagcacttcacgtccagtgagttccattgggagagcatcgaattggggacaataaccgatgggcggatgcttggagacgcaaacgccggaaattgctgcggtgcctgaggtggcgaatttaatgccggacagaatgtcgaaggtcgtcgtttttcccgcgccattaacgcctgaaatgaacgtgatcaacaattaatagggccaatccgaaggcgtctgtcggcacgatagcgcccaaacataaaccatttcaaactagaagatcgatttttgcgtgctttgacagtgatgagagccagggatggggatttctgccgaaaccagtcctgcaattttatgctttgagaaaactcacccagcaagccaaaacaatcatcgcgctgcactccgaatgttatgccatcgatggcgggcacgttcccgtaatatttgctcaactcattaatgtacaatacgaagttctcgacgccttcttgtttcacaaattcccgctcttcgggggacatctttgtcttcttcagcggaaaaatcccgggatcgaagctgaaacagaacagtttgaagtaccaccgatcgcaaattatcaaaatttcgtttgactcaataacccttagacattttcactcggtttttgttaaaaattttcaaattacggattttatgcgatttgtcaatattttgctaaaaatcagaaaaaagcatcttcgctaaacattcaaaaagccacaaaataaaagaaattctcggatatgccggaaaagaagtgaatgcctaccctttggtaaagtctgtgattgaaaatgcgacacttcaattggttcaattgtcggacaacgaaatgcgattggagacaaaaaaggagcagccagtgaaaagtgcccaaggcaaacatgctaaggatgtagtccgatgccgcgtggaggctttcttttcgataaaccaatctgtacagtccgttcactggggaaagatgctaattatttatgagaaattggaacaaaattttggacgacaacaaataccgtactctgcttctatgactcccttccccccgcctttctgttgtatgaccagggcggggggggggggggtaaagaggggcaaaacactgtaaaactaatttcatacggtaagcacttactgaagtcatacggtggcagcagcaaaaagaaaacaacgttcagagttgttggcacccaatccataacaggaaataaagattcgaatagcaacacaattccgataccaacaagactcagaacgatgaggaccaaaagtgcccttgtgacggactgcaccgttttgaacagaaacgacgcacagcaaagccatggatggtaaatccaaaagaagagggcaaaaaggagcggaagactgaaagaaagacgtaaaattaattagataattaggatgaacaaagctgttcaaggcatggaaaaaaactcaaaaattgacctttataagaccggaatcgggttgaagtcttatttgaaatcacggtttttgttaattttaaacaaacaaagaacttaccgaagtctgcccccttccaatattccgtaaacaaaaattggcaacgaaatgcaaaagcaaaacagagcgtaaatgttcaagtgcaacaggagaaatgaagcccaataaatgatgggatggagacgggtcagcagcaactggaaaagagaagcaaacaatcaattagttattatgagatttattgggtttttgcattttggtaattttttaaaatttttattggattatatgaaccaatggaaaaacttcgaagtcttgagcgatttcttatctttttactgatgttgtgtcaaaatattgtttttgatttgacattatttccatagtttacttggtgcttgaaacgggacgagcgctcttctaccatcagtttgagcagaaaggagggcatcaaagtgatcaaaatgcacatcacaataaggacagggactaatttattgaggagatccgtattccttgtagcagtgtaaatgccaaaatcggggcggtcggcaacaccgtacacttcaatcgcaggaacaatggcaactgttgtgaatgagtaaaatatatttaaaaatttagatgggaggccccggtactattgagccccatgaggcagtaacattcgtttcatgttgtcaaaatttaagagcccggagagcaaaaaacagggatttgtagcgattttgcgccaaacatgtcaaattcttgcaattttggggctaaaacctaaaatatatttttcatttcgtttcttattctatttaagattttttcttagctgcctgactaaaataacattactttagcttattgtttcacattattaaatgtagaatagattggtcatggttgaatttttggtaggcgttatcgaaatttaaaaattttggaataatttcaattttttttttgctttttttgagaatatgaaacgaaaaatgtgactggcccattcggcggagcccaattgaccctaatcggtcgtgtcggcgtaaaacttccaacttatttttggttaactcgtttgttatatgttaaatgtatatgaactttataatctctagctgtcagcactcccacacaatacttataaaaaaaaagttgttcaaaaacgggtggaatggccgaactatccgaaacattttgactgtccccatcccgactattttctcgtccagcggcatctcaaaaatttatgttgttactcagaaaggacattgtcagagagagataaaaggccatacgtctacgcattggatatataaaaaagcaaaaacctacacgaattgaggcccaacaacgcattggtcacaaaagacagagccaacggcggagaatgcaaagcaattccattgaacaaagcgttaacatccatgttcgaatcatttgggtacacagaagcgccaattaccaatggcaattcgtcattatcgtggccaaagaatgagtcacgcttttggcctaatgcagcgggctctatcaaaattttttttgcgtatggaattttgtcggcaaggtcattgaaacttcgaaacgattcattatctgaacggaaaaaaaatttgggacaatgtgatgaggctaacaatagaaaactgagttatgattatatataaaaaaaattgttgaaaatcaaatatcgtctctaacttttgaaaagaaaggccgtcaaattcagcgttggatccctttcatatttttgactaccaactcccctcataatgtatgtaatattgttaatttgggctggtaaaaattttctccttcatcccatccgaaatttcctccatctttacaagaaaatccaaacccaataaaaaaacagaccaaaggaaatatcaaattgcaatggcaccgaaaagcgttccgtgtttacgaagggcgacaatgaacgcgaaacagtggacgaatttaagccgaacgacatcgcaattaggaaggaaaaaacgcaaatttgactgataaggcccccgagagagctgaacggattgcgcaaaagccacaggcattgacgacggaacaaagcgaacatttgctggccattgagtcggagcttggcgaaggaacttttaagaaactaaaagggaaaagcaaaaatgaaagagaaacatgggaaggcaaagtggccggcggtgcctccgacaggcccttttccagaaaatcctgacaataagggagagggggggggggggagaggggcaatcaagtgaagactcttttttattcttggatccaaaaaatcttttcatttgcaattctcacaaaaaaaaaattaatgaaaataaaatgtttaaacttacaattagtcattaagcaattctgacaaaaaaaaga

SEQ ID NO: 5518 - DNA, 1686 bp, Heterodera glycines
gaaacttttgagaaactaaaagagaaattgcaaaatttaaaatggggaaatttttaatattacgcccatatatacagcaaaaaactaaataagtatagcgcctcaaaaaatcgaaattttatgcctaagcgtatttccaggctttttcactttctattaattcccaacccaacctttacatttataattttttacttatttccatcaaagaaaaattattatacattttaagcctaaaaatgatttttaaattgtttacttttattatacaataattaaaacttatttattttcatgttggatttaaccctaacctccaaaaataggaatttaaccaaatgagccaccaattttgctattttactaacttgcgcaccatcgctgacaaatgaagggaaatacagtcaaaattaaattttgaggtattattcattttctgtgtttacctgctgttgtcgaagcccgaataagtcttgagcaagttttgtcgcgccgtccaccgaatcatcgccatcactctgtacaatggacccgtcaagttcgttcactctgtaacgaataaaagggtggttaaagaccaagaaaagcgggaaggtggcggattaattttgcctagctacacagcccacggaccatggcgaggcgtgggttcgcccccacccggggccgcacattttacccaattattacaaatgtaacaataggacaataacaaatccgttatttcacctgagaaagacttgctcaagcgaattcagagaaagtccgaacgattttattggccgctgatcgcccacaatttgttcaagttctttgaaaagaccggcaaagctaaaaaaattaaatgtcaataaaatgagcagagaccgattttggaaagagcctaattatttttttttgtaaaaaatatataagcagattttttaatttgacaaaaaaaacaaatatttcttacagttttttgtcttggactggcaaaattattgtaaattcgggcggattttgtgcgttttcaatgtatgcttggggcgaatgcttccgaattatggccaaaaccgttgcaattgcaccaccaaagcgtttctgctggccatcctccacaacccttccagcattgacaacctaaaagaaaaaataattagattttgaggaataacttgccaaattaagaaaaacaaaaaagtattatcgagtacatacatgggcagtgaggagttgtttccactcccccctcccccgtatcgtattccaccggaattatttaaaaaatatataaatctttttaatgtccgagggttggacccgaggaggaggagctgatacgagggggggggggggggggtccgtccttcaggtttcaaatgtttagcactcagaaaattgagcaaaaaatgaataaaccaaataaaataaatgtaaaacagtcaaaaaggctctgctgcctttgacccgacaattaaagaattaatgaccacattagcctgtctggtctgatggatttgaaacatttgggtgcatggatttacgaaattcttcccttgccctaattacaatattcgtttaatatagtggttatgcatttcaatttgtggaaatacctaaaaatattatatttcaactaatttttaaaattatttgcgcctatgtccaaaattgggttcaaacttacattttttcaatcttaga

SEQ ID NO: 5519 - DNA, 1121 bp, Heterodera glycines
ataaatacctttttagcataaaaattgtttttcgcttaaaatggaaggcaaattccaaaagtatgaaataaaattaacgtttcaatttaaaaatgatgcaaaaaaattttggggcaaatttaaaatggtgcaaaaactttttgtggccctcccccggggggtagggagagtaaattattgaccgactctgagccgattatttcattcattgggcgaggggcggagaatggatgaaaaaataataaatgtgttataaattcgcgcattaataaatctcataaatgtgtgtgtgtgtgtgtgtgtgtgtgttgcgcgtgagcacagaatgtgagtgagcgagtggtgaaaaatgcacttggaaaataattcaaaaagttttccccctccgccgcccgcgggggaaaccgccgggggaggagaagaaagtgaagaaaatttttgttgcatcatccgcgcccaaatacaacgcaacgcaactagcgggcaacgtgggatggattttgagcgcaaataacaacagcctttcaatgtgcgggttttattggaggtggtcatggtctcgaaaattgaaatttgtcgagactcgggaatcctgattggaaaatagtccgagaatttgagaccgagattctattaaaaaaatcgggaatttcttatcgataactgaatattgattcctgtcgataattgatactgagtgaggcccaaaaaacatggatttttcggtcaaaaatcaatgtgatcgaaaatctcgagcagagcatcacacattttatgggttttgttgccctaacttacaaattaacccaacttactaagacattggcactatgcatgaattttgagggctggaaaatttgcttttaaaaaaaaattgtagaggcaccaaatccttgcgaagcgtaattttaagaaaaaaattgtttttccaaaaattattttttattgaaaaaatatgccgtaagactaatctcctttaagattttacatcaaaaaattgcgaaaaacattgaaaaagccgtcgacgccaagccaaaacgcgagggaaccgcgggggaaatggttgagcaaataatacagcccaattttttatgtaacaatttatgaaggagggggggggg

SEQ ID NO: 5520 - DNA, 3813 bp, Heterodera glycines
ttcttaagaaagatgataataattatagcaaaaaaaaaagttatatattttttaagggaaattcaaaaatatttgtagttggcatgaccctcaaattgccaaatttctactaattagtcattttttgaaattgcaaggaccagaggaagccggaattttatgccaaagggcttactttcaggggtaaggtcccttaatggatcggggactcgatttcgcagaatcccaaaaaagtcgagaattagggaccaggggggacccgcattttatgaccctgttgggagcgcgcgtgataaaaagtcgaatttctatcccttggcccatacaaaaatgattagcaacattggcctttttagtgccgtatttttgtgacttctgccgcgccgatcaatttatttctaatttgtaaaatgccatcatatcatctcatagatatacacttttgcaatgctgataaatgtccaatcatcgacaaaaataatttccccccccctaagggaatgaatttgtagtgggagagggagggggggggaggcgttattttcatcgatgaacacattttgcccgttatctgccccaggggcaaaaaagggggcggggggcaaattggcaaaacaatcttcccaatgagcggaccaaagcaatttttgcatcccattttagggactgctattattgactgatatttgaacagctgacacattcataaattgtataatgagctcaatgtgccgaaaaatatgatctaatgttatgaatttattcaaaaaatatattttaattattatgaaaaaattttaaaattttttataatgttaaaaccaaatttacagtaataaataatccattaaaatttgtaaaaaaaaatgtttaaaaacaagcatccttcttttttatttttttaccgccgccaaaacaatcatcacaccaaaacaaatttggcttgcgaatttattaaaaaatatattttaatttaatttaggaaaaattttaaattatttttataatgttaaaattaaaatagtaaaaaatttagctttcttttttattgttttaccgccggcggcaaaacaatcatcacatcaaaacaaatttggcgtaatgatttttgaattgttgaagggcaagcgcatgagcatagccattcacagacacacagagagagaagggatgcctgcctaattgccttgcccaaatagggggtggtgggggcgataattttaggcacagcgcgccgcgcccatttttgccccgaggcgcgttgccactaattttgggcgatggttagctgaattggaaggagctcttccaatcgacacacataaaaggcaatgaatgggtggaaatgacgtggcgcgagatggtggtgttggcttgatgactctggaataaattttggggcgatggttttggtgatggtgaaataatggggagaaatggacgagacgatgtgcggtggtgaaaatttgcgccaacgacgattttgggatgatggaaagcgggagacaaagattgagggggataatgatttggatgatggatgtgtgtaaacagggcgaaatgaaatcgaaatttaattgggggaggaaaagcgactgagggatatttaaattggggtgaacatggacgattaaaaatgaattggctaattaagtgtgggagaggatgccatgatgctttttttattgaatgtggatggccaaagactggaaataaatcggaaacataaatggggctaatataaagcgtaaaaaactgttttgaaagcacaaaatattgaattttatcaaaaatgtatcaataaatttaatattttaacaatgttaaaacaattaatattttcatgtttttcatagttttgcaaaaataaaattctaatttccaaactcgatgcctaaaggcagaaaaacgaaatttacgggtcaataaaaatttcttaaaaaatcactacataaaaaaaatctcatacataatatatatgtaaatgagtcgattaacggacataattaatgccaaattgatctggatatggcttatctatattagtctaaaaatttaatcataattaatgccaaattgatctggatatggcttatctatattagtctaaaaatttaatcattatccacggacaactgatcaagggcaccaataaattttgatttttttttttttgctgatcagtgatcacttagagctgataaaccgcaatttttgttcggttagagcagcagaaaacggtgaaactggaaaacaaaaacagcgaatgaatttgaaagcgtaaggagcgaaaaaagggcggtatttttggtaaagtggacgaaatagcattagcagaagtagcagcaggtggtcgttgtcgtcgttggattgtacaaccacaaaaagaggaatttttgtgagtgcactttcgccgccccggtgagcacaccaaaatttgtgttgtttggaggcgtcgcaacatttttttgcacagaaaatttgtgcgcgagcgcctaattcgatcagcagtgagtgagtgaatcggtcaataaataaatagtttttttttgttgccaaatggcgtaattcacaaaaaaaacaggcctaatttagaacaaaaaaaaaacactgaaatgaaaataaaactatttttgtgtaaataaatgaagataaaaaaatgaatttcaatgaatcaatcggtcaatcaaacagcatttgtgtccatgaaaatgtacggaaagaaaaatttaaattcgagtgaatcaatcggtcaatcaaattaaataaataaaaattaattaattaatggaaaagaaaaagttaaattgaaggaataaaaataaatgtgaataaaatgtgtctaattaatgaatttaagaaatctactgacgtcctcctctttggggtgtttgaaggataaaaataatacactcgaatacagtaattatttataaacggtatatatgttaagttatatggtcaaataaatatggtagaattgttggaggttgaggtcatgcaaatactaatttagaacataaccatttgttctaattaacgtgttctaatgaatatggatggcatcattttagagagcaaaattttctctatcgaattatgttatttttacgcggaaaaaattatgatcacaattttttctatacataaaatagcgttgtcccgaaaaccaaattttcgaaaattgtttcgataagcggagcatatcctcccaggttccgcctattcattcaaattacaaaaaaacaatcaaaaattttttcaaatttcagcatgagttggctctagatggatagcatttgcttccattttccctttcgctcactcccttttgttttgcggcgtgttaaaagccgtgccgcccgcccgccgctcgtccgcaacaaggccccgaggggaaatgaatttgatgagtgagaaagtggtgtggtggtgaaaagcatggtcagctcagtagggagggggataaaattggggagcggatgatggcgagatggattagcccccgcggtcatccaccaccaacgccagcacccgccgccatggtgcgagattagcccctcccgccgcttcacagatcctcccaatcctcaatctcaaccgcgccaaatacaacaccattcacaacccaagaatagtcatcattatcatcattgtcggtccggcttttcccgcacattgggagcggcatggcgcgcgggtcctccgcttcaatgtgcggtggtagcgcttggattggaaatgcagaaaagcgaatttgtgtatgcacgcgcgagttaaaacaatatatgataaaaagcgcaaaatgattaa

SEQ ID NO: 5521 - DNA, 1416 bp, Heterodera glycines
  unsure (1)..(1416): unsure at all n locations
attagttcgattcgttttttggtttgntgataattcagatcaaattgataataatttaacactttatctctttttgttagcctaattaaatgaaaattcaatgtcagaataaattcacaacttgccgttctcctcgcagttccgtcctccatgaaaattccaattaaatttggttgttataaactcttaattgagtagcatttttcttaaattcttaagacatccctcccgcctgtccttctgatgatgactgatgtgaataataataatggccttgactttccctttcccttctgctgacggtcacaaaaagcggctcattttctgcacttttacttttcagtgtatggaaatatacggctcaatattcatgcttttacataaatgtttttggaaaaatcaaatgcatttttattgttttatgccaaaaaataaatgaattaaatatattttaattatataattttgaagaacagagagactccagaaaagtccggacgaagaataaagctccagggtaaatcagcacgaaaagtgtctaattctcttaattggccaacacggataaaatcgcttcaattaattttctttcaatgggtgcgctaaccgcgccacatttcagataacaaatgcttattcacaatttccattctctcgattacatttacaagctaataatgtttccaaggcaacgaagctgggaaccggatttttaggcacttaggtaatattttaggtcctaaaaacaacgaaataggcgctaaaatgcgaaaatataggttctaattgacaaaaagttttttgttcaacaatgtctcaaaaaatcaattattttcatagtttcaaattttctgttcttttggaactttgattgataaaatccggatcacaaaataagactgaatgtttatataggaaaaaagaaaatatcgttgatatatttttctttgttttaaaataatataaaagcataacataagctgtatatttatttatttattttacatttttgacttggatgggataaaagttgaggaataaatgcgacgtgacagaagaggaaaattggggagacgttgtggggggggggggggggggaggaattgattcgcaaattttcaccttacaaaatgagtgagtgtcgcggaaaatattgaaaacttagggctaaaaataaaatgcccaacaacatttttatcattttctctaaattcaatccattctttaataatatttaaaatattacttaattgcactatcttttgattggtttcattaccgcccattttcaatttaaactcattttaaggcatttctctccttaattgcgccgtctttaggggctgccggggagggaaaagcgcaaataataaaaatggagcataatttaaataattatttgccgggggggggggg

SEQ ID NO: 5522 - DNA, 4732 bp, Heterodera glycines
cataaaagaacccaatgtttggttttaaaaaatatctatttctatgtttaatcgccgttttttttgtatttattaaaataaaaaccaaaatttatttatttaatggtttgttaaaaaataattggtaaataataaggatagaccaaaatagaatttacgtattaaaggaaatgcgacgaattccaaaaagcctttctttcgttccccaggaaagtgtctgctttgataagcattaaaatgttcttttcttcaacaatttgactttgaccacttttgataatcgcaatttatttttcagttcgtgactcatccatttaaaaaaacaaaaataaataaattgaaataaataaaaataaataacattttcaacattttcaattccttccccccccccccccctcctcagagaatgaccatttcctacactttggacgtgtccaagtccacttggggcggctttttccgtattctctcgcgctggcgcggcagcgtttggaaggcggtgatgggccaattgatcgtttggaccatcatttacatgctcatttcgttggtctaccgacgcctgctgaacacacgaagccaagaggcatttgggaaaaacgaaaattaattaaaaatattttcatttattttaagacatttgaacacctcgtgcactatctgaactatggacttgactcaacaattccgctgacttttatgctcggtttcttcgtcacacaagtggtcagccgatggcaatctgttctgaacggactcggctggattgacaagcaaattttaaatttaattattattaatttaaaatgctctgtcatttgcctgccttaagtcataattaagttggcaaatgccattttaatttcgagtcttgtaaatcgcccagctgctgctgtgtcttggcagctaataattatttaattggcttttagttgtttggctaataattttaattaattggcctttagttcggcaatgaattttgccaattatatccgcgggacggacaccgaaacacgaatcactcgtcgcacgctcatccgctacatggtgttgtgccaagcactcgttctgcgtgacatcagtgtgcaagtgcgcaaacgattcccaactttggacactctcgtcgcagctggtgaataagagcatttgaattaaatttcatgaaaattcgttttaatttcactaattaggcttaatctccaagccggaattggagcaattggacagggaagtccacgacaaatactcgcgttactggacacccattcactggtgcaactcaattttgtatgaagcgcgactccacggcaaaattgccagcgactttttgttggactcaattataaatgtaatcaattaaaaacaaatttcaatgcctaaatattatgcaacaaaaggacattcaacactttcgccatgggttggcttcgctgatgaaatacgattgggtgccaattccgcttctttaccctcaggtcagtcagtcgatgtccgtccatcgctaatggcacaaaaatttggcccctcctttttggcatcatttccgccattatatttatcgtcatttacatcaccggtgttcctcttgaatttctgaacgagctggggaagcttttgagggaaaaactatgggacgggccggctttgaaccggcgtctctggctttccggaccattgttctaccagcgccgaactaccgaccctgccctctccagatccccattttttctcgatcatataggatcaattgccgcctcaattgatccattaatcttcctctcggggaagcttcttctctatctccctctcattttcatttgcacagatcgttttcctcgctgtgcgcctttactttctgatctgtctgatcagtcgccagtttatttaccgaaaagaggctaagcaccacgcggagattgacctgttcgtgcccatcggcacaatgattcaattcattgtgtacgtcgggtggatgaaagtggccgaggcgttgctgaaccccctgggggaggacgacgacgatttggagtgcaattacgtgattgacaaaaacctgatcacgggtccgaattaaatggggcacctttcattcaaaaatcaccagcccattctgcgccatttttaggcttttcactggtggatttggccacaaagcgaacgccggagcagagtcgcgacgtgttctgggacaacgatcacattgcgccgttgtattcgatggaagcggcgcaacgcaccgtccacccactgatcggatcagcgtcaaaaataaagtgcggaacaaaatgaaggaggacataaaagatcaattaccgtatttacgtatttactgaattagaacccccggaggttctatttttcaacccctctcgaaaggggggggggttctaatacagtaaatacggtacactgatttggcatttctttttggcagcatggcaaagggcaaaaaaaccattacgatggcgcctcataagagcaaactgagcaaaatggacgaacggacgcggctggcacacattcggctggtggacaccatggaacataacgtaaagcatgcggaggagctgaaggcggacaaggcgaacaacgaaaacaaagcgttgggcgaactgcgcaagagacagtcagtggggcgaagggaacgccggcggaaaccaaattttataggcactactgataagctttacccccggaaaactaaaaaattgaaaatttgcacaaaaaattatatatccaaaacctaaaaaaaaattgacgcctcactccgtaactttggattaccgttaatgccaaaattgacttatttaccactttggagtattatggggattaattgcgcaaataacgcagaaaaagcgggaaaatccgcgacggtcggcacatggaagggatgccgtcgacgcgaagtgcacccgatttggaacgcgacgggttccatcgccttcgcgagagcagagacggcgaacattcgccgtcgcaccatcggccgaacggcacgagtctcacgtcgccacaccggacgaggagaggtaaagaaggggaattggcaataaaaaaggaaaagccggcggaaggcattttaatccatgaatttccgctgaagggtccccttttggcgccggcgccttgcgtcagcccgacccattgagccaaggccattacattggcgaggagatgccgcagcgcgacttgaacccgtacatgggccacattcagcgtgggacggacggtaatagaatcccggatttaaaaatagccggacctgggccaagactcggattccgagttggacctggacaggatcccggacaaaagtcctgttttaacaggactacaccggtgtgtaccgcgttcctctcccctcccccgattgtttcccgcattaaattcgtgaaaatttagatgaatcaatgaaaatgttttggacttaaaatcgaataaaataatgttcattggaaggtttcggcattgtcgataggcgccatgggagaaattttaaaactaatgagcgattagttaacagattttaaaagtaaatgacacaaaacggcctgagaaaattcaatttaatgaattaaattaaaaatataaaaaataatagtaaaataaattgtcttaaaaacattcttttggtttatattgtaaatcaaataattaatttaagatatgaatggctcgcgcggaaatggaacgggcggactccgccgattctaagacaacaaaaaatgaatttaatggaataaaattaaaaaaaagagaaatggaagtactcacacttctattattttgttttgatttgattaaccatttctgttaattaaaatataattataattttttcaaaaatatttcttaaattcgtcacaaaattcgtcctaaaatacttttttcccaatttaattcataaatttaaagatgcattttacagcatttatcccctaaaacaatttttatgcaattttcaagcacaacaaataacaaatagtcaatgaatttgtgccaatttcttgcctcattggccgtcttcgcatttctcgattttggccctgtttagtccgatttctcttgccttctccacaaatcctctcataagctcaattataatgcgcacaaatgccttcgttttttgcaaaaaaatgccaattcccggcactttctcgaaacttgtgggaattgcgttgagcaaattgctcgacactttgtacagtccgttgtacagcttaaaattgagattgatcaatctttgtgccgaactttgtacggaactttctgctccgcttgtaaagtcagccatctaaatttaaaaatttaaaatttaaaatgctaatgctaatgctgctagcctctaatttggtgaggaattccatgggacgaatgaacgaagcgcctgccgatgccaacaaaatgttctgcggcaatgctcgttggagctgtttgatgtatgttttcaaaaagtcctcccgcacatcaattggctcgatcagtgcacaaatcatttgttcggcgatttgtgtggcaatttgtttcatttcatttacatttatggcgccataaaactgttccaattgggcggacagatcggcggcgaacggcagcaacgacagttcgatgctgatcagtgccgagtcaatgcttcgtccggcatggaccaccgccagttttttctgcttaatttcttgctccattcttcgtttttcggcccctataaaaggtttgagcggtg

SEQ ID NO: 5523 - DNA, 2898 bp, Heterodera glycines
tcaaaatatgtacataaaatatggacaaaaatgccaatatatgcaaaattatggaaagtatggatatagaaatccatcctagaagcttcattcaacgaagctaaaaccatgtttttcgtgcgtttcagacctcccacagtccaggaaaaaatatggatttccatataattggaagccctactaataattcaaatttatttattaccaaaacggattttgaggtctattagttcattttcttccgatgaattcgcttcgtttgcaaatgaatttttatttttttccaattttttggtcggcttttgctttttctaaacccaattttattagagaccaattccaattattctcacttgattcgggtcattattatttattgcttctgccccttcaatttgccgtttttgcggcttttcctccgtttttaattggcccatcggaattccgttcgctttctgttcaattttaatgcctttgtttgtgtccagcaaaatttttgcaacggttttctctttttcaccggtacataaaacggaaacaaaaataaaaaataataaaatgcaaattttaaaaaacattttctttcgaaaattgccaaaatgaaaattaaagcagcctttttacgtttgattattatgttttatgaaaaataggtaagaatttaatcattattatgtaaatttgaaataattatgttaatttttgttttgtcaatattgatttgcttattgaatttttccaacataaaaaatttataataataataataataaataaaaataataaaagcaaaattgttcattgaaatatcaaaaatgtaaaaatgaaattgacgcacaaaaagagttaaaaaataaaaataaaaataaataataataataattgtgattacaattataacttttcacagggatgagaaaggcccttctttgcctattgttggatatacagtgagtgttacacaaaatgatacgttgacccccgtatttcagttttttgaatgttctaattaacgaaattgtttcagcggaggccattttgtagagcaattaaccaaaggccattttgtagagcattttgtgctctttcagattggcttaataattttttcaagaaaaattttctaaccccttaggaatttttttcgtaaattttcccgatttcaagccattttaaagttttcagattaccatgaagcagtgatctgatgaacatggtttaattaacttttttgatgagcttaaagatttttcttacataaattatatcagattttttgggcgacattttccgatattatgatttttttttgaaagtgaacgtatcattttgtgtcacctattttataaaaaattgctggatattgaagacccttttatcaattaaatcttattattcgtgcatttttattgctttgcacaatttcaaaacaatttcgttaattagaacattctaaaaaactgaaattcaaggatgatgtatgattttgtgtcacactgtataagacagtattcctttgtgacggtcacttctttggctcatcattctcttcaacgttcatccgatcattttcttattcatcatcatcatcatcttcatctcttttttcttcctcctcctcctcctccgtcgttcttcgtcccctcttttccgccgccccttttgatgagtgccgtttcagcaaaatgtccgcataacggaagcggctttgaatttgtgccaagaaggagtcgccgtagcacaggcccaagcagtccatcgtacgacagcaaaacgactcaatgtcatcgacggagcataggcggggggaggcacagcactcggcagccaacacgtccaactgatggacggaatctgtgatcaggtgatcagtgaatgggaccaaatcattttgggacaaaacatgggatccatcgcaatcgaaaaagcgaatttgagtgccaaagtcgtcacaccttcagcattttcgcgcagacaaggcttgtccatgttcgggaattggcaatggaattcgatccgttcccggtaccccgtcacacattccgacagaaagtcgcgtggccgatttcgcagccgtctttccttgggctgactttggctttttaaagcgccgttttggccattttcggcaaattcatcagccaaaacgagcagcgaaaagcagaggaaaaggaagaagcaaaaaagggaaagagaaaaaggacaatggccgaaaagaaaggacattttgaagaatgggaaaattaaaaggagaaattaattagtcactaaattaacacttcaattaatgaaataattaagggaatactaaaatgataataatacaaatggtaattataccaataataattataataaatgataataatagaaatggtaattataccaataataattataataaatgacaattatacaaatggcaattgttgtactcgtcggctggccaattgctccaaaattataaggccaaaaggggaagtttcccgccaggcaaattattattatatttgtgtaattttgtcgccttttctcacactttcccaccattggcaccgcattacccctttttcataacaaagtttcaaaaatgagaaaaataaaaatgcgattaaattttgaaaaaattgttattattaaattgagagacgagacgagacgaacaaacatttatttagacgcaacttaaattggcactttttaaaaaaggtaaaaatggccaaatgcgacgaaacgctttttgccggtgccgtcgaaggaaataaaattaatttgaatttcccatttattcgtactctttttacacattgtctcatgaccaacaaacaaacataggtaagtgagttccaatttccataaaagtgcaccttttacgtcaatcgaaaaacaatggcattc

SEQ ID NO: 5524 - DNA, 6105 bp, Heterodera glycines
  unsure (1)..(6105): unsure at all n locations
ctaaactctttacgcgctgtcactttcacatttatttctctgttctcctctattaatctctttgtctctctctttctctccgtctcgctctccactctctctctctctcttccatacacacatacacacactctcttttcaactctctttctttctttttttgaattttttttatatttctctaaactctttacgcgctgtcactttcacatttatttctctgttctcctctattaatctctttgtctctctctttctccgtctcgctctccactctctctctctctcttccatacacacatacacacactctcttttcaactctctttctttctttttttgaattttttttatatttctctaaactctttacgcgctgtcactttcacatttatttctctgttctcctctattaatctctttgtctctctctttctctccgtctcgctctccactctctctctctctcttccatacacacatacacacactctcttttcaactctctttctttctttttttgaatttttttatatttctctaaactctttacgcgctgtcactttcacatttatttctctgttctcctttctctctttattttctcacccatctagagcagctcggcatatgctcacctcttctcacattgaacaccacatacatcttctctgtctttgcgctctgtgtctgatcttttcctttttttcttttccttaatttccttagctttcttactttctctattttctctgcctatttcttctatttttctatattttattcattattttgtcattcttttttttcactcactctttctctgttttcatttctcttccattccttgcaagcgatgcacacaaaaattgataataatctacaaatgcgacagtgcccagcctacacatttgtccatttttcatttggcatttttgtttgtgttggcactttctgctgacgctttttatgcactttctctaagtttgtcattttcattttttaataaaaatttaattttattttttgaaattcaattagttaattatattgtaaaatgtttgcaactgttgtcaccgcattggagcaccaaaagttgaaaagtgcgcacaacgcactgcagcaaaaagttgaacaaatggaagaaaagttttcgcagaaaatccaagaaaaggaaaatgaggtggaatctttcatttttacttttttaaactctatatttaatttattattttatttttatgggaacatttaagtgacctctctaatcacattaaaatacaatttaaaatttcgtcaatttttcatttttaataccctttaaatttctgctgaagttttttacaatctttggaaactaaaagagaaaaaaaacaaataattatattcatatttgaaatgaagagaggaaaggttcataaaggactgatcagtataaaataacagtcagcaaaaatcagagcttttttaaaaatttaattaagcaattttttggaatgaaatttgccaaaattgaccaaaaactaaatacaaagtttttactcaatttttttatttgtatgcctaattttcacagattgctcaagtgaaaagggcaaatgagagaatgcaaaagaaaatggacgaggcattggaaagaattggacgattaaacgaattggtgaggaaaaggggaaaaattaaaattttataataatttaaaaaagctaattttcatggcaatttttcgatcagatggaaagtcaaatgatacatttttatgagcaacaacagcaaaggttggacaatgatggcacatttattgccggcattgatgaggtgggaaatggaaaatggactataaaaaataaataataattaattgataaaatgatagcacgacaaataataaataaacaattcgataggcaccgtaaaaagccaaattccgaaaaatcactcattttttgtaaaaatggcttaatgctaatttgcaggaaaggcaattggatttacgctatcaatttgagaagtttaaaaaacaatcaatacttattttaaataatttaacggtcatatggcccaaaaccaaaaatgctcaaaaaatggcggaattggtttaaaacagctcaaatgaaaaaattgcgcattttccatttttccatggaataaaaattgggtactgaagtgacaactttgaatagaaactcaattatcagcccgttgctcacaaatcagttgaacctttaagactgagttacgcgccagacgattcagtcccttttgaaagtggacacttcagtacctctttttttaaacattaaacatgccaatcggtccctaatttgcatttaaacatctttatgggcagccattacttttgagtttgggccctatgaccgatattttccaatttttgtaaaaatcggcaagcaaatttaatttaattgtctcgtctgtttttatttttaattttaaaattgaacagaattcacttcaaactcaaaatggaattatgcagcacacaatggaggacaacaaccatcacttgctttttgcgcaaaagatcaatgaggtgggaaatgaaagaaaaggtcgaaaatattctcttctgtaaaatatttcagtaaatttttcattttttttataaatttgcaaatttttctaaattttttttaaaaacgaaaacaaggaaattcaattgcttaaaccccaaattctcgaaatttgcgaaatgaattttcatttcgcccgcccttttccatccgacatgctttaattgaaagcaatcatttaaaatattgggacattaataaataggatattaatttaatacattttacactttcagtgtgtcactgttgagcaaaaagaagtgagaaaattgggaggggaagaagaaaatgagagaataaaggaagaattggaacaagaggaaaaggaagtgaatgaagaggaggaggaagaatgggaagaaaataatggaagaggggaggaggaagagcaagaggaggagaacaatggaagagaggaggaggaggaagaaggggaacgggtgaaagatgaaggaataatggcggaagggcacgacaattacgggatggaaaatggcactgaatcgacacttggcactcaatttcaggcacatacaaaattttggcacaatgagaatttggaaattaaaaaaacaaatttcctcagaataagaatttttgaagacctattttttagaattttttattaagttatgagttttagtccaagttaattgctcaaacgatcggtttgtcagttttatggcaattttgaaataaatctttgggaatcgtgatctggcggtgccatgccacacgggaaataaatgaacacaataaaaattgcgattaaataccgtttcttttttacagtatgccaacaatcctaaaacaattacgcaaaagtattcattagctgcaaaattgaatggtcgtgccaagcgaatgtggtataaatgcgcgcactgtccggaggcttttcgctggctgtcagcgctaatacgacacgaacgaacgcacacgggggaaaagccgtttaaagtgaaaaatttaaaattttaatttcgttattgccgttttagtcaatttttccttattattgcacaatttttattaaactgattttttatttcatgaaattttcgtgttttttttacttattatagtcgcagaaatagaaaattaaaaaaaacaattaccgtaaatgctctaattatcacccatgggggattatttttcaagctccccagaaaaggggggataattagagactgggggataaatggagactgggggattatttttcgactaatttgtttagtgaaaattttttattttttcatggttaataaacatttaaacaagcttcaatttagaattaaataatttttatttaaatttaaaaaaatttagaaaaattccaatttatccccctgggggataaatggagactgggggattatttttcaaacgcctcgtagactgggggataattagagactgcgggattaatagagactgggcgataattagagcatttacggtaaggacaattctttaaaataagacaaatcaagaatcccattttacagcaatttttcagtgcgaccaatgcggcaaagattttgcacgggccaacacattgaacattcaccagcgcattcacaccggagaaaagccataccaagtggcaatatataaacaattaatcaattaattactccctaattaaaattaattaattgctctcccgagtcagtgtcacttatgtgacgctcgttttacgcaggatggccaactgaaaacgcacattttgattcacacgggtgaaaagccgtacaaagtgagattaaaagaatgtaactaaatcatgattagccgatttccaaaaataattcaattaattgccctagaaactgcaatgatcatccaacttcaaaactaattaattaactgagtacctattaactgtataattaacatacctaattctctttttttacattaatttagtgcacttattgtccccaaaaatttacacgtgctggcaatttgacaacccatcttcgtcgccacaccgaaaagaagccgtttatggtgtgtagatctggaaatacaaaaaagttaaaattatttaaaatagatgaatttccatttttttttaaatcgatgaatttccattttttaagtgttcccattgtggcaaacaatttgcagagtcaagcaatctgcaaattcatctgcttacacactacagaaaacgtaaagcaaacggacaattgagcaacagaatgaatgaattagtgccacaaaaaattgtccttttttgaattatttaatttatattttttgtcaatattattattgggattacagaaatattcattcagcacgataaaatgaaaaatattataaacgacgcaaataaaaacttttgagggtatgttattataacagagagcgtatcgcaaattttttttaaataggcactatttgtaaaacaataccaaatgcggaaattnaagttacttnaacaaaaaagaagcaaatgttaaatattttaatcatttttcaatatttttaattaattggtttccaactatttaaatatttatttagtctttcgattattaacaaatttagcagtagtgcataatttttttcggaattgatgcctaaaataaataaattttagggccgctgggctctatttgttaacagattaacttacccaaaaataacaattttatggattttttaaacatttaattttcatttttcaaaatttcaaaaaaaaacaaatcaatattttggggtacaattgtcacgctagcgcataaattaatagtatttagtgggggttgcaccacagccccgactttttcaacctcgacggtcgtgggtgcaacccaagtatttagttctaatgaactattttgcgaactctcttttccattaaattttcttatttatttgatttttgtacataaattttgtgaattgttttccttatgaatttctgaataaatatttgaacaaaattttcgcttattattagtcaaagcacgaataaaaacaaagaaattttttcaataaaaatggataattttaactttttctttaaaaattctcaaaaatttttaattattttaaatttaaccaaaattctcagctttacttcagcatatcaaaaaacactttgggttttctggcagaactgctgcagtttgttgctatagtaagccaatataggagcagagatgaatgttaaaaacacactaaatctgcagccaaatttgaaaatgccaacatcaccagcatcatcatcatcattggcaggttttttttccttcggccaacaaaaaaatttgggtattggaaaacaaacaagtttgtgaacattttttggccagtttaattttaatacaaagttgaaaccaatattcgatagttgtttgataacgcgattttttgaaaatttgcaggctaacactacacatttaaagctaccgaatgatattaagaatttctaatttggtgaacaatgaaaaaagttatgccccaaaaatattacttttcgactggcgacgtt

SEQ ID NO: 5525 - DNA, 1238 bp, Heterodera glycines
aaaaacattccacatggtttgtatggctccggtcaaagggatccacgaagtggattgtatgatttacagaatggtggacataaggtgggatgacagggatggctggaattgcgccacccatgtaggctgcccactgatcggaatgtatgctggaccccggcaccacaaattcttcaattatcggcaagagtgtggcgcgagatctgtctggcacgatgcggacaactccaatattggtgtgcacgtcatacatcccaaacaaccaaatctcgcgcactctgtgcccccggtgatactttcgacgcgcaataagcgcctcgtcaatttggacaacatgaccagcccctcccaacctaaaccaaaaataatctaattttaaaaaagaacaaccgaatggggttgtcaagcaaccaacggctgcaaatccctctgtaaaagtttgaccaatcgatcaatgtgtgaaatgccaatctgatcatttgtttttgcgtatgcaacggcaaacctagatattggtcctacatatattatgaaaattttgtttttactaagagcccagcaatacatcaagaacatgccctttcgaagcggaaaatgcgcttcctcgaaaaatgatcccgccctgacactttctgccctttgtgtgttgggcaacgccattggcatccgtcaaatgtaaaggttggatttttgacttgagtcatacgccgtgcgcatctattccggccacagatgggggcaatttgccgtaagaggccaaggtttcgcatataggctattgtatgctcatttgtttgaaattgtgaacaaaaatcaaaaatgtccatggctaaaaagttaataagctaatattaaaagtagtttaaattattctcattgtcgcctttgatctgctggtcattattattgaccgggtactatgcattcaaatgtttgcctggtttcataattttttgtttacactttcatccaccaacctactccatccttgttattcgaaattattgatctaagtagagaccggcgcgggacgggatcccgcgcgggattttgcgggatcccagtccgcaatcccgcattttttggaaaatgcgggatttgcgggattaatcccgcgggatcccgtcccgcaaagaattttgagttccaatcccgcagcgggatccgcaaatttgattttttgtgcgggattatgcgggattttattaattttttgaaaatttttctaagacagaatg

SEQ ID NO: 5526 - DNA, 6691 bp, Heterodera glycines
aggccaaactgacagagtggtttcagaaacgaagcatttcaacaggaaaaccaaaactttccttctaatcgaaattttgattttcaaaacagaaattatattcccacaagtcaaaacactcaaaatttcgaagccacgggtgcaaacagaacccctctgtttcagtcaaacaaaagagctcaaaacaaggaatcgaatatgatcatggtgaaagaagtaatacctgaaaattcggattcgaaaaccgtttcccttaatcacgtgggacacggagaaattccaacatatgaaaaattttttaattctttgattttacattcaaacgaatttccatctcaaaatcccgccaacgctgaatgttccgaaagtccaacgacggaagtgaatattgtcggaatgaaggcgatcggtctaatcgattcggcagcagaaataaatgcagcaaaccccaaatttttacacaaaatcgccaacgaaaaaggcgtggatttgctaaaatggggtttttgcccaaacaaaggaaattcaaaattgtcttttgaagttgcttcttttaatggtggaaaaatcccaataattggagtgcttaatgttccaatgagaaggggaaatttcgaatgtgaaataaattgtgttgtcacgaataattcctttccttacgatttcgtttttagcctgaaagcattaaactcactaggctattacatcggaaacacacttacaaatgaaatcttaaatttcaacgaaactccgaaaaattacaacaccactttactgaattctgttcgcatttcattctgtaaaattattccacctttttcatcatcttttgtcgattcatttattgaaaatgtgtcgcatttgcccgaaaaacccgaattcattatagaaaaccaaatggcctttgatcaaatggactgcgacgatgaaaaacttttggacttcgaggaggagacaccggtgaacgaaagtgtgaaatcgttaacaaaagaggaggaggagaaagtactgaaagagctgggcattgtgtctgaaaagcccaaaatttgccgatcattttcatcgccaaataatttttgtgccgatcgggtctcagtgctgaaaacggcgctgattgaaaggtcaatcgtcggttcggaaagaggtaatgtgaaagttttgatccataataaaggaccggaaccattaattttggaaaaaggtatgaaggtggcatatgcagaaaagttggacgaaatttttaatccaaatgtcgaattgtttccattagaatttgatagaatgttcgtgtctcaaaaattcataaggtcaactgcaaaattcgaacggaatttgagaaataaagaacttatttcaattctgaacaacaaaattggtgctctctcagacagtgaaaaggataaaatgcaacaattttggctgggattttctgatgtttttgcactaaatgaatttgaactcactcaaaccgatttatttccccatgaaataaaaactgaaaacgcaaccccaattaaaactgctcctcgtccaattccattcggtgtccgaacaaaagtcacagaaatgataaatgattatttgaaacgggaaataattcgaccatcaaactctccgtgggcatctccaattgttttagtagccaaaaaagatggctcaatccgattttgcctggactaccgaaaacttaatagtgtgacaatcaaagattcatacccaataccgaacattgaccaaattttgatgtatttgggaaacaaacactattttactgtgttggatctaatgtcgggttattggcaagttcgagttaaagaagaagacattgaaaaaacggcgtttacagtacctggtggtctttatgaatttttggtccttccttttggtctaggtaacgccccagccacatttcaaagactcatgaacaaaattttgtccgaatatattaacgaatttgttttcgtttatctcgacgacattttaattgcctctgaaacatttgaagatcatatgctccatctcagaaaggttttcgaaaaactgaatgaaaacggaatgaaagtcaaggcagaaaaatgtggttttgctttagaccaaaccccatatttaggacatattcttacacgagaaggactcgcaaaagatccggaaaaatacaaacccatcaaagaatttccgatgccaaaaacaatcaaagaattacaaagatttttgggaatggtcaattggcaccgaaaatttattatgaattttgcaaaaattgcggcacctttaacaaaaatgttgaaaaaacaggatgctaaggtgttaatttggtcggacggagcaaaaaagagttttgaatcattaaaatcgctaattgttcaggaagttgtacttaaatacccggattttaatttggcacaaaatgatccaaaatttaaatttcatattttttcggatgcgtcgaaagatgggttaggtgcagtgctttgtcaacgggatcaatctgggaaaatgagaacaatttgttacgcatcaagacgctgtaaacaaaccgagtcaaattatgggccaacagttttagaatgtttaggcataaaatttgtcgtaatttaagcattttatcgcatggcttccaacaatcgtatataccgaccataaggcccttccccaaatgttcaaaagcaaaaattcggtcggaaattcaaaagtagacagatggatcatggaattaggtgctccattccaattagaggtaatttataagcctggaaaagagaatcacgttgctgacgcactttcacgagcctttaactcaaaaactcttactttggaagaaaagggaagcgaaaattgcgcatacatttctgccgtcttaacacccgaaattccgaaattgccaattagtgtttctaaggaagaatgggtcgaggaaatcaaaaattctgaattggcttttatttggaactttttggtcaaaaaagaattgccacacgagttaaaaactcatcagaaacttttggaatcgcttggaaagtttacagttgatgaaaaaatcctttactatttgaattccgacagtgaatcagagctttttgtccccaataaatttgcgattcgttgataaacgaacaccattcagggccatgcgcagggcaccagagtggaaaaaagatttataaaaggctaaaatttctcaaatacttttggccaaacatgttttcggactgccaacattttgctaggtcatgtcgaatttgcgcacataaccgaattccccgaaaaaaccatccgggtctgaaaccaattaatactcaaaaaccaaacgaacttttgtgcatggatattttgaaacttggaccaacccgaaacggaaacaaatactgtttggtcatgatcgatcatttcacgagattttcagaagtgatcccaattccaaacaaaaaagcggaaacagtttcacaggaatttgttgagaaatgggttctgaaatttggagcaccagaggcaatccattctgatttgggaggcgaatttgtgaactcaattttgaaggaaataactgaaaaacttttggtttcaagatcaaccacttctggttatgatccaaacgcaaatggtctcgcagaaagattaaaccgtacaattattgaaatggtcagaaaaacgagtacaagtccatgggagtgggaccttcgcattccatatgtcacattttcacataacatcaccccaaacgaaagtaccggattttccccatcaactttatttttcgggcgagctctaaattttccaaccaatgtaacggccccaaaacgaccaaatcctctttacaccatagatttggatgaatatttgcaatttttcagagaaaattatgaacttttggttaaagaggcttcaaaaaacattgcaaaagcccaatttatccaaaagaaacaatttgactcgaaaccgaacgttcaaccaggaaaatataaattgggagatagagtaatggttttctttcgaccgtcagcacaaattaagcactcaaaattatcttggaattattttggcccatacaaaattaaggccttaagtccaaccgcagcatgggttgtgcctgtgaataaagaagaaagtgaacaaatcaaagtcccaatcgaacacttagtccatacaccaatcgaacttcccaatgaaacttttctcccaaaacaaagacgcggaaaaattttcaaaaatatgccaccttctgaaaatggaaaagaaaccagccagaagaaaattaattctgttttgacaaaatgcatcttttcagaaaatgtcgccccggcgaaattggcactcagcgcacactgctcaggcattgagcaacattcaaattgttcttgcattttgctggaagaagtgtttccgaacttgccggccatggaccctcttcgacgcgtccaattgtcatcacttggagaattaatcccaatttcaatcgccaaacagaaagggattttgctgggccatattcgcagttgggccaattcggatgaagaatcagcttcactccttcgccacattccaaatttcagtcccgacattcaaaatttcattcctccaattttaatgtgggtggaccgttgtgccgtcgcatttcaaaccctcaaaaatacgggaatgaaagttgtacagcaagagatttgctcaaaaaatccgctccaccggttcggggagttgatcagcgaagcattcgaagaagtgaaggcaaaaaatataatcggcttttcatcaatggaatccgaaaaattcctttgttacggcgactcatcggttcgagagtttgctagtaaattggaaacaaaaaccatcatttttaaaaacacactggaaatggccgaagcattcaaaaatacttattttacgactaaagtccaagaaattctgatcctgatcggaaatgacgatttggaccaaggccttgtgttaaatgatgtcgaagaggccattcgcaaaataattgttcatgcaaataaattctcaatcaaaactattttcattccacctccttttcactattcaaaaagaattttgcatggaaaattgttaaatttgttggccaaaatgttgccaaacgatggaaaaattgtgttggcaatgaaaagaggcaaccggagtttggcagaggtaacccggttcgggaacctcgaaaatcgccgaacagtgaatgaaaatggcaagttgaaaccgcctggcattcattttacaatcagttttttaactgatgtgtttggaatgaccacgccggtgaaaatgtcgtcagaatcagggagttcaggaattcgaaccccagccacttccaattcgcgtgctccgagtttgctcaatgtgcaaattccatcgccaatcattcctcacccccgtcaagagcaaaatgcttacaggcgtttcaatcgtggtcgaggaagcggccaaaatttccaaaatcggggggcttaccgcaattaccgttggcaaaatcatggggattatccccctccccctaaacgtggaaggttctgaacggatcgtcattaccttaattgtgccggataaattttatttttgattgtatttccctgcctcagacctacttataaatgacctcattattgtttcattttgttgtttatttatttgttttttttttctctcatttaataaattttcatcgcttaaaatattcgtccaaaaagagtagtccctcctatccaccctttccccctttatttcatttcagctctcgccttttcgcttcatcaaatccgctgtttgagcgtcgacgtcaaaactcgcaagcgctcgtctttcgctgatccgggggaggtgtgcggcgatcagaccgtgagcacactggtcttcaaacggcgggggacgtaggataaataatgatttatccttattatattgttttttgcaacgattgtttttcgcgttaatttaaaatattttgatgcttcatttaatttttcctttttattgttgtcttcgtgttctctcaagttttttatatattttttgtgtttttgaatcattgtaataaaactacaaaaatttggtgcttttctccgtggactgtcatccaacaacaacaaacgcccaaaggcttaattggtactgttgtttgagtttctaattgcaattcaccttattctctaattccttgccagtaaagtggtgttgaaaattaagtaaatctttccttgaccccaaaatctcaacccgaaccccagcaaatcccaaagtccctccccgaatatacgactattctccaacgtagcttagtatgaattttttcagaattttctgccgacatggaactgagtttttgttgattaaatttttgagtcttcacttttgctctaggtatggcacggaattccactttccgacttcggacgtttttggggttggaattccgatttccggaaaattttcgggcctcggaatgtcatccctgttttacacctgactgtaagtgaatagtgcattttataaactaaattattttttcaactcaactaatgtttcaaatggacgacacccaactcgtactgtttttcgacaaaaaaaatcgtcataacttttgataaagtcgaccaaattaaacatacttgatatcattcgtttggtcatgatcgatcatttcacgagattttcagaagtgatcccaattcccaacaaaaagcggaaacag

SEQ ID NO: 5527 - DNA, 1088 bp, Heterodera glycines
  unsure (1)..(1088): unsure at all n locations
tcttttcagtttcgtcaatttgctggtcgaccgttccgtcaatttcgacgccgacgcgatgcagctcaaatacgcgctcatttgtcgcttggttgaggccgcgccgtccgcgctgaacgacggacagatggaaatgctgcgcgactattgcacgaaagggcctttttggggggcgccggtggtggaagtcgcgacggaagaggcggcataaatgaaaaggaacgaatggatggacaaagaggcggagatgatttcacaaataaaatgatgtgttaattggaaaccatagttatatttcgattttttctctttaaattttccaaatttttttttaaattttgcggcaaaattttggggtgcacccttttggttatcgtgtgggcgcaaccccatcccatcgattaattttaccattttttggccgaaactccatttatgctggtcgcttatggaatggagttaagcaattcaatcgaaccaatggcaccagaaaagaatccatcctttcccaatttttgctgtacgagtggaaattcagggcgaatcacacaatctgacaattgtgtagagattctccgggcattcagtagcttattcgagagccctttttcagttctacaacactttgcttataattttttatacaactaatattcttaaatacttgatggaacgttatagacaaaatcaatttcgtaatcagcgcattttttcaccacaggaaaaattttaaaaaaaattataagttaatttttcttcgggaccacaatctacacaattgcccacaatccatcgacagaggacataaatgaacttgacaagctcaatagagcagcaacaaattttattcaaaaataaataaagaaaaaataaatgttggatgagattcttcagctcgttatttggccacattcggagatgtaaacctgaaaaacattgccttaatggcaatccccagtcccgcactcacctgcatggtcgttttccctgacggtgtcccctgctgttcgacttgtcgtacnnatgtcattccctcaccacatgacccaaaacactgaatttcagaacgctttttgcccgattttttt

SEQ ID NO: 5528 - DNA, 1705 bp, Heterodera glycines
aaatgagagagaaaacacatcatacggaatcactattctttacgcggctctattgtaatgcatgacataaaaaattgaattttcgaacagcatccgaaaaaaacattcttggtgtcatttgatcgccacaagagtcctatattagtctacgaaggatgaaaaaaaaccaccaaaattcaaaaacatacgatcaaaaatttcagaaaagtaattttttggagttttttggtcataaattttgaaacacaacgaattttttgaaatttaacattttaatagaggattcttgagactatcgaatgataccaagaatgtttaattcggatgcttctagaagaaagttatgatgcattaaatttatcaattattttatgattggtgtaaactgctgcaatagagtcaaaatgccaaccttattccaattttgatgcccaaataaacttttggcagtttctgttggctgctgtctcttccctcttcctcctcatcgccctcttctcccgccatcctttccgtttcattaagtttttctcctccattttctcctggttcgccctgtccactcccctggccgtactgcttcaaccactcgtcatccgcccaaattggtcgttgacttcgctcattcacttttggagggcgtgcaaaattcactctgattgttttcccataaatctccgagtcgttcatattgtcaattgccgccgctgcatcctccggaagttcaaattcgacaaatctcaaaaagcaaagactaacattcaacttaaaatgaatcaacttacccaaaacttctgtgtttgcccgtttcattgtccaacggaatgcttatgccgactaaaccaaatttaaatttgatttattaaatttgtaaaaagcatctaaccgatgtctccgaatggtatgaacgcaagtgtgagaaccttttcattgacctcttctccgaaacctccaacataaactgtacgtttccgactgtgcgggaaatttgttgtgtatgacatgtgcacggattatataattctaaataaaacagatttaacaaagagccgtccgtcaggttcaaaatcactacagctcggtctgcacctggatccaacggatcatggacagtaaaaaacgagaaaaaatcgccaataaatttttggcataaaaacaaaatgccaattattactagggccgcgacttttagtgacgaaaaatcccgaaatagttaactaaaatagtgtcgaaaaagtgccacaaaagtgacaaaaattttatgcataaaatccttgattttcaaactttgatttttgattatttaaaaattagtaggaaactttccaaaattttgccgcttaaatagcagtgctcaaactaacaaaaaggcggtcggtcgaactgttgagtgaattgaaaatatgaggtgtatataaagggcaaaatttttgttttcatatcattcaccacacaattattttctttgtcttttgtcgtgcacaatgggacgagctgcgcccgatgcccaacagcgagaggacgacgaacgagtgactgatcgggattcatccgaagacgaaaacagtgaaggatgcgaatcatccgacgacgacgaacgagtgactgatcgcgattcatccgaagacgaaaacagtgaaggatgcgaatcatccgacgacgacgaaggagtgactgatcgcgattcatccgaagaggaaaacag

SEQ ID NO: 5529 - DNA, 2516 bp, Heterodera glycines
atgcgaatcatcgaccgacgacgaacgagtgactgatcgcgatcatcccgaagacgaaaacagtgaaggatgcgaatcatccgacgacgacgaacgagtgactgatcgcgattcatccgaatcatagacgaaaacagtgaaggatgcgaatcatccgacgacgacgaacgagtgactgatcgcgattcatccgaagacgaaaacagtgaaggatgcgaatcatccgacgacgacgaacgagtgactgatcgcgattcatccgaagacgaaaacagtgaaggatgcgagtcatccgacgacgacgaacgagtgactgatcgggattcatccgaagacgaaaacagtgaaggatgcgaatcatccgacgacgacgaacgagtgactgatcgggattcatccgaagacgaaaacagtgaaggatgcgaatcatccgacgacgacgaacgagtgactgatcgcgattcatccgaagacgaaaacagtgaaggatgcgaatcatccgacgacgacgaacgagtgactgatcgcgattcatccgaagacgaaaacagtgaaggatgcgaatcatccgacgacgacgaacgagtgactgatcgcgattcatccgaagacgaaaacagtgaaggatgcgaatcatccgacgacgacgaacgagtgactgatcgcgattcatccgaagacgaaaacagtgaaggatgcgaatcatccgacgacgacgaacgagtgactgatcgcgattcatccgaagacgaaaacagtgaaggatgcgaatcatccgacgacgacgaacgagtgactgatcgcgattcatccgaagacgaaaacagtgaaggatgcgaatcatccgacgacgacgaacgagtgactgatcgcgattcatccgaagacgaaaacagtgaaggatgcgaatcatccgacgacgacgaacgagtgactgatcgcgattcatccgaagacgaaaacagtgaaggatgcgaatcatccgacgacgacgaacgagtgactgatcgcgattcatccgaagacgaaaacagtgaaggatgcgaatcatccgacgacgacgaacgagtgactgatcgggattcatccgaagacgaaaaaggcttcgcgcaagtcgacatcgagaagggtgggaatgcctttaaaatttaattgtgccattttcgtaattgacttaccaccccctctcccgcatcgttcagcgaactcaccggaggacttgtggagcagggtcatcgcagcgtcgcagtcattcaagaaagtcgcgttccgtgagcaagtcgccgatgaagaaggatgctcgtccgcccggaagccgtcgtccgaccagccgtgctacgatcaaccgtcgttccgaggcggaggcgaccaacaccggtgggacagcagcggatggagctcatgccgcggagaagcaaaagaagaccagcaatggatagatgacgacaaatcggatgaaaagcgattatccaacagaaattaaccatattttttgtccgtcataaatgtgttaagagcgcccctctttctccccgtgtttgtgttgtataatattcatttcctataatcccgtgagatgcctgacacacacacatccgttgtatgaatgtccccttaatattgtcagtgaaggcatcctggtgttgtattgtcgatttaatcgctatgtgtgtctctcaattatgtttttgctctaccatgataaacgaacgatagtctcttgcgaaaaaacaatggaaaatgaattggcataagatttgtcattatatcctttgtaattattcccaagaaatgaattgccgataggcaccgccgggaaaaattttgagaatttgaatgcaatttgttaacagatggttgttaaaaatgacaaaattttcatcaaatttaaaaatttaagcgcacgcatttttagctttcataaggtttatcgtttctgaatccctcctaattatatggtcgaagcaaatttcaaaaatgcgcgaaaacacggcatatttatgcgggagatgcgatgtcaagctttacactagggctgggaatttaagccaaatgacttttttttgctgactctaaatggcctttaaatgacttaaaaagtgttctaaacttgtttgaagcttctgacatgcattttttgtgatttttttaaacttttttacactttttgggatttttatgactatttgagtttttgcgactttttcgtgattttttttactttttgagtctaaatttgaattttaatgaagaaaatgccgaaaaatacaaagaaaattccgaaaaataaaatttcggccgataaaaggcaatgaaacttggatgaatttttttaatcaattgttggaagaatctattttatgcacattttaggtacctatttataaaattaagtgtctaaaaatacgatcaaaatgttattctacaaattattaaatgggaattttttaactttcgcataatttttcaggacttttgtattttttacgtgttttttggattttttgtgacttttt

SEQ ID NO: 5530 - DNA, 1677 bp, Heterodera glycines
  unsure (1)..(1677): unsure at all n locations
ccgaagacgaaaacagtgaaggatgcgaatcatccgacgacgacgaacgagtgactgatcgcgattcatccgaagacgaaaacagtgaaggatgcgaatcatccgacgacgacgaacgagtgactgatcgggattcatccgaagacgaaaacagtgaaggatgcgaatcatccgacgacgacgaacgagtgactgatcgcgattcatccgagacgaaaacagtgaaggatgcgaatcatccgacgacgacgaacgagtgactgatcgcgattcatccgaagacgaaaacagtgaaggatgcgaatcatccgacaacgatgaacgagtgactgatcgcgattcatccgaagacgaaaacagtgaaggatgcgaatcatccgacgacgacgaacgagtgactgatcgggattcatccgaagacgaaaacagtgaaggatgcgaatcatccgacgacgacgaacgagtgactgatcgggattcatccgaagacgaaaacagtgaaggatgcgaatcatccgacgacgacgaacgagtgactgatcgggattcatccgaagacgaaaacagtgaaggatgcgaatcatccgacgacgacgaacgagtgactgatcgggattcatccgaagacgaaaaaggcttcgcgcaagtcgacatcgagaagggtgggaatgcctttaaaatttaattgtgccattttcgtaattgacttaccaccccctctcccgcatcgttcagcgaactcaccggaggacttgtggagcagggtcatcgcagcgtcgctcattcaagaaagtcgcgttccgtgagcaagtcgccgatgaagaaggatgctcgtccgcccggaagccgtcgtccgaccagccgtgctacgatcaaccgtcgttccgaggcggaggcgaccaacaccggtgggacagcagcggatggagctcatgccgcggagaagcaaaagaagaccagcaatggatagatgacgacaaatcggatgaaaagcgattatccaacagaaattaaccatattttttgtccgtcataaatgtgttaagagcgcccctctttctccccgtgtttgtgttgtataatattcatttcctataatcccgtgagatgcctgacacacacacatccgttgtatgaatgtccccttaatattgtcagtgaaggcatcctggtgttgtattgtcgatttaatcgctatatgtgtctctcaattatgtttttgctctaccatgataaatagggatggtaattatatgcacataaaatcgcaaaatatgcgcataaaatatgcaccaaaaattgcaaaatatgcacataaaaagtgaaaaatatgcacataaatttttccaaattgagggcaaattttcaaatttttatatttatttattttgaagaaaattgagcaaaaaaaggagaattttctattttctgactatttttggcataaaattccaattttttaaaaagttacttttttaccagaaaatatactcaaaaatgtgatttttttgaaaaattttcggtcattagagcccaaatggccgcttcaatagagggggccgttttaatagaggatttattgaaaaaatgcccaaaaaggcacataaaatatgcatgaaatgccanaaatatgcccaggagtgcacataaatcgcgaaatatcacaaatatgcaaaa

SEQ ID NO: 5531 - DNA, 1230 bp, Heterodera glycines
ttttttttttttggttgtttttgggatttttttggatcttttggtttattttttcaaagctttttgaaaaattttcgtggcctttttttttttttttaaagctttttttgtttttttggggattttttatgcctttttatagtcggctttttgaaagattttttgtggacttaaattcccaacccttttttttactttccctttgtttactttggtctatgtgaactacggggacaacagctgagaataaaacgacccccaagccccgaggcgcaaatgtggggtaaccatttattgtgcaacaaaaattacgtcaaagaaaatcgaaacattacattggtttaatggttttaaactcttaaagcattctcaattttcgttaattcactttcacttttgaacatcgggcggagaacggcgtcgaaaagattgaaacttttaaaactcagaaaatgataattttttttacatcactcacttatcgctgtgttcactgtcattcaatgtttatggtaattttgttccactgttgacagaagttcatttaatcgcttccttctcacaatttttccatttgttctcatctcgcgaaattggacaacgaatcagtaaaaatgatctatacaatttggcacatttcaacaccaatcgctccccgtcaattcattgatcagatcgaacggtacaacggaattactcaaaagaaaaatgacaatgatgaaattggcacgagaagaagcattggaaaatgcctaaaaggcggaaaacatgtgaattttaaatgaaaagaatttgatcaccgccattaggccttctgcttttgatagccaatcatccacttcataatagcaatagcatctgagcactttcggtacaccgtccggacgaggcgaaaaaagccattttgccattgcttgtccactcgtcgcattggcacagaaatcgggcggaaaccaggaggaaatgtcataataggaaaaggtaaagtgcagagatggacaatcggaaagaatggacaaattgccgaacatcgaaaaaggtggaggttgaatgggtagtcgaatttcagtccacgaatgccgtctttgagcagaggccaaagttgcgcataaataactccaaaatgggatcattgtttatgtaaacggccaaattaattctgcaattagcgaaaagggaagaaaaatggcgcagaaattcgatgacatttcggtcgatgtaacttaaaaa

SEQ ID NO: 5532 - DNA, 7039 bp, Heterodera glycines
ttttaccggtctctttcgttttcctgcaattttgtgtgtctgggtttgggcgggttcaatgagcttaacgggactgagctcaatttcgttaccaaattctacagatgcattcagatccatcatgttgaggtgtgctggagatttcacaattttctgcgttttatttccaccaaaagtcatgcgtcgtgttgttcctctgccaacgtattcgtctctaatcattaatccaaatcggatcaaaaagtctgcaaaaacaataattatcatcatggacatgacaatttttccaatttgttcccaattcccaaccattttgttgcgaatggactcactcacctgctcccattgttcagacagagtctttgttataaccgtgtcctcacttttaagttggaatgtgagttcactttctcttgcgaaattggcgtcgtaaaactggccaataaagtcagacacattcacaagggcaagatgaagaaaagaatggcgagcataagtcggtgccaatgatagatttaggctaaaaccgtcaatgcgattggcattcacctgcttgacctgagcatcaatttgatcaacttcataaagagaaccacgcacaaaaatgagctgtttgcggtattctgagcatggtgccagtctcgcatcagagctcaaaatcattgttcttgggtcaataaatgccattcttttgttgtccttcactcggaatttaattggaattttgtcaaagcattcgaattcggagtccactgagttcccaattttggcaaattcgtaatcgtgcgcttgcaattcgatgcatggccacactttaatcaattcaggcccagccacttttgccaccagtttaccggattggaataattttctggcaaaagttgttgggtctgagagaagtgccgtcgctgcccatcttctcgtctccaacatataatcacaaatcgatttaattgtctgagaaaaggaaagagtcagcatttctcttacttgttcatccaaatagcccaatttggagttcatttccgattcggtgacccaactttcaagtgatctcgtctttctgcttctctttgaggattcgttgctatcgtcggattgcaagtcttgtacagcaaatccttcctccgattttatcaaattcagaccacatgagttgactttctttgtgctgtcaagaaagttaaacgaaaactgacctcctcagaaatccaaatattgtcaagttgtagtcctttccatgtgacaattttcgaaaaatcacaggcacgggtagtgttggtatcccacatgagcaatgtcttgtcttccatctcacattggcctgccttgaattggcaattgttcactgacccgaggggactttgcataactgtgctaccgtgttgtgacataattttagtcttaaaaagataacaattttcagttgagacagtcgaccagctaaatgagccaattaaccacattcggggtgacaaatccaatttcttatcagtgtgcaagagtcccgagtcattaatgagtaggcctaagctacactttccattttcggccatttctttgcattcactcggagttatttgcaacaaaagcggctcaagagtctcttggatcggaacattggtgattgaattgtacttacgtacggattttcttacttttcggcaagcccaagcatcagccgagtgctcaaataaatttggcgaaaagacatcgaaagttcgaacaacaggtgcttttgaatgatcaattgacagctttgaacagccagtaactgccggcaattgccaaatttttcctccgttttgggtttgacagacaaggggatgcattggcagatggggcatattaccagtagtaaagggcagagtcattccaacaagcattaatgtaatgaacattaaagaagcgagtttcgatcgtacgcttggccgttcccaatttgacgttttgggaatgtttatctttgtttccggcccacaggctggggattcactagaggatccttttgctaattcattttcgacctgacaatccattgctgttgtttcgggtttgatgtgtgtgagcgcattcattgctcccgatctcggctcttcgtttttgtaattgcgattgtcctgaattttgaggtcaagtaacgactgggccaagttctcgaaaattcctggtgaagcgttggaagaacttgtagcatccatcacgttaacaggattctgccgattttgccattgtccctgagattggcgtggttgctgatttgaccatcttccttgacggaacgattggttggaatttcctctaaaattggcgcggcgttgatggcaattgtacgcaaaatgtccagcacggtcacaataatggcatcgagggttgcttgaccagtttctttggttcctggcggcctcctccccaattgcgagagcggcctcgtcctcctcttcctctttgttgttgtctcgtcgcatttgatccagaaaaaggtctaaaccctcgtacattgttgcttgacgaccactgtccagcacgatcattattctggtttgcttctgtagaccactgggactgggatgactgattgttcagcgcattgactgcctgaaaggcgtgatgcttcatcgcccttgttcatcaatagtaaagcctccaactcctctgcttgtgctcttaccaagtccaagtcttttgctcgtgatagacccaccagacggataagaaaactaatgtttggcttcaatctatccaaaaattcttcgcaaattttctcttttcgagttacaccggttaatgacgaatttgtcgcatccaccaaaggagttaagcgtctcagaaattgcgccaccgtctcatcctccctctgtttgcacagcgataaagttcgttttgcaatttcccgacgctgaggggagtccaatttctgtcgaagttcactcaatgctgagtcaagagtgtccgtttgtgctggtaataactccttaaacagtgcccgaggagtgtccctcagagccaatttgagtctcgtgactttttcttgttcagtgtaagccttgcctgacacggaaaggtagtccttgaaacgttctgcccaatcatcaaatgcaaaaacagactcctcacagaacatttccaaacctgcccccactgtgggtccgctcgagagcatgttcaggccaaaaagagtcggcctgtcatcttcgtcttcgcttgataattgatgaattggcacttggttcggtacgacttggttgggctgtgcattgcccattgggtcacaaacggcgcagtaatactaacagccccacctgaattcgtccaatcactgtcttgttccaacatatcaactctttcggttaaggtctcgaattggactttcagagtctcaaaattggcatttgtattggccacgacatctttcacccaattgactttttggttcaaggaacgattcaggcagcgaaaagctctgttcactccatcttctaatttccccatatcattttgagcttttttaaatcagagatttttatcgtggtctttccttgccaaagtttcctatcaatagccgaaatcgaggactcatcatcctttccactcaacaacatctttgtttcctgcccgaaggcttgggatgtaccaaaggggaactcatttgacgagccccctgatgtagacattcgaagtcgttcagttgtaataagattttgttttattttgctaaaaaaaattatttggtaatcccattatgcattaattgagagaaaaaaaataatgaatgacagcgggtaatcgaatgaatgcgagtgccttccaggaatgactttatctgctccatctccgtttaaacttcgcctaacaagaacaattaacaattctcaggcgccgcaaaaatgtttaaagtgaatgatctcgcccaatgaaaaaatgcggcggcacgtgattacgtgaatgttcttatggcgtgaaaactgagagaaaacaaagagataaaatgaactttggaatttgtaaaaactgtaacttgatagggcctaattttcattttttataattggtccctttttagttagctaaaatagcgcccctttgattggttatcagcccgggccttttgctttgctcaaaaaaaaatgttctatttttttttgtttcacttcttctctctctctctctttttttttgcttcacattcgttcaaatatttttataaattagtccttgttcgtttgctaccaggacttttttttttggttattttttttgcttctttcactctcttttcttattctctctctctcttacaaataattgttagatttgtcaattttcggtgcagtcagcccctttagcatttagactagcccgggcaaatttcattcttctttttttgcatttttaaaatccctttagcttttcgctagcccggacaaatgttctcacctcttttctcttcgtctttaatgtccctttagttttcgactagcccggacagattttctcacctcttctctttttaatgtccctttagtcttcgactagcccggacagaaatttaaaatgtcagacttctttacttgcgtgtacacgtctttgtttcaggccctcaggccagggagatctcccacaaacttctgccggcttacccaattctcagcttcgtcgtcaatgatgggtcgtcgtttcccaaaatgggaaccatccggtgctaccagtgagggatgcgcactgtgcccccagaccaactatgcaccgtttatcccggatggagtttgggagggaatggggaaaagccaaggcgcctttgaccaagccccgaacccccaaacgactcattgactgttaagatgtatttattcattcgatgttggatttaaacgaagcgagaaatcggaataataattgaagtctgttccatcacaactgactgaccgatcactggggaaagagaaatacgaagagaatgggcggagaaacattacaatgagaaaaggaaaaacgtgtgaaaatggataaatgtgattgaattgataatggccaatgggaaataattaaatgagggaaatgcgtcgaataatccttacaattctatgtaatttcattggttttgaaaaaaatcatttaaatcgttataaattgtctaattttaatttgttatatatttagtcaggttcaaaagagtatcgacaagttaaagaaaattacgatgataatttggtggaagtgatttttcggctcattatgcataggctaatgaacttctgtttttattttaactttttttatacaaaattaatttaacgtttttttatctattaattgatgaacacatcttcttgtatcgtcccgagatgggaccaacagattaaattattctacaccaattcgacgaaaaaacgcagttccaatgttggtttttttaaattttaaatgtatttgcatttaatataattaattgtttttaattttatgctttttatatgtttgttaatttcgaacatttgttctccgtatttttgctgattacatttagaatgccttgctgtagcggtggaaagccttgatgtaccggcagcaaattagctgtttacaaactgaatattctatacatatattataaaaggatatattcttttgtcactcgttaaattttaattattttatgacattttttttaattttaaggcatttatttttatcatatttttatatagattattttattgttatttttgatataatgtaaaatttattttttacatatcgtgccgacccacgcgtgtcaaaattcacttttttgacgtttaattataatcgaattattttaaatattaaaataattaattatactttaatggattttgattttttttcttgtattatttttttaactatttcatgttcgaaagatgttatttttttctttattttttattttattttctaattagatttaattatgattttttgttacgttacccaaattcttaaaattaattcaatttaattcttttgtcattttttcaggtatttgtttttttcctttcgaattgttattatttcgtttatttaaataaaaacattaattataaattgatttgtcatatgaattatttacatagaatgtgaatgtttcatttaaattaatgctaaaaccattttctcccggccgaaggccgggagcgccctgaaagtagtggaagggtcttacaactttttgaggcgcatctgggaaaactatagagaaaaattcagcacggacgactgagtcccggggaccgatttctcactttttcttgcagtttagagcccataactttttttctaaaactcggatcaaaaaattcccgctgtgagggccctaagttgaagtgttggctaaaagttaaaaaaaattctaggcctctagctctaaccccctggcctgggtgcttctagaacttttcagtaccaactttgtccagttcagtccccgttgaataactcattaggctttgacctgagcgcagggtggccagcagacttattgtagagctcaatgagctcgatttttgcaaattttaaaatttcgaaaatttttaaaaattttcgagttaggcctaaaaaacggttttcgggtttttgaattttaggaatttttaacgaattttcccagaaaaacggagaccactttcaagcaaccgtttttcaagctctatcgattggtgatatttttgaaaaaatttcgattttttcccggaaatagaaaaaatttttggcctgagcgggacatttgagtcccgggtccataactcgttaggggttggttttatcgaaaaaacgccttagggcaaaattgtagagcttttgaagctctatctaatggtgtgccatatggcgggaaattttcaaaaattttcgagctaggccccctagaaattttcaaaaattttttttgggttgaaaatgggggtcaaaaatatttttctggggtattttgatgtgctgagcacgaatatgatgtttatttttcgtttcaaaatttttggaattttttaaaaattct

SEQ ID NO: 5533 - DNA, 1350 bp, Heterodera glycines
taagtctgggattttgttagagagtgagcgagcatgaaaaagcaaacctttattttcatttataattttttgcggtttgctcgcgcacccctacgaagccttagtcctgagtcagcaatttgtttgaccacgtccttctcattgaggtgttccggcaggcgttcaacaactgctcacttcgacttttctttgatcagttccgagtcgacgatagcattgttgaacattcggacgatttgggatggaccaaattgcggaggacaaccccaaggaatttttggtgtaactgtgggagtactgttgttgtgtccattaatattttgaggatttgttgccgtttgtgcgagaagggttgccaccaaactttcaatttttctaagcgtaaatttagctgatccaaagaatttgcagcaaatttctcttttccatgggcttgcaaaagttgttgaagcaacttttcaaggttgtctattcggtaagagaaggccgcgaattgctgttcagacgagcttgccgaagtcgtgtcgtcgtttagattttcgcatttttggaattttttggacgagagaaaaggatttatcgattggtcaattttaaaatttattttttttttgagttcgaaatttaattctaattaataaacaaaaaaaatttaaaaatctttcttttgtaccttaattatattttttaagatatgttatcataatttttaatatttttctaaatatttaaattgatttaaaaatcaattcatcagttagcttttttgttgtttttaattagataaaattattcaattactttttcatgcattagtcttgtttgtaaaaatatggatttagttttgtcaaaaaattatttttatataatttattaacgataaaaaatttttacatttgtcttttagtatttttatttgtttgcaacttacaataaagtacttattccgctgttataataacgtattttaaatagagaaatttttgctactgttcaaaataccaaagttaaaaataatcgactcatattgaaaaaattgcataataagcgttataaatctcggcacgcaaagaaatgcttcatttaaattgtcccatttttgaagaagccctatcaattcttgccttatttagtccctttcggcgcattaaataaaaaggttttagtaacagaatttttaaagatatttcaattatgactgtttaattatttctgtagctctttgtggatgtgacttgattctttcattcttcataacagtaccgccgttcgaaaaatcagtttgccatatgtttttaattcattaaaagaaggattattttaattttttccccatttgatgtctatttt

SEQ ID NO: 5534 - DNA, 4551 bp, Heterodera glycines
  unsure (1)..(4551): unsure at all n locations
tgcccgacagaattagaagcattagctgtgagattcggcgtcaaaaaatctttcacaatcacatcaacaatggattcccaccaaagttctaaccgatcataaagcgttggttccgacgtttaaaagcaaaagtgaaaccggaaacgcacgtgtcgataaacggataacggaattcgagtgcacgatttatcttcggaaattcgagtatcaacccaggaaaggcaaacataattcgcggatcgtgctttcacgttctcggcgcactcgaagccacgtgaattcggcggagaaaatttttagagttgagcaagtcgatcggaaatataagtgcttctcgtgccaaaaatcggaaatcgattgagtgggtcaacgcaattaaggaaagtgagctcggaaacctttaccaattcctcggaaaaaaggaaattgcctgaagataagcgggaatgtcagcgactttttgacaccattcataaattcacactgattgagggattactgtatttccatgattcgaattacggtaatcttcgacttttcgtgccacaaaaattccgcaataaactgatcgaagaaaggcacgaaggcaaatgtgcgggacatttaagcggcaaaaagattttcgggcaattagcagaaagatatttttggccaaacatgcgggcggattgtgtaaatgcggtgttgaaatgtcggatctgcgcacacacccgaaatccaagggcaaatgcgccagaattaagaccagtgattacggcggaaccttttgagctaatatgcatggacattttatcaattggaatgtcagaacggggaaatcgatatgttttagtaatggtggaccattttacaaaatatttgatcactgcagcaattcccgataagagcgttgaatcagtcgcaaaggcttttgtcgaacaattggtgcttgtatttggcaagccaaaacgtattcattccgacaagggcgctgaatttgtgaataaaacaatggaagaaatcagccaaattcttggagttgaaaagagtacaacggcagggtacgacccaaatgccaacggacaagcagaaagggccaatcaaactattttaaatatgcttaaaaggtcaactgattcaaattggtcctgggatgaccggctgccttttgtcacatttgcttttaacatcactccctctgaaaccaccggattttcgccttacaatttactttttggccggccagtaaattttccgtcgtctgataatgttaattttactgtaaatccttcatacacaatcgatgaagaaagttatctgcagctctttcgtgaaaatttgttaaaaattttggaaaatgcaaaaaataattcggacaaatcaagagaacgaatggagaaatggtttaattcgcagccaaaagtgactttgcagaagtaccaaaaaggcgaacgcgttatggttatttttccgggagctaacaaacgctcaacacataagaaattaaagtggaatatctttggaccctaccaaatcctcgaaatttccaaatcctcggcaaaagtaacgcctgctgataagaaaaatgctgatccaatttgcgtcccattagaacgtctgatcagagcaccggatggacttcctaatatttcaacaactccgcgcggcaaaaatgcttataaaaatgtgttaaatgtgatgactattttgatctttgaagaaaaaagcatggaatttgaacaggaaaattttttgggaaaaacaaaaacttcatcagggacgatgaatttttcagaggaggaggaaaaaatggacattgccgaagcggagattaagtggacgatgacatgtgaaggcggcggacatgtgttgtgcaaaaaattgttggccggcgatctcgaccccgtgctcagcaaaacacaaggaatcggtgctatggttgtgcagactccattacaaggactcatcacactattcattttgcggtccaatgtttcaatgtctgcgtcgaaagatttgctgaaggtcgcaaaccaattggaaaaactgggtggaattgctaaattgcaggccattttgacttcggaccctgatttcgaactattaaaatatgtcgaagaacgtggtgatgctgtgcgttcgggaagatgcccgggaatcgaagaagtcgaaatcatttggaaaaattgggtcagcagttgcgcatctgcacacgaagcattgaaacgcacgggatttggccaaatatgcttagaagcaccaatttcgctttctgagctgccggaagccgacagaattggatgggaaaaagtctttaatgctggcacatgggcattggagaaagtccgcgcaaccgttgtttttggcaaaacaacattggtccatcagccgagagtgatcattggagactcaagtgctgcgcaactttgtggcgaagcaaataaccaaattgttgctcacttcatcggcaccgtacaagggacattgggcgacgtgatccgcgcattggacaaatcagtactgacatcaaaagtcacgtcggcactgatcatccttggaagagatgcactgatcaaagggcagaccgtagcacaaattatggaagaatgtgaacgcatcaaatcaatttgcggacaatttgaacacgttcgatttgtgtggatcccgcctccgtatgtgcgtgaaaagcacgcacagtacaacgaattgattcctggattggagcgcattgccgcagaatggttcattgcgctgaccgagaatggcaggagtttgattgagatgtggagattcggagacactttcgacatgacacgggtgcgtgctgacggaaagattctgcctgaaggactgaaatgcctcagggcatggatattcactcaaatttctgtttttcccgatgacaatttccttggcattcgtcgttcttctcgctcactcccttctgtacccgctcaattttccgaattgtcaattcatcgtcctcatcaattttctcggggtcatcgggtccatccatattctctccagccaagctcaagccgcaacactcaaagccgcagtgatgggaaagcgtacagtagccgtagccgtcgccattaagccataaatgcctttgaccccacctttctgttctcaatttctcaattttcatatttattgttctaagacgaggggaccgtcttcttcagaggatgnnggatgtggtacttaattgaccttttgacttcttttatgttttgaattataattatttattggcgttttgttatctttttatggaccttaaaatattagtgagtcttttttactgttcgtttcttgtttggtttttttgtcttgtcttctcttgaattgctttgaatttcttttgatgctgacttcttctcaattgattgttgtggtctcgtctttttaattattattgttgcggtttaaaatttatcgccgtaaattattttgttttgtttatttattaaagtgtttgcgaattcgttttgaaacaggtgctgacaagccgacagataattgtgtttgatccatttctgaaaagagacaacccatccccatcaaccattttatgaccctatttaagtgcgttcgtttgtttaatttaatttttaaatgctaaaaaaaactagtgaaataatatataaatcaaatcacagcttttgaacatgaaatatgttcattccctgcaaataaccatgaacacagaattctaacaaattcaaatttttgcttaaaaaaacataatcacaaaaaaaaataataaaaattataatgaaaatcttaaaatgaattttgtaaatgtcactagcacaattcacttcgcactaaactaaagagaatttctttttccatcttctcagtgttacctttccaattccaaatttcttagtaattatttcttcactaatttttggatttcgttctttaattttgaaatattgtttcagcattgctaatttatcctcattagaatatttaatttgcgctaataaaaatactaaaattaaaaaaacaaataaactttcttacttttattgtaatttggcaacaattctcttttccatttccaaaatgtgtcattggaaatgcccaattccttcacaaattctttctgtttgccttggccatataaacttttaaattcatcaaatcgttcaatgaatttgcgctttttttcatcataaaaattctttttatttaaatttaattcttttttccatttgtatattttgttgcgatttgtgcctaataattttgcaattttaaactcaattttatttcttttttcgttttcatattttcctttttccctcaatttttctttaattgcctcaaatttatgaattatttctcttttttgttgatcatttgggtcatttcccatttctccacccatttgatcaactgctgagctttcattttcatcgttttgttcaatttttatcaagatttcttcatttttatttttatgccatccgttaccaaatatattggtcgaaattttgtcggattttgccgcatttaattctaaaaagtaagcaaaatataataaatattaaa

SEQ ID NO: 5535 - DNA, 2583 bp, Heterodera glycines
  unsure (1)..(2583): unsure at all n locations
ccacgcgaaaacgaccccgaccgctactcatgagttgaaatagcgaggactgagttggcgacatttggcgttttgttttttctgtctaattctttgctggcttgtgtattcttttgttcactatttctctcgcatttaagctctgtgcttaagcttttctgtttgttgctgcttttccatntcatttatntagtagtcaatcaaaaaaaaaaatcactaaattacgcgtgtcccttttttaatgatccattattttttattttttggtttgcttcattgattttgcataaaatttattaatttttttttgatttttaaaggatgtgccgtaactcttctccgcttgtaaattccgaattgtttcggacaattttttcgctcagccttctcacttttgtcaattttttggggctttcatcggcccaacaagatgctattcgacgctttgaatataagcataggtatggatggattgcttgatggtgcttaaaccctttcaattgaattaattagtttccattttgggcgtattttacacatttaatttgactctatttcattttacacgacccaaaaaaaaacagaattggggttaaaaatttaaagttttttgttgcaaaaccaaaggggtgaccttttgatttacaaataaatcggttttaaacgacctaaaattatgaaaaaatgtaaatcatcaagggcgggaacttccgacacatactaagtttttttgccgttccttactctacataaatgctaaaaaaaattcggttttttagggctctattacagatcggcaccgccggaccgtaaaaatccttaatttacaagcaaaaatttgctcaaaatcgcaaaatttgtcatttttcggacaaaatctgttaacaaatcgcattgaaaattacaaaatttttcccggcggcgcctatcggcaccgccggacccccttgcgccccaaaagttttttggaaggcgccgcaaaaaaatcaacttcgtttttcatgttcagaattccaaaaaatgcttatttctaacaaaaaaaaatgctcaaattgatcatggacaatcaaaaatataacatttgaacattttaaacgtgttttgatacattttgtaaaaatgaggctttttgacccaaaatgaggtttttttgcatgccaaatgaggcttttgaaaattttaatctggcagccctgactatgtatgtgtattaatagaaaatattcatgaaaattttgaatttctttcatatataattatttttaacaaatttcaaaaaatctttttcctaataagattaattttctcaaaatttgtttataaaaatagctttttaaacatttcaggacttgatatcaaaggtgtgggaaatgggaaacatatttgtatttacactcttcttgaaggggatagtcctttggatctttttacgaaagatgggaaaagactatgtggtgaggattactcagaaatagaagaggaaaaagagttgatggaacagaagaatgacgaaatgggagggacaagcaaaaagaacgagaagggagaagaggaagcggagtcaaagaaagggaagaatgccaaaattggagagacaaatggtaaggaaaagaagaagacagacacgacggcatagagagagagggatggagagagagagagagagtgaaagacaggatggagagaagaagtgaaggaaggaagagaaggaaaaagataggaggagagttgacaagaaggaagagagtaagagataggaaatgaagagaaggaataggagaggagaaagagaaggagaagcagaggagagaagaagagaaagaaaggaaaaggaggaaggggaagacaagaaggaggagagaaagagaaaagagcaggaagaggagaggagagaagaagagaaggaatggagaggaaaagaggagggggaagacaagaaggaggagagaaagataaatgagcaggaagaggagaggagaaagagaaaggagtaggaagagagagagaagagaaagaagggaaaagaaaaagagaagagggaagacaataaggaagagagagaaagagaaggagaaggagggaagacaagaaggaagagagagaaaggagcaggaagagagagaagagagataatgccaataaaatttgaaagtttttaaaaaaattgtaattttcctcctcctttggggctgcttttaagagttttgtcattattttccatggatttttctctgtaattgttctgttatgtattttctttggttttccatttttaaattctgtcattttagtgtgatttccatttcgaagaagaaaaacttttgacaaagaaatcggaatttaacaaattttggatgcaaattcaattttaatttcattttttttcataatttgtcccattttttctcccagaatctgaggtcaaattgaaaatatttttgtgaatttttggccaaaatattgattttttccttaccatttaaagtagagttgcacgggaccgggaactttgacaaaaaccgagaccgggaattttcgggttgaaaaaccgggaatttttggctgggaaaaccgggaaaaaac

SEQ ID NO: 5536 - DNA, 1282 bp, Heterodera glycines
  unsure (1)..(1282): unsure at all n locations
aaattttatacatttttttaactaaaatttntaatttatttcttggatatagaaatgccnccggttgctacggcctgtatctgttcaaaacccttagatcttatgatcatcatacactgatcactgatgacgaccaaccgcgtgccgttcattccattccatcgcctttcggcttccctctagttaaggatcgcatttctgttgctgtacccgtatgcttagatcaaggtcggatcctcggaccatgattaatttatccgatgaccaaaaaacctgctgtgaattgaaatccgtatgcacaaagatcgggtctatggtgatccgtaaattatgcacgatacgcgtgggtcatattccttttcttttccgtgtatttctcatcattagctatgctattttcttttcctctgactcgatccgctccgcggacatcattttcccccttataatatggatcgcgtgatccgaggaaatgatctttatcaacacggatactctggctggcgaaagtgtgccggatggagtgggcccatcgcatcgccccgccggaggggacggataataacgctatgtagttgctggtggtgattaaatctgtccctcgctctacaaattgacatatttattgggttggttgctcctcgacgggcagagtcagcaaaaccggatgacttttccaagtgcaaaattgaaaatgaaaattgcttacaaaaatatgcatttgggaaattgggctgctgccggctggcagtttagtgctaattgaggttcattaatactaattaattaattaataataaggttttataatgcagcatgcaattattggatttcttttcaaaggaaaacattatttgtgttaattaaattgataataaacaaggttggtattaattacaccgattggatcgttgtgtgacaagttgatataattttccattttaattataaatcaaaatttaatcataaattaattaaattccaatatactttttttctgctccaatttcgtccaaaattttgcatttttaataattattttccgatacttagttaaattcaagaaaatttacatgattacaaacaccaaatcagctgttaagatcaaataacaattggtaacttttaaaaatggattaataaaagatgattttgcagaaatgtgtcaataaatcaaattgcttaattcgaactctaataaaattatatatattataaaaataaaatttttgatttttttaatcatgttaattattttctaaaaaaattaaaaaaaaaaata

SEQ ID NO: 5537 - DNA, 6070 bp, Heterodera glycines
ccattttatctctttcccctttcgatcactttcggttttcttttctccccaattgatcactccctcttttgatcactttcccattttatctctttcccctttcgatcactttcggttttcttttctccccaattgatcactccctcttttggtcactttcccattttatctctttcccctttcgatcactttcggttttcttttctccccaattgatcactccctcttttggtcactttcccattttatctctttcccctttcgatcactttcggttttcttttctccccaattgatcactccctcttttggtcactttcccattttatctctttcccctttcgatcactttcggttttcttttctccccaattgatcactccctcttttggtcactttcccattttatctctttcccctttcgatcactttcggttttcttttctccccaattgatcactccctcttttggtcactttcccattttatctctttcccctttcgatcactttcggttttcttttctccccaattgatcactccctcttttgatcactttcccattttatctctttcccctttcgatcactttcggttttcttttctccccaattgatcactccctcttttggtcactttcccattttatctctttcccctttcgatcactttcggttttcttttctccccaattgatcactccctcttttggtcactttcccattttatctctttcccctttcgatcactttcggttttctcatcccccaattgatcacaccctcttttggtcactttccatctgatctttgatcactttccttctaatcccttcccatattttcctcccatctcttccccttccccctcagtaaccacgtgagccatgagcttctccaaatcggcacccctttggttcgcattttcgacatttaccgtccccaaattccgctcgacttcgagtccatctccaacttcatcaacgccgtcttcgttctccaagttcgcacttcgccgctgagtatgcagcaaaacaaccaaaggcaggggtaagcaaagaaaaaatattcggacgttaactctgacaaatttatgaagagagaagccgatcagcgaagaaaatgaaacggaaatgacagtgcattcacatcatttaaaactgaaaggtgagcgagaagaaaatgggggggggactgtcgatcagttgggtaactgatcagtgatggaggaatggacgagggggagaacgtcggtcagatcaaggacagatcagtaagggaggaataggggagggggcagtcgatcagttggagaactgatcagtgaaggaggaatgggggggggggagaacgggggaccatcagttgaggaactgatcagagtagtgatcggaaagatcgaacaattaattcggcacaatgatttgtattaaaacaaactggcaaggccaaatgatgctgttgagcagcggcaacgaattgctttatctgtgctcgccctacgtcacttccatccccgaactgcttaattatggcctccgtctctccgccattccgcttcatgacgtcactcgggacctcattctcctcaaccaacagcgattaagcgatgtggaggcaaatttgcaattggaagccaacaatgagcaagtaattaaacgcctaattaattggtgccaacaaactcattaaattatggcaaagggaaagcatagggattaggaaagacaaatgacccttaattacgcagttggaatttctggcgcgtgacttggagacggagaaggcgaagtcggacactcttttgagggaaatgttgccacaaacagtggccacaggtggcgaatgaaagaaagaaagaacgaaaataataaacaaatgtatggatgttttcttttccaaattcagctctgatcaatggccaaagtgtcgctgcgcgttcgttttgtccttttgttcttttgtccatttttccttttgtcctaatttgaccaatttcctccccccccccatttaaggagaatatcccgactcgaccgtgatgttctgcgacgtgcccgcctttcagtccatcgttcccttctgccaaccgatgggaattgtccgactgctcaacgatttgttcaccaaatttgaccgtctcgtcactttgcacagcgtttacaaagttgaaacggtgggaaacaaaaattcaaatcgttttaattttttttttccaaagattggcgattcgtttatgaccgtcggcggtgttccggaggcgatcaaagatcactgcgagagaatttgccttttggccattggaatggtgctttcttttcttaattgttttctgtcactattaaaattctttcgaagatttgggaggcacgttctgtgattgacccgatcagcaaaaaagggctcaaagtccgttgcggattgcactcggggaatattgtggccggagtggtaggcgtcagaatgccaaggtcgggaggcaatccggcacatttaagcgggagagaaatcggtttaaattttgaattttcaaagattttgtctttttggcgacaccgtaaacactgcgtcgcgaatgttaagtcattcgccacgtaagttgatcaaattcaaaaacgaactgattttggaaaggaatttcattttcagagggtttaattcactgcagcgaaacggcacttcggtagaaccattttaataattgaaaaatgatgacgaaaaaactcaaaagttcggcacaacggacgggacgattcgaatttatgtgccgagggaatgtgcaaataaaaggaaaagggccgatgaggacgttctttctgctcagatcgttcaaaaagtcactttgggaaattgtcgaaagggaaagaggtgaacagagaaaaggaaaagacgaaatagcatagggaaaagataaaagggaaaaaatagagaaaaaagacaaaatgaaacaaaagtgacattttgagatgaaagtacgaacagcattgacggatacgaagaactgacggcacaaatggaactgaaggggaccaaacaaggcgaaggcgtagccaaaatgatcgaaggactttttgacgacagaaggatggacagacggtcgacaacgtgcgcaatgatgtgacaagaaaggaaagaatgggggacaaatggacacgaaagggacaaatggacacgaaaagggacaaatggacacgaaagggacaaatggacacaaaagggggcaatggataaaggacatgcttttcaagaaatgtctcttgtcaaaaactctagcataattgaatttatgaattatatgtattaaaattttatacaaaaacattttttgatagaaacaaataaatgattatttttaaatgcaaaaactatgaatagacaaaatgtgtaagtaattctaacattttctgggcaattcacagggaatgtgagcgaaagaagcgaatggtcaaaggaaaagcattggcagtgcgatgttttcgtttctctgtcccccccctttttttggctaatttctgctgagtttggcctctcttctcctccttttgcgccgttcatagtccggcaaatcgcctcgtttggccactctgtccggatctgcgaatttcaaatggacattaaaacatttggcggaccatttgccgacctttcagctcattttggcacgtcgccccaaggtaccccggcgtgcattggcactttccgttctccgcgtcgcatcgtgcgccgttgtaacattcgcattgtctttggcattctttgccgaagaaaccctcggggcaaactgagcaaaaagtgtgccattgaatcgtgtgaaccgaggcaccactgatcgaacaaaccttcctcgcaattccttccgattcgtccgggagggcaatcgcaggcgccgctgacggagtcgcaaccgatggccgagggggaggacgaagcggacggaagatggccacactcgcaacggagaaggcaatgggcaccgaacgagcccaaggggcacaactgttcacacttgggggaggatgttcaaaaaagtatagttggcattccgtttgattattttaagcaacggaaagccacaaaaattcgtgtcaactcacgtggtcgccatggaagcccggaggacacagacattggcccgtcaccgggtcacagctggcaccgttctgacaatggcacgactcggcacattgcaagccgaattgacccggagggcattctaaggaaatttcaaatggaaaagggcataggaggccaaagtgaaacgtaccgaactgacaacgaaagccgtaccgccccttgggacaatgacagcagccgctggtcgggtcacacccggccgagccgtgacagtcgcattccatggagcagttgaagccgtacttcccctggggacactgctgctgacaggtgggcccaatccaaccggagctatagggaaagcgtggaatggcaatacataaacaattgacataaaataatcgcagtaatattctccgcttcggttttggcgctcacccgcatttgcattggcctgtctttgggtcacaatttgtcggatcttcgcattggcacttttccttgcagttttggccaaatcttccggccctgcacatttgcgtgcagtgcggccccgtgaagccgggcgcacaacggcactcgccgctgcgcgggtcgcagcgagcgccgttttggcagtcgcacaaattagcacagctgaatggtgagagaaaaaagtgacaggaaaaaagtttaaatgggtcgagcaatgatcaaattaattacgatgggccgtaacggttggcggggcacggcacttcgcaacgcgtgccaagaaagccggggggacaagcgcatctggagaggaacaaaatgaaactaactcccatgggccagaaaaactcactcgcccgtctcggaatggcattgggcgccgttttcacattggcattcctcgcaaccgacgccaaatttcccagtggggcaaccttaaaaccattcaattgcaaaaggatactgtagaaacaaacagtcggctactgtttgaacatttcaaagatttgtgaatttgctaaccgatttcacaatttttgcccatttgtcccgctttgcagaagcatttgcccgtttcggggtcgcactgttcgtttggcccgcaagtgcacttttgggaagacccaacgccaaatgtgcccggggggccccgcttaaaccaaacgaattaaaaagcattaattaatgataattaaaaagagttaatgggaaaacctctgaacatgcggaccccgtcagacctgaactatttgatgagagttcatatttaaaaaaatgaaagtgcctttcggacattcgcattgtccgctgatatggtcgcatgagccttttgacggacattggcaaatttgggcacagttttggccgaaaaatcccttcgagcatgcttcaaaatgttctctttagggatttttatcggattaattcgaaccccggctgcactttcgaccgcgccaccccgcgctgcattggcaatgtccgctgatgtgatggcatttggcgccgttttggcattggcactgttccgaacaatttaacccgaaagtgccctcggggcatggctgatcgcatctgatttatttgtttgcgaaattaccagcagcacaaagacgcacttttgtggcacctttttccctgccacccaggtaaacattggcattttccgtccgttctgttgcaatttgctccattagaacattcgcatttctccgagcaattcaaaccgaaaagaccaaagggacaaactgagagagagaggggaaaagccatatttgggtgcggattaagcgaaaacgaacggaattcgcagctttcgccggcccaaccggcggcacagcggcaaacgccgcgggaggcgtcgcattggccaccgttggcacagagacagtgggaaaggcaattgggaccgaacagcccgaggggacactctaaagatggaaagtggcaatagcaataagaaactattaagggcatcactttgggtgggtttgagggtcgagattctcgaccactcacatggacat

SEQ ID NO: 5538 - DNA, 1092 bp, Heterodera glycines
cagggaaaggcacaatctgtgccaaagaagcctaaagcaaacggaggtcacttatagttatttatttatttttctaattttctccacccgttggacagtcatcggcacattccgtcccattgggacaaaggcattctccgctgatggcactgcacaccccgccgtcgcattggcaacgctttgcgcacccgcggccaaaagtgccctcgaggcacggaaattggcacaattcgcctgagaaagtgccgaaatgatgattgccactgcattttcttatcattcactgttttaaactgaccatgccatcccggcgaacatacgcaacggctcttcgtccggtcgcatccgccgccattttggcaatgttcgcaagtgaattcgcacgacacgccgaagcggccataatcacaagctaaagcaacaattgtgaagcaaaggcaactaacagcagaacaattgaaaagttaaatggcggttaaatcaaaataaaaagcgttttttcggactttttttgttcgctttttgcgaattcgtccgatggttggcgacgccgcgaactttgagccgttcagaggtggggggattctgctgatggaagagcacatttgtggagaaaagctctaaagaaacaaacaataactgagaaaagcaaacggaggaaggaaaaaagggcaactgaaaaaggaaaaataaaaacggaaaataaaaaataaataaaaaatgagagaagaaagagttaatttgaggaatattaaacataacaaataagcaaataaaataatattactcccagcaatagaagggagaagcaagaagcaccctaccgtaacattccgctgtttttgacttaccgtttattttcgttcgtttttattttttcgctttgcttcacataccatttgacaagtcctccgacggttcgcagcttcgtccgtccgtggccaattgcattccctcggggcacaagcaacgaaatccgccgttggcattttcgcatgcgaattggcaatcggagccgccctcgcggcactcgtcgatgtctgtgcgattcgggtcatttgggaagaaggagcggcaccaaccgacacagct

SEQ ID NO: 5539 - DNA, 3109 bp, Heterodera glycines
aaaaggggtttttaaaattttcaaaatttttctgtacaagaaatcccacaaaaagggattgattaaagggcgatgccaatttaaaaaccttcaaatatccacaatttcgcataacagtattcgaaattgtttccagctttaaagcattcctcaacagtgtttcatttacagctgccagagttttagttggaactaaaaatttaatttcgttataaactccaacatttcattggtgaatgtctaagattcaattccatttgtgctcatttggctgtataattatgataattacgcttttttattactctttcccaccaagacccatttgaacagttttcttgaaaaattgttttaaccaacaaaatttgagaggctttttatttaatgtgtaagctattgatattttgaataaacaaaaaatgctttaaaaaataatttttataatgtgcagctaattttgagcaggaatgaactgattaattaattttttagaatatattaaataaaatttaaaaattactttcctacataacttttgcgcgcccatttgggaattagctttcttattctcagaaccctcaccaaaattttgaaggaattggttccaaaacaaagccattttacgtgcctattcctatttgccttaatatttcctaatcgttttgcctacgaaatgcacctacaaaaccattgcttttgagaggcttaaatttgtgaagaaaaaaagctcagaaaactcggttcttaataaaagtcaatctgaatcagaaaaattctctgtttttattaaagtttgcttcacatgtaaattttgaagttacttaaaagaattctcccatagctttgtagaagatgggtttattacaattacattccgtcagcatattatgttttgccttataatatattcatttgatcttatatagaatttaggctggaaattttttttacaataattcgacaattttccgcttcaaaaaggcgaataaaaaagaatttaacaaaaaaccaaaagaatttcaaaaaaaaaattgtcattcgaaaaacgggttacatacttttaatatgagaatttattagcagaaaacgcgccaaaactgccaaagaatcgaataaaataagacaatattcagccagcttatttttaaatataagttatactcattttagaaaacagctaaaaatgatagaaaaatgggtttttaaaatattcaaaatatttcatgtacaagaaatgcccacaaaaagggattgatttaaaggcgatgccaatttaaaaaccttcaaatatccacaaatttcgcataacagtattcgaaatttgttgccagctttaaagcattcctcaacagtgtttcatttacagctgccagagttttagttggaactaaaaatttaatttcgttataaactccaacatttcattggtgaatgtctaagattcaattccatttgtgctcatttggctgtataattatgataattacgcttttttattactctttcccaccaagacccatttgaacagttttcttgaaaaattgttttaaccaacaaaatttgagaggctttttatttaatgtgtaagctattgatattttgaataaacaaaaaatgctttaaaaataatttttataatgtgcagctaattttgagcaggaatgaactgattaattatcctgtttacgagtttttttgatatacaaccctcccacgttccctaattttgatgtttaacctttacaatttgtctcaattattattcattttagaaacttttctctgtgctatttacttttttaatgacaacttcatcatcatctgcttatccaatgcttttcttcacccaaaaatggagcggtgacggtgagttatgggcacataaaacagaaattatttgtagccggggtggttcaaagttccgattattaatttgactccttttttcgagtttagacagtctttgggtgttctaatggctccgcgatgagtcaaaattcggcatcgccagcatcgatgccgtgtacgagctggaagtggagaaagaaacgaggaagacattcctcggaagcagcattgccgatggcgatgtggaggagcaatgggagtaagtgaaaaattttttgttaaaacaaaataatttcctttaaattgatcgtttttttctttttgtttatgtcttgcctatcccaaacggccctctttagtagagatcggaccggtcggtttttttttcggtttttttcggtttcggtttttttcggttttttaaccgaaaccgttcgaccgaccctcttgtccggtctctactctttagggctgtaatcacccaaatggacggattgacatgcatttttttattttgtctttggtcttataaattgaatataaataataaatggcacacagcttgggtactgaccaggaaaaatttggaaaatacgttatgagatcaggcccctttacgataccgaaaattttaaaaatttcttattggagacgacaggcggccatcaatgtcacatcggtgaaaaacaatggcggaaattggaaccgaattttggaaccggcccaggggcgtagcagcgtcggggagggggttgttccccagaccacccgtactttttgtactctggtgcctaaacggcattaaatgaacatatgtatgacaaccatgcttttcgttcaatgacttaatggtttagaaaaataaaaaatatattcctgcagaatttcccaggaccacgcgcatctttgtcataccggtgattaaatggcattataatgacaaaatgtccgacagtcatgcttttcttgccatgatcgaataattaagaaaaaatcccatagttgttgagtaatttcccaagactatgcgaataaatgtcactctagcgccaaaaccaaatgagcatgttaatcatcaggatcttgatatttttccctatgtgatttacggatttaagaaaatcgcaaattaattattggagaatttcccaagaccacccgcacattttgtacgctggagcctaaacggcattaaatgaccatatgtatgacaaccatgcttttcgtttcatgaacttaatggattagaacataaaaaata

SEQ ID NO: 5540 - DNA, 1960 bp, Heterodera glycines
tagagtcaaattcttcaacaaattaaattcaattaataaaagcgcatttgcgtaagtgcattgacccatgtgcgcaattgaccccccccccctctccattgtccacttaaacaccaagttttgcttatattgtttaccctaccgctttttttcttttcctgcaccattgcttttttcttactttttttcgcggtaaaaaaatcacaaccaataacgaaaattttctcgttaccataaacgtacatattgtgcatgtcataatgcttgtagagttccgtcagtggcaaatttggtcaaacttgacgacatctcacacatcggtttcgccgaaaattcctccattggctgacgctaaatttttttaattaaatacagaagggaaacaaatgtgagagtgggcttcgtcagtacgaggtctctcttttctagaaaaaaagttctgtttcagccctgactcgtatacagaacaaagtaatcatcctggtgggtctcatgaagcccatgaggcattaacaaacaagaaccacgaagccaggctaaagccaccagcaaaccggatcaggacattttctcctgggcttcgctcaaatttgtttttaattatctaatttaaagccttaaaacatttaagaagtatttaaaaactcgaaaaattattcttgaattagtttttcaaaaaaaaattttgaaatttttcataaaaatttttaacgattttctttttgattaactaaatgtaagctagaaatttttcaaaaaaattagggagtcggggaagtaaagtgcaccccgagcaaaccaacaacggctggtgcttcctgccaaacacagagagaaacggcaacaagttgcgttacctgaaatggtcaattttgaaaaaagtgtatatgtagccaaaagcaaaagtatcatgtccaggtacgggccatgcatggacaaaggagtcatgcatttagcatttacaaagtaaagaaaatcacgccccccacccggttcctcaaaggacaaatttaaaccattgaaaaaaatacaaaattttcctacgaacttacaaaagaaatttttttaattttgtcaaataaattgaatatgcgcaaaattatataaaatttgtttgcaagccttttaaaattggggtaggtaagcaaaaaatgagataaattgtatgttttttttttgctaaattatagtcaatggcacctggagacaacggcatcatttatgatgttccgatggttggcgtgtccgtcggcctgtcaagaactggaagcaatggcggcatagtgttcttcgaagtggtgttagccgacccgttctacaccaactcgtcgaagggaacgacatttgtcactgccggtggcggctacctggacatacacgcaacggattcacttaaaaatgcgtacggcgccgccaaagtgatcatgcgcgaacagcgcaacaactacttggacaaagcgcatttgcatttgaatgttgtggcagcggcggttagtttaaattgctttttcaatttggaaattttaaaaaattggctgaccactcagacagggacggtcccagggggggtacgtacccccccccccccccaaggcccctccgcacccgaaatttttaaggaaaaattagtatttttgctgaaaattttaggttttccctgctggtacccccccaccacacttagcctcacccaaattttccaaaaaatttcgctaaaattttcaaaaaaatacacaatttttgatgaaaatctgctaaagatggctgaaaatcgcaaaatttgtcatttttgggacaaaattcgttaacaaatcggattataaattgcaaaaattttcctggcggcgtctatcggcaccgccggaccccctgttccacaaaaaattttttggaaaaaccgccgcaaaatgtggtgtcaaaatcaaaaaaaaaggtcgtcgcccggggggaggtacccccc

SEQ ID NO: 5541 - DNA, 4250 bp, Heterodera glycines
  unsure (1)..(4250): unsure at all n locations
cccccccccccctactcatcaattccaactattttttgagccgtgggcggtccaaaacctgtgagtaggactaattcaaacagtgtcagtctgtttagttgttattcttgttcatttttcatatctttgatgaacctaatcaatgttaagatttttaatgatcaaaaataaaaaaattaatgtttatctttaagtagtgattttttgaaatttttcacttcgttatttttatcattggtttttagtaaatcgtatttatattagtgaaattgaaatgaaaaatattatttttgctaggcggcgcaaatgtcgcggcgcaaatgacgaggcgcaagtgtcgaccttgctgagcggcgcaaatgtccatttttgctaggcggcgcaaatgtcgcggcgcaaatgacgaggcgcaagtgtcgaccttgctgagcggcgcaaatgtccatttttgctgtgcggcgcaaatggcgcatcacgattcaaattaggaaaaggattttggaatatttttttattcattttagcactatttccctttactctgtgtctgtttttctttgtttgttttcatgggcagagattacaacaaataaatatttgttcaagcacatttcttctgccgattggtcatgtttcccccccccccctttgttcattgtcctaaatacaaaaatgtgttcaatcgcttttactctctccgttggttcactattaaatattcctccaacaatttcgcataaacacagcggcccaattttgggctccaagtacaattatgctggatttttcgtcttagtggtctgtgagttagtcaacaaaaagaggggctcaggttcaattcctccttgtgtttgtgtataaaattcaattttttaaagcaaacaaataaaagataattaattacagaacgccaaaagaaaaaaatttcaaatacaaagagttacactattttttactgctgattttattgaaattttttagcttataacttggtcaatactagaacaaataaaattattttatgctcattttgaagggaaaattctgaagaatatttctaagttagtcaaaagtttaaaaaaattgtttattggcaaataaatgattcatgtgttattttatatgttagagacaaggaaatagtacgcccaaatgagagaaaaagaaaaaactttgtccttgaaaaaaatttttcctattgaccaattttcttaaaattttgcataggcccatattttgaccccctctatcgaatcacggtttattttttagctgtctagtttttaactcgagatcggctcttatatttttacaagggaaaatccccaaaaaattttaagttttgcaaagttttggcgttctgattactaaataaataataaacctatttgcactgagagcccaaaattgggccgctgtgtaaaataccaaaaaaacaactcaattttccgacatgaatggcattgtgacggaaaatgcgccaatgtattcctggctttttgtgcttaaaatattgattggaacaataaatgcgaaatgaatgatgacggggaggtcagggacctattttgaaatgtcatttagcccgtgctcatttgtccacttttccttaaagtgctcgtttgtcccttttttgatgtgctcgtttgtccatttttctttgttaggtgttcatttacacctttgttcatttgtctcctctttttcagtgtgctcatttgtccacctttttttcatctttctctccgtttttatgtattctgttctcttttttgtttttttgttttccaaatccaacaaaaacaaattctcctccgaattctttcatcatctctagggatgggatttttaggggcgaaaaagtccaaaataggggcgaaaaaattttaaatgtaggggtgaaatttattaaaattgctgttttctctatgtaaatagttaaaattaagtcaaacacttttatttaatgattgcagttagaaataagtaaatttagaaattttcaagatttaagggtcgattcttaggagtgtattttttgaaaatttttaggtcaattcttaggggtgtatttttctgaaatttttttttgtcgattcttaggagtgtatttttattttttattgcatttttgttaataaatttcccaaaaatcgcgaaataggggcgaaaaacttattttagaggcgaacactcaaaatagggatttctagggtcggataggggcgttaaaacgaagggtttccgaacaaaaaggtgtttttcgtgcatttctcgtcgagttaaagccgcagaaaaaataagtaaaaacctaagaatactcaccctagtcattacttattgctgcctcatctttcttacattcctatcgctatccaaaggcttcataattttttccataaatgcccccggcggggtcgatttcaccgtctcccccccccccccatttaatcatcagcttctcatcgtcgtcatacccctgggcgattggggagggggctttgttggttcttttcctcccaaaaatgttaattactgttagtctcaaaaatattgtatcattttttttttgtaaaattcgttttctcaaaaatgaatggtggcaaaaaggtcttttttacgccaaaagaaaaaacatcaattagtagtgcactaattatagccaaaaattggcccgaaattttatatcgagataaaattctgaaaaaattccttctaagataacttttgatgccgatcaaaagtcttttggaccaacataaatcagatcactccttgatggtcatctctcatcttaacacccataaatacactaaaaattgggaaaattttcgaaaaaattcctagtgggttgggaaaattttctgtaaaatttgagtaggtctgtcagaaagagtgattgatgacaaaattatctaccgaattgcttttcatcgtttctttaaaatttttaacgaatcgaatttattggagtagccgattcgtaacatttttcaaaaattttccattccttcttaaaaaaccagaatttttattttttcgcttacaactaataatgtatgttatctatctgtcttcgaaattttcttactatgtccgtttcgttcggcgcaacaggaagcccaacagtttggcccaaattcgccggaaaatttccacccgtaacaacccgttgcaattcttaaatttaatacaaaatttttctggccttgcttcgggttcggccccatccaggacaagggacaaagcagtgttttttttacaacataaaataaaaaaactaacgctactttaaaagttaccgtttttgaatttatcaaaaaccaaagaggggggggagaccattatgctttgtaaattgtaataaaaaaatgtgaaaattgcttttcgggtttaaggatcgctcgctgcacaagaatctgacatccattttgaccaacttcgacttcctatagttgtaaatttgaaatgtcataatctcagtgaatcaccagcagaacaagcgctaatcacattaaaactcatttatttaggctgaggattggacaaatgatattagctaatgatacttatatatggaaaaacggcacgaaataaaaaagaataaaaaaataataagatccaattctcgaccattttactgtttgatgctgattgactgatcattgtgtgtaaatgttgtccaacaaaaactgtagtagcaaaggcgcatcgattatttaaacaaaatgaataaataaaattttttaaatattatttaccatgaataaatccgccggatatgttgaaattattcggtagtgatgcgtttttgtttacctggtactagaaagttgattatttccaaggtttattttaatcgaaaagtttctattaaattatcgcttgcaaaacttataaaaattaatataccaaactagcaaaaaaagaaaaaaagatatacaaaacaaataatttttaaaagtatgcaaagaaaatatctaatatacacatataccaaattcgtacacttcatatacacagataaattccccttcttgttgatctggggccaatcacaattacgaacgacaaacgacaaatttggcatttgtcttcgaatttgtcaaaacgacaaaaaattatgtcgtttgtcgtttgaataagccgatttgccgtttttccgtttgtcgtttgtctctgtcgtgtgaattgtcgtcctgtcccgnttgncnnnntctnccgtnnntttgtcgtttntcgtcggtttt

SEQ ID NO: 5542 - DNA, 1695 bp, Heterodera glycines
atgaatgaatcacaacttccatcgccagtgctatggaaaagaacattcattttagtgtgaatgcaaaaatgtcgttctttatacatacaacatatataaatttacccaatggacgaaacccaactcgtatccattgtcgaaaagtccggcgcccgccgaaagtacccaaacaactaggttttcaacaaacttgtaggaaacacttatcgaatgatggctaattaaaattttttaattaggataaaataattttgatcataaaaattatggctagagctttcctataaccaataaaataagtgatctttccatcattcgatagccctaagtattttctgctagctcgcaaaatttcacaaaaatgtgttgagttacaaaaaagttatggccaaaatttttgaaacctggttgcttgcgtacttatggcaataaatttgttcaaacttgactaaattatgtgaaattttgcaggctagtagagaactgtattgtctatcgtaagatattaagaattaaatgttaacctttttttgttttatttatcttttaaactgtaataatttgttaagaatataaatattatgctaaagtaaatgattactagggctggaatttttatgtgctaaaaatcctgaaatatgtaataaaatatgtgctaaaaaaacccaaaatatgtgctaaaaaccaaaaaaaggcctaaatatgtgttaaaaaaatgcaaaaatatgtgctaaaaattggaaaaaccaatggtatttttgcataaaaattccaaaaaactcattctttatcatttttgcccgcacaattgcaaataaaaaacatttggaggtgtttgggggtaaaattagtccttttttgataaattgtttttacagataatttttccatcagttgagtaagtgccagcaagaaacttcgatatccagtaacgaattaatgaagaattcgattttcggtacacgaaataaataaagaaaattttgaaagagcctataaaaatggcaagaaagttgatttttaggggtgcatttttgaattttttgtgtttttcttagatatttttttcaaaaatgccaaaatatgtgcaaaatatgtgccaaaccccgaaatatgtgcgatatgtttttatgtgcgaaaacgccaaaatatgtgtttttatgtttttataagtcgctctaaatcaaaaattgttcggagaaaatgctatttttgggcttctctcgccataactaagccgcaaaaaaaatatgttaaaacataaaaatcccagccctagtcataaagcattaacaataattcggtgggctggaaattagctgccaaatttgtatttgggaaaattgcgaagcttatgaaacaatttttaatttaattcattctaattatctagcttgacaatttgaataattttataagaaaattgagattaattaaaaagtttggtataataagcccatgggattgggctaaggcgcataaaaccgttttttcgaggccgccctaaattcaatttccatatgggagttttagaattgctaaaataaatatttttaattgaatttgaggttctatgcttaaataaacgtaaatttttattggaattggtttaaaaattagcccgtgggccaaatttgtgtcaaaaatgaaatgcgagttttaagaaaatattactaattcatttttgcgctatac

SEQ ID NO: 5543 - DNA, 2147 bp, Heterodera glycines
ttcagctggcgtttggccagatgtgtttataacgcaaaacgctaattattatgaacaataataaggaaataaactaataaaataaatccgagaaaatgtgaccaaattgcgattaagataattaaagcaatttgttaatgatatcagactcagtaatttaattttcgcgttttacatgttattttctatcatgtgggtggagggcttttttgtcccatcagccacaaaaacagcaggaagcactttaaaccacagagattattatttaatttattaaaaaaaaaaataattgaaaattttttaaagttattccagtctattttttaaatgagatctgatgcccaattaaaatttattttttcaaatttccttcaattttctagaattatctatccgattaaagcttttagtgttttaagtactaactatcatctcccaagcttttaaatttttcattttttttttttggttttagggcctaaaaatttttaacacaacctaggactttttgaattgacatattgatttttaaatcaatttaaaaattttaatttttcaaaaacccttccgcggggagttttttaatccaatggttttcaaacggaaaaattgagaattaaaagcaaaggtataagattattatgagtatggtgtactaatttttcaagtgctttcgtatttggtaaaaaatggttgttataagaacagcaaaatgccaaaatttcaatgagtgccaaacggatgagcgccaaactcaaaaaaaaaaagaagcaaatttcggccctccatgtggaaaattgatacattgtcgtgatggtactcacaaatggcacacaaccatgccattcgcttaacgccaaatgccgtgtttttaaaggtgcgattaaattaatcacactcaaatggacattcgcgcaatgcgtataaaaaatgtgccgaaaagtgctcgccgagagagaaattgcgtaagttggcaaaacgtcaataaaaaaaaatcgagggtacttattagcttattgaagcatcccatcctctattgtcttttttttctttatttgcttcgtttttttttaaatttgtatagaaaaaaatagaattttttattaggtatctacgtcaaaaaaattgttgcctcacattaacgaaaaatacataaaaaattttttgtttatattggagtgatattgtcaattatgctgaattattgaagaaaaaactaaaacaaaagatgggaagaaaattgaaagaatttggctgataaaaaaataaaaattttcttaaatatttttaaataacaaacttttaagttaaattgaatatctttgtttaaaataaaaaaagcatatctttttgtagataatacatgaaaataaaaggaaattattttagataattatttattttttggaaatttagaattttattgtatataaattaaatatgattatattaatgtcattttaatgaaatatgattatattaatgtcattttaattaaatatgattatatttatgtaattttaataaatatgatatattaatgtaattttaattaaatgtgatatattaaggtaattttaattaaaatatggcatattaatgaattttatcagtgtttataaaagtgagatataattgagaaaattttaaattttcaaaatatttctttttatttcaacaaaatggcattgacactacaaatttgcaataaagaaaatgtttttggcattccaatttgtaaattgtttgccggaatttgtcatcacgaattacgggttgactctttactatttggaattaaaaaaacaaaggatgaaagataaaaaaagagatactcggagtggcaataaattatgcagaaaattaaacgaaaaatcagtttaatcattagggttataaattatatggactaaaaaacgccaaatatggacataaaatatggactaaaaactgccaaaatatatgctataaaccataaaaattacaaaatgtgtttatattcaatatttgcttaaacagacttaaaaataagctaaaaactgccaaaaaatagatttaaccctaaaaaatgtcaatttttattaaattctagctttacaattgcaaactaaatacgtctcaaaatttttgtaataatctcattctgt

SEQ ID NO: 5544 - DNA, 3465 bp, Heterodera glycines
ccccccccccccccccgaagccaagggtctggctaagcccttgaataagagataatttaaggtcgttttttaactaaaattgctaaatttgaaagcttggacttttgagttttttgttcaagttagggttccgagcttcggaattgcctaaatggatgccggattcgtgatcagcgacctcgaaacccccagggaacttaatattttttcactgacgcattttccgggagctaaaagtttacatgtcatcaaagaaaacaagtttcctccaaacttcttgacactggccagctttaaattgattttttgggaaatagttgcaaaaactttcaaattttggggtgttaaatcgttaaattttatccaaaaaggttacaacaaacttaagccaaatcaacattgagataaaataatttttaaaatgaaaattgtcaagaaaataaattaattaattttaaaggataatgaaaactaatctttacaatacttgtattataaatttttaatttgttatttgagaaggaaaaattatatttaaatgtaatgattattttatttattttttccaatatttgttcagtagaataaaatttaataaaatcttaaacattaattatttccgattaagtaggtttttatgatttctatgaaatcaatagagttgcgtttttgttatgtaaaaaaaaaacatattaattttaaaattattattatttttaaataaatacaatttttttatgagaatttttaaataaaatgaaactccacctattattcgttttatttatatttttgatcactcaaattaatcaaatcggaacagaaaagaaaaagttggaacaaaaatcatttgatgaaatatttggagaaaaatgggaagagaaagaagaagaaaaacgaaatgaactcaaaaaaagagaaattattggaaaattttataaaataaaagagaaaattaagcaaaagggaagaaaattctcaaaaaaagaatggaataaaatagaaataaaaatagcaaaaaaattagggacaaattgccaatatatttataaatggatcaaagaatttggcctatataaatacaaatcaaaaacaaatgaagaaaaatttaaaattgtgcaggaatttattgaactgacaaatgattataagcaaaaaagaaaatattcaccaaaagaatggcaacaaaattatgccgaaatttgtaagaaaattggcgtaaaccgagacataatttacaaatggaagaaacaatttggaattcgtgtaaaagaataacggaggaacaaaaaatggaaaaattgaaaatttataaataccggtaaaagcaaattgccttttgccgtttcttcatttaccgaaacaaaaatcgacgtaattggtgtggttaatgtacccattcagatgaaaagaattgaatgtcaaataccgtgtctcataacccgtgattcattttcttattgctaatttttataaattaaatccttacaatatttttattataaatgtttaatttgttattttcgaagaaaaataatatttaaatgtaatcattattttactgattcttgccaataatttgtttaatagaataaaatttaataaaatcttaaatattaattatttccgattgaataggtttttattatttgtaagaaatcagtagaattgcgattttttaatgtataaaaaatatatattaatgttaaaattatattttgagaaaaataaattccaatttattttgagaattttaaataaaatgaaatcattactattattttattcaattttaattgatgaatattcatcaaaataccattttaaaaattttttccaaatttttatcacgattaataatacaaaaaaagcgaataaaagatgtaaataaaacattttttttaaattctcaaaattaaatttatttattttttaaaatgtatgtattttatgttaattcatgtcagtgttgaaaggagttcaaaaaatttccatcttcgccaaatggaaataaatgatgacaaatatttattcacaaagtgtaatcaaatttctttaaaaggcaaaattttttacaaattttaatgtgcttcaatttagggtccataacttgtgaggaattgattttagcaaaaatcgtatttgatcatatttgtagagaatttcgagatctttctagtatgctttatgcccatgctctttttatactgtgatacgaaaaaatttataaaataaaaataaattttgaaattcaaaaccataaggggacaaaaaagagaactgaaatcattagcatattaatctagatttttttttattagccgtttctttggtttaccgtgcttactaattagtacctcccggggcttctatttttcaacccccctcgagggggctattctaatttagaggggggtgggttactaattcagtaaatacggtatattgattatgaacatggagcaccgcaacatgtagaaaccgtaattttgaaaaatacggactcggaccaggttctgaatatccgagttcgctggcaccggcctggcttagaacaaagcccggcgggcatatttcaacttcgagaaacaaattccgacaaagtcaattaaaaatggaatgagtttttcaaacttgttctgattttcacatttgtcctgagaaaaagaataaaatgtcgattttttttttgttattattagagttgagcggtaatcggtaattgcaaaaaaaccggtaccgatactgaccggtactgcaaaaaccggtaccggtaccggtaccaactttttcaaccggtaccggtaccggtaccggtaaaaaccggtaattttagaacataaaaatttttggacaaaattttccaaatacaaaatttttattcagttttcgcgcgagtacctgttttttagcattagaattgttcagaagtatatgtatattcaggttgaccaagttttttttttcaaattcaggacatagaacactaaaattcagatatagacctcaaaattcagattattgcaaaacaaggggtcagcagccaattttccaattttgcgaaggggtctccggccatgtaaattaatgtaaatcaatgaccttttttgctttcaacaccgctttttacgcggcacgttttttccaagacttttgggggacaaggagggcctgcggtgccgataggcgccgccgggaaaaattttgtattttttaatgcgatttgttaacagaatttgtaaaaaaaatgaccaattgattaagttttgggtttttaggatgcttaacatgaaagaaaaaagttggaatattttttaaaattaaaattttaattaaaataatggtaaagaaaatgtgaggaatattctatccaagtggggaattgaacccaggcgaaaaattatgaaaggtagaaagtttaaccactacaccacatgtgcatgtgtgtaattccatgactaaatg

SEQ ID NO: 5545 - DNA, 1659 bp, Heterodera glycines
ttagtaccccccggggcttctatttttcaacccccctcgagaggggtattctaatttagagggggggggggggttactaattcagtaaatacggtatattgattatgaacatttcaccgcaacatgtagaaaccgtaattttgaaaaatactgacttggaccaggttctgaatatccgagttcgctggcaccggcctggcttagaacaaagcccagcgggcatatttcaacttggagaaacaaattccgacaaagtcaattaaaaatggaatgagtttttcaaacttgttctgattttcacatttgtcctgagaaaatgaataaaatgacgatttttttttgttattataattaatgtaaaatatttctgttttggatgaaaaatttgttaataaatgtcctgattttttatgtttgtactgacttttttataatcgatccaagcaataaattctcatttcttcatttaataaataattcataaagataaaatttccttttttttttgaattgtaaattattactaatatttattgtcaattgaaaatgaaattctgtattttattatttttatttttgattgccctaattattccaatttttttctaaaatctctttacattgtgaatttattatatttttattgaaaatatgtttattattttcgaatgagctccagtagaaagtaataaaattttatttaatcattaatttaccaattggcaattattttgtcattaagataaaattattattattatttctttgcaattaaacaggatttccttattttattaagtaaaataatgatttattcagttttttaatcagaaaaaaatcatttaaatgcctcaaaaaatgaattgccatttaattgaagaaaaattaaattcttgaaaatgaaattctgtattttattatttttatttttgattgccctaattataccaattgaatcagctaatgaaaaattacaacagaaatcatttggcgaaatatttggagaaaaatggcaagaaaaagaagaagaagaacgaaatgaactcaaaaaaagagaaataattggaaaatattataaaataaaagagaaaattaagcaaaaaggaagaaaatgcacagcaaaagaatggaataaaattaatgcaaaaatagcgaagaaattggggacaaatcaaacatatattcaaaaatggattaaagaattaggacttaatcaacgcatgcaaaaaagctacaaatcaaaaactgatgaacaaaaaattgaaattgtgcaaaagtttattgcaatgaaaaatgaatttaaacaaaaaagaaaatattcaagaaaagaatggcaacaaaatcataaagaaatttgtaaggaaattggagttaacgaaagaacaattaacagatggaagaaacaatttggcattagcaagaaaagaataacggaggaagaaaaaatagaaaaaatgaaaatttattcgcaaataaaaagagaaaatgcaaaaatgagtgataatgaaattgctaaaattgtgaacacttcaaatgcgaataattgtaattggaagaaacaatttggagaagaaatgtttgagaattgaaacggatgattttttaagaaattgctttgagtccctccccgatcaccaccttcaaaaattggaatttttt

SEQ ID NO: 5546 - DNA, 1317 bp, Heterodera glycines
ttatttccgaaaaatataccctggatagtgtttcttttgatccattcacaaattaacaaatgaatgtctttgatgggatttcggcttcaaattactgatcaaatcgaaaagataaaatttcgaggaaaagatcgaaaaagaattcttgacaaaatgatttttgctgtgaacacatatatttcttacctgaactaaaagattgaagtggctttttgtttgtctcggtactgagtttgttgccggcagaaattttgaaaatttaagggagggctaaaaaccaaaattactttaacaaatatggatgggaacgaattctggttgcggattgcgttatcctttttgaacctttgaaattcctgatccctgaaattccgtcattggccccacccctggctcaaatacaatgtgtctcctccacatgcgtccattggccaatttgacccaccgcctttcaggtggacttccaaggcgagcgcaaggtgttccgtcctgaagaaatttcttcaatggtgttgaccaaaatgaagcagacggccgaggcgtacatgggccacacggtgcgcgacgcggtggtcacagtgcccgcctatttcaacgatggacaacgacaggcgacaaaggcacatttttgggaatccgggaattttggacaaaaccgggacttgccgggaccgggacttcgatttttgttcgggaccgggaaccgggaccaaccgggaaattttaaaaattcaaaaaaatttaatttaattttaattgaaaataatacaaaattaaattttaagtttgttttttatttaataaaatccaaaagtaaagctaaattaaattaatgaaaattttcaaatcaaattttcttcaatcatttcaaacaattaatcatttttggactaaatgatcgaatattatagaaattcagatttcataacttttttcggcgcgcttttccaaaaaacttttggggaagaaaggggtccggcggtgccgataggcgccgccgggggaaattttgaaaatattcactgtgatttgttaacagattttcaacaaaaaaggctggtttttgggattactaagctcaatttgtacgagttttctttaaaaaaatgataaaatatgagacaattaaaaaaatatgaagaatcatattttgtcgatagaaaacctatgattatacaaaaaaattaaaacattttaattactgtagaggaaattgaactatgtgaaagcagaagggaaagtcaaggagaaagccagtaggccatttgcgcacaaattggcactggtactttttaagatattaattaatattttttt

SEQ ID NO: 5547 - DNA, 2859 bp, Heterodera glycines
ttgaatttacatactgaaagtgatacagaaaattcttataatatactcaattcacgaatttagcatgatatgtgtatgaatttgttgcattttattattgtattccattgctttccgccactgtctctccttctcattcaacatgttggataatacccctgcctatttccccaattaattcttataactttaattgtcacatttcttcttaataaaagaatgctaataaaatatatttttatgattgaaagctaataattaaattaatttaaaattttcaaatcgaatttacttcaattatttcaaacaattaatcatttttggaccaaatgatcgaatattaatagaaattcagatttgcttttaacatcactttttttaggcgcgctttttccaaaaaatttagggaggaaagaagaggggtccggcggtgccgttaggcgccgccggggaaaattttgaaaatttgagtgagatttgttaacagattttcaacaaaaaaaaggctggtttttaagattactaggctcaatttgtacggttttctttaaaaaatgataaaatacaattaaaaaaaattaagaatcatattttgtcgataggaaagccatgagtatacaaaaagacgattcaaaatattttaatttctgtagaaggattgaaccaggggaaagaagggaaaaggcacggagactagccactaggctatttgacaattggtatagttgctttgaaagaatatatttatgattatttctcaattttttccctttaactccaattttcatctctaatttttcactcagacccccattcttaccagtgcttgtttttcccggttcccggttgccctaccgggatcgggacctgagcttttcaaaatccgggacctcggatgaccgggaattcccggcccggtcccgctctactctagttgaaaaccattagacaaatttttaataattcgtttcttgagagacaaaatattaaatttgttctgattcccattttttcaattttaaatacaatattaaaatatgttacacatttatttcataagaataaaaaaaaattgatttttaaaatattattattagaaaaaaaattgaattatttctttaatgcattttctttattttttaggatgccggtgccatcgctggactgaacgttttgcgtattataaatgagccaactgcggctgcacttgcttatgggttggacaagaagctgaccggagacaaaaatgtaggttccttctctccattttgaatacaatttgcctaaatttccttgaaaattcttattactaaataaaataaaatttgttatttatacaatttttagatattgattttcgatttgggcggtggcacttttgatgtgtcaattctgtcaattgcggaaggctcactgtttgaggtgaacgtaaaatctaacgtttttatgcctgaagcaattcatgtttaatgtttttttcctgaaagtggatgcttaaacaaacgcctcgggaatctttttcaatccttagaatcaaatcctcacaattaagccttgggaccgaaagttttttttaaggctttgaaaccaaagattttttctttgtgttcttttaatgcctttttataggttcggtcaactgccggtgacacgcatttgggtggcgaagactttgacgcgttgctggtggaccatctgaaagcggagtttaagcgcaagaatggcggacgcgacatcggtgcaaatccgcgcgcgatccgtcgtttgcgcaccgccgcggaacgcgcaaagcgaacgttgagcagctccaccgaggcgacggtcgattaaagatttatttgcattaaattaatgaaaataagttggatttaatggggtccaactgttttttgaagaaaatattttaaacaaatgcctttcgttgcagattgaggtcgattcgctctttgatggcatggattttcacaccaaaatcagccgagctcgtttcgaggagctttgcatgccgtaaggcatttaaaaaatttaaaaaaaaatttaatccaattttaagtctgttccgcaaaactctcgaacccgtggagcaggcattgaagtgagtgactgacagacaaatgggagggtgctgaatcaacatgacttgcagtttatggcaaaaagaagggcttgaaagatacaaaattaaaaaagactgctgcttttagagaaatgattgccaattgctgtatatttagggatgccaagttagacaagcgttccatcaacgaaattgtgatggttggcggatcgacgcgcattccgaaggtgcagaagctgctcaaagagttcttcaacgaccgggagctgaacctgtccatcaacccggacgaggcggtccgtaaaataacttaactcctctcggctttgatgactggcagtcccgataggccgtcggggaaattttgaaattattatctgacatcaatcaaatttgccaaaatattatttatcgctgtcgatcatttgatgtgaatttagtttattttcaggtggcttatggcgctgctgttcaagccgcaattttgtctggagtaaaggatgagaccacaaaagtgtgtgagaaaataatgaaattaattgggttcgaatttaaattagaaataattgaatttataagagaaatgggtacttgttaattatctgtactcagattttcaaaaaagtttgtttctggctataacttttttctttggcatccaaatccaacattgttggtatcattggaaagcttaacatgtttcgaagctatttctcgctatcgcttcgcgatcaaacaattatgaagaaagttatacgtgacaattgcgaaaagtcgaaatt

SEQ ID NO: 5548 - DNA, 3666 bp, Heterodera glycines
tgttgaaatggtccagtgtcgaaaatgtagtgtcgaaaatacccagtgtcgaaattaccagccacgatttcactgattcactttttcactatttatttttatttaaaaataaatgctcgggatttaaatgaactgatgatatattataccaaattaaagaacgattaatttgtaaacagctcacaaaaaagaaagcattgaaaagtaaaaaaaaataggtagaatttggccatttttcatttgtaacccttttatgtgacctgaccattttgaaggttaaatatatttcaccaagatctttgggctgatctcgatattgttggatttaattgatgaaaattttgtttttttggttagaattttcctcaagaatctactaatttgtaagcaggattttggcatatttagattatttcacctttaggcattttctcaaattagatttttcttacattaaatttacatccctaaatggtcaacaattctctgttggcctacttccacccctaacaaacaaccaaaaaacttggtgtcattcagtagcgataaattttctttagatttataccaagaatatttaaattttggatattttaagcaaattatcataattatttggtaagcaatgccaaatggacgctttttacgaaacgatcagcttgggtcgctatgattattaatagaattgcgttttccccacttttaattgaataccatgaaacctcttaattttatgggatggagttagggcatagattggaaagggactccacgctaattgtttttccctaaaaaccaaatgctaatgaatgcaattttaaatgctcgagctttgttttcataaactcaaatgctttttttctccattcagaagacgaaaacaaaaattttttcaaaatgtttcacttctctcttatccattccttctgctggcgtgtctctcctcagttcatttctgtacaaattataaattctttaggaaataaaatattcggaaaagtcttttcagggaatgtaactaattcattaattgatggataaattttttaggatcctgacgcgcttacacccatttcacttttgtcagaaaattaataatattgtaagtgtattactatcgatgcattccttaaatttgaatgcttattaccgtatctttttaattaacaattccaaaaatatgtgtaaaattcatgaaagttttttgtcctcccatttaaaaagcaggccttggtcttaaatttttgtaaatcgaaaatgagatttaaaataaatgcaagaaaattgctcgattttttcaaactttcacttaactggttgtacccaacttttctaatttcaaactgtgaacaaatttaaaattcggtattttattttgcggttttccagatgaatttgtacttggctaaatctgtgtttaggctaaaaatcacgaatacagtccctattaaatatgtaaccggaaaatgcgtcagtgatacaaatactttaaaataaagtgcttttagcattaagtattgtagaacaaaaggtcaaaatattatattataaaaacctcgttctgaattggtaatactatagcctcccttattcgaaatttttttttcaaaagtttatgtcataaaacaagttagcctgtgggtttttcgagtcgctgacatgaatccggcatccatttaggccaattccgaaccacggatccgaattcgaacaacttttgtattactacaacacataatgctactttatttttaaagaattatatcactgacgcattttctgtgagccgttaaatacctgttccacgctgtggtcgctttcactccccgaattggcaccggcgccgccgtgtcgtgccgccgctgggcgatgttcaccagcagaaggggagccaatttcaatgtcacgactttggtcaccatcactatcactattgtcgtgtcctttgtggtcattatcatcaccacgagggtcacacagacagtggttcatcttggcgagcacaaagattagaaagattacaaataaagctcctagcagtaagccgaaaattgttttcttcgaccatccactcccatcgtcgcgtcgtcgtcggcgttctgtgaaaatgaaaaaatgtagaaaacaaattcaaatttgatttctgacgggaagaacaaattatggtttcgtgatctttcgatttttaaaaatgccatgaaaaaaaattttatataaatttttaaattttccaaaggctttaaagccgccttccttatgaatttgttactgcttttttttgctttggttggtgtcgacggaaagagctgaactaatgacatcaagagcccgaaaagaattagggtctctgtaatatctaaattttaatctcggttattccgtcctggcacgatttcaaatcccgactttttcaaattccgagctctaatagcaccacagcagggcatttttgcttttctggcgttgccctaagtaaggtaaaaaaaaatagagaaactgaatttaatcatattttaactctcataggtgataagggaattcttttcaagaaatcatcttgagaagtgaacaattgataaagaaaatgactaactttttccactttttggcttatcaaatccattcaaacaaacagagtaatccgccatcagcttcagtagacgcttttcataatggctttcgtgttgcttttcttccgcttaaaatttcaaaagttttgaaaaatttctcgtaaattttttaataatttttcataatttttctttagagatttcggcatttttataaaatattaatcctggcccattctttaacactacagtacatttgtctccatgggcgcccttttggccattaaattggtgccaaaaactttttaattccttcagcaattctttcggctcttttttgttcggcacaatttcattcaatgaaatttgccaatgaaatgctaaactttttatcgcttcatcaatttctttctttaaaccatgcattatggaattttgaatggaagcatctgcaaacgaattaaaaactttaatattgttgctagcataatcaattgtaatttttgacattttttaattcgctatgagatttattatttatttacttttttatacaaaatataaatttatttttactaattaaatgcattgctgattatggatattattagaaacatttctcccttttcggctttttatcaaaatttcctttcgattgtgtttctcctcagcctttttaagacttctccagccacaccagacaaatttgtcgggaattttctcagaaccccgacttttttttggtttatgtttaaattcataaaaaaattttggcgattacattagtacaagtgtctgttttatcgcttatagaatgaattttcgaaaaactaaactaaatcgcattttaaatacattccatgcgatgcctctaagcaccactaggttcaaacgaaataattcaaaatattttttcagtgccaatgccgttaactcttttgtaagaataccttatttaaaaaaatttttgcctgtaatgtcccggacattcaattattcattgaacagaaaaaataaaatgaaatcttgattagttaaacgaattttgggcaacaaaaaaacattttaaataattccggaatttcgggacctccgg

SEQ ID NO: 5549 - DNA, 1467 bp, Heterodera glycines
aaatttataaatcaacatttttcagacgatggtttgcgactccgttgtggcgacactccgttacggttctacaatttaaattgaacgtttgagatctgacactcactgtttcccagacgatcacatcggtgtaagcggccgcggcctttgtcactttatttttttttgaataaataaattattgtttgtttatttatatgtatttgttatttgattgacgaatgaattgaattttattgcctatttcaacagcgtgttatttatttacatacctatctaaatttgatctttgattgacttggttttggtgagaaaattttgaagttagttaattttcattgtacagtacaatacagagccgctgaatgagtccacgccccccccctttgtttaatttaccacaataaaaatgcccacatatcagtgcgccatgatttgtttgatttgattttaaaaaaagtacttttcaatcaatcaagttaagagacaaaatttttgagtacttgactgtttcgagagcacacctaaaaaaacaaaaaatcaacaaaaggacgcgccaaaaaataaacaaggcgcgcgtaacattagtgggtagggacggtcccaggattaaataagaattgaatttttaggtgtggcctcataacaggcaaatgcctattattgttttgatcatttcgtggaaacgcattaaaatttaaaatttcttgcaggatggacattggcaactgttgcatttgtctaggtgggtttggcgttgcgcagaaatgggcgtgttgttgtgcctgcacacattccaccactcgtgcattgagcgcgcgctgggccaaaatgcgcagtgtccgctgggccgtcggcgcgcaaattgtgcggccgaaaagcgaaaggagcggctgccgcgaggagggcgatttgccgaaaaaaggttttcgtggcttagttggggcgaatggatgtcaatgaattacaaacactcacaattcacaatagctattttattttatggtaaaaatcatgtgccaaacaaagtctctacacgcccaatgattttggtaatactgactattactggtcccataaaaaaaagaataaaaggcggttttttacgattatacgttttactggggggcctattatcccttcttttttgattgcttttcttccgtaggtggtcgactccgtctccaacatgttattcgggcgaaacgccttcaaagtggagggaccgacaaaaagaccatcttcgagtgccgtgggtgaaatgttcgccggcgcatcggtcggtgctgcaaacacttcggaagattcgctttccatcggagaattgccggtactgtgggcaaaacaactgtcaaaagacgaccaaaaatgactgttcattgtcagtcagttcgtcacctccgactcattgaccttgacaggacatttggttgatccgttatagttattccgcaatataaaaaagag

SEQ ID NO: 5550 - DNA, 7030 bp, Heterodera glycines
ttccaccagtgacagcagctgatcagtgttcgcctttctgatcagtctcccgcatcgtttcacacattttgccttcgacagtgcgcaaagccagttggcattatcttttattagttgactaactttagcttgttgttgttgttgttgttgccgtttataccgctctatttttggggatgaacacaactgttccctcgtcctcctactgctcctctttaaatatgttggtgcggaggcgaagcgccggatcagatgatgcgtgcatatcgattagcaaatagccataggggcgggcggtcgccttgcggtaggcgtcaaggaaaaaatcgagttgacgtggaaaaagctgaactccaatatttcgaatggacagcagcgagttgggcgcgcggattagcaccaaatactgcgccgaaaggcgagccaccttgatcttccgctcaaacagattcggagtgatgaacactaccgcaaattgatggtgatgggattttttggtgaacaaatcggacagatagcgctcctctattgacagcatcagatcgtcgagaatgagcagcatcggtttgggaaggcgcctaatcagctcctccgaaggtacgcccgaatacacctcaactcccgccttttgtagtagcggcaccgccgaattcatctcaccaaaacagtacagaattgagatgggactgggtgcgatcagttcattgcactcagcaataaattttagtaggaattccgttttgtccgacgaggatggcccggaaataattataccgcaaggcaatttgaaacaaatatctttattactgaacgattgagaatttaacattttttaaattagagcttgaaataattaggagaataacaatcaatcgagcaatcaacttttatatatagggcagagcgagttttgcgctttttttgctattgcatattgcttgtcgccgcttgaatgctattgacgaaatcgtccattacttcaccatcgggagcagattcagttgttgctgcagcactgctgttgttgctatttgtgcattcctccttctcctcctcttttgacgatagctgatgctgtaagtgttgttgttgttgatcaaaagttggtgagacatctgttaatgattccggcaaaagcaaattggccagcacattgatcgcggttttggctttcttccagcacgtcccatcctgtattgcgtctgccgctagaccagcttccactaagcaaacgccacttttgccttacgcctcaaattcttctcctcctcgtcgtccggtgtccgttgatgttttgctgttgtcattgctgatggtggtagttggtagtggctgcgcgtacttgtctgaggacggcagttcgctgtacggaacgctgaacacacttgacttattcttcacgcgaaagaaacaatggccgggaagctcgtagacaatgtcatactctaaatccttacttagaattttaatggaatgggatcgaatttctggatttggtttgcatgacgggttacaacggcatgcaattgtggcgactcaattcgccaaactacaccttttcctgacacaattgtccctcgcagccacgtttttgaagggccgcgataattgataaattggacaatgtcaccaatggaaaagttccgatttcgtgctccatggtgtttgttgaattgtttcgccattttgctgttctgctcgtttaacacgggtccctgtttttgtttttgggaatttggtttaattaacgatagaacagttcgaacgggccgccctaagaacaattcggcaggcgtacgaccatttaaacttgcgttcggcgtggtgcggtacgcgagcagtgaattttgtacccaatgtggatcgtcgcgcgcacatttcttcatttgcctcttcagtgtgtcgacgaatcgttcggcacggccattgctttgtgggtgaaacggtggtgcgaatgtttgctgaatgccatgcgaactgcaaaacgtgaaaatttcgtgcgatttgaatggggggccattgtctgtgacaatttcttttgggtaaccataccgcgaaaataaccaaacaaactgttcgatcaaaaggtgtgcggttgttgacttcattttaatgatttccggccatttgctgaatgaatccaccactaccagatatttgttaccatctgcacatggaccagcgaaatccatgtgaagcctttcatagacttgagtggatgctggccatggttgaagcggcactttgggtggcgctttggctgctaaggcacactcttcacaatttctaacccacctatcaatgtcgagatcaattttgggccctcttcggcagtgatcggcagttgatcaagtgttgtttggaacaaatcgacggctgccacttcgagttcactgctttcttccatgtccatttgggcgatgactttgtcctcattttgctgtgactctcggtgttggctgatcaaccgagaaagtacgtcaacctgaccaaaatttttcgtggaaatgtatttgatattaaaatcataattcgacagagtcaacgcccatctttgcaatggaatttttgaacggcgaaaatgatcgccaggccttccttctcgatctgtgagtagttgcgttccgctgaggtcagcgctcgagaagcgtgctccacaactttctcagtgccattgtcgaaagtgtggctgatcgtagcgccaaggcctttgttgctcgcatcagcggcgacgatgatcggcctcgttgggtcgtagtgcgtcaacagcaaatctgagttgataatttgtttggccttttcgaatgccatttgctgttcgtcccaatgccattgaacgtccttcttaaggagctcatccaacggtgctctgatttcacgcatttgactgacaaaacgggagtaatagttaatcgcccccaaaaatgatctgagtgtttgatcatcagtcggagccggcatgtccttgattgtacgtgagcgttcggggtccggtcgaattccatctgaggtgatgatgtggcccaaaaatttcagctcattgcagaggaatttgcatttgttgagcttaacacggagtccccattcatgtaaacgcttgaaagattttgaaagaattttatgatgattttctgctgtgtcggtggccacgatgaagtcgtccaggtagacgaacatgccctgaagaccagctgtcaattcgtccatcaatttctggaaaatagacggggctgatttgattccaaaaggaagcctttgatattggaacagcccacggtgggtgttcaatccgaccaactgcttcgactcttcgtccagcacgatctgcaaataggcgtctttgaagtcgatctgactgaaaaccgatgtgccacggactgcgttgaaaatgtcgtcaggtcgcggaagcgggtgcctgttcagctctaaacattcgttcagacgtgtggaaaagtcaatacagacgcgaatgtcgccagatttctttttgactgcgactattggagccgcccaacgactaaaatcaaccggtttgatcgccccaatggttaacaaacggtccaattcggcattgacagtttcgacggcaccatgcggaacaggacgtgcgcggcagaaaatcggtctcgaatccgatttcagatacagatgagcaagcatttttgtgcagtgcccaagttcgggactgaaaactgaagggaatttgcttttaagttcattagccaaatcagttgaatgtgtaatggccaaaaatgctggttcaggacgaatgatcggcagggttgtggccacggacagttgagtgcgtattcgaatgcgcgaatccatggcagaccgaagagattaagctcgcctttcggtgctacaaaacattcgagacttaatttgatacccatgaactcaaccaaacaatcgaatgaacccatgagtgaaaaattgtggcctgtctataatttgccatatgttttgcctgttttgaattttgggtttcccagggattcccatgtggccaattgaatgattgtttttcgggccgccgtatccgccacaagtgaaactggcttgtcgttgaccttacaattaaccataatccaatcgctgttgcaatcgtcgacggccatcacaatcattgaatcgtttttggtgtttgatgacttcttgattcgagcatcctcaaacagcgctctctcagatctcggtcgccggtgttcagccctgtaataaaaattagcgatttgatttcctccttggtgagcttcatttgtgcccgttcgcagttggcgctgacttgggccgcgaactcgagtgggctttgtgtcggtcctttctgcaactgaaaacattcgaaacgtttgacaaaaattgacttcgtcccgcaaaacagacttttgagtttgcttactgtcacctggtacgcaaaatcggttagtttttgtggaaggacactctcggaataacgcgagtattcctgtgtaccaagcttaccgaccaaaaggcgtgttttcatgtcgtcgggaagtgattgaccgtctgactcgagaaaaggcccaaagcgttcgtaccataattcaaaagtcgaatccgtttccggattgtaaacaaattcagacaattgggaatttattgtggcgaataagtccgaattttgtttattgggattattttggggctgattgttcgcaatgttttgcaatgtgtccgttaattggcggaataagtttgccatatccgcctgatttgccatgatgaatgaaaatgaggcgctgatgaatgaatgtgtgtgaaagtgatgaaaatgcagagtcatcaggccttttttatagcaaaaattgattgaattgatttggcaagtccgcgggcagagaatgatgaacggagtgtggatggaataacggcgtttaaccctcaagggggctttgggttttgccgattgatgaatggaattgagaattgaaacaataaagcctttggactgccctaattttatgaaaatgaaattgaattggccgctgactgcgccaaaatgttgtgttctttggttgtgaaacacaaacaccaatatttattgaacacaataaaataagtcagaagcgataaatataataataaaatagacagagaaagaagaatggcaaaaaccgactgaatttggaaaatactgggagacggaccaaaagggaagggaacggttgctatttatgcgcctcaggcaagagagagagagtgtggaaaaataagagagaaatgactaaagggaagagagcgagagaaaataataatggctgacaacatcccaacaattctagctttttattattttcataattggctgacataaattgtttaattcgtacttgagattaaatttaattaaatttttaatattatattattcgcatttgattagaattgattttaaatttttccattttatgattttgtcttgctacttactataatgagccgtgtaatttgttttatattccatattgaattcatttttttatctttgccaaattattcaattagcaaaatttatatttaatacttttttatgattataaattaactaaatttcatgcatcaattaaagtgtatctaatctgtacacttttgcaattattatgtgtgtaattggtatttgattaaaatgttcaatgcttcatatatcgaacacgtaatgtcctttgaaaaatatattttttttgtattgtgttttagattctcttttaaatgtttgatttattgcattatattttatatttttagtttttgtatttttttcaacaaacattcccatgtagtgctcgaacaatgaatatatacgtgacattaaacaaaaattcacaaatttttttaagaatcaatagattattcagcttaaataatcaagtgttcgaatgaattaatgattgatcttttggaatcagtggtgtttaattttaattattgacggaattcagatatatttattttaatttgttgctattttttccctaataacgatttttcagtttcacaaaattgtgaagcaaaaacaattttttccttttttgttccaatatcttactgtgctcgttacattttcctcatttaattaaattgatgtgggatactttataatgttgtcattatttaatttacagacttctttatttgattacttaattacttttttgattttaattgtatatctaaataggtttcattattattaaataacatatatttattattgattttatttattaaataaaaagttttttttatttaaaatttttttttattactctttaaaatacttttagttgattttatatttttaaaaataaattcaaatttaaaattctcattttcaatcagatttttatttatagtttaaatttatcataactgtattttacatgacgaccacctcttccaaattgtgggtcatttagtgtgacaaaagcgtaggatgagcatatattggacagtgagcgacgatcaaaagctgaaattaaataggaatatcatataaaatatttaaatcacaaacttttcaaattattccaattaaccacaacttaatttctctttcatttctcttccattttctctctctttttctatgatcatttatcttcttcatttcttctctttttctccaatttctctcatgacttcgacggttttccgacatgtttattgctttaatgtttcttaaaatttatatttatttaaattggtatggtataactacgcagatttgcttcttatttactcgtttatcttatagatatagtcggtttttgtgtttgttttttatttctataattaaaatatttatttattttgtttttaaaataataaaaattttgcattaagttcataataactataatatcttttgtatacaattatagctagagttttttttttgtaatattttcaaaagtttgtcatttgtattttgttttttcacaaaatagggataacgtgtaatttattgtgagacttttctaggttagtcattgagaaattttttgag

SEQ ID NO: 5551 - DNA, 1576 bp, Heterodera glycines
  unsure (1)..(1576): unsure at all n locations
gattatgattattttcgcatattattntaatatttaatatataaaaatcttcaattagtaaaagtcattttntggcagatttcagagatattaagaatctttttataaaaatatatttttcaggatttgttgtcaaatttcaaattcgtgtttctaaattttgatataaaatcaatgaaacgtctcagattccttgcccttcattttcacatattttgaacctccattgtgtaaatatttattttatttgtatcattaaaccgcaaaaataaataaaatttggttttattgtttttctattcaattattttaataattatttcttaatctcattatttactaatgttttttttgtggaaaaattgaaaaagcttctacgtaattttgtttatgaatagtgaattcgctatttttgaattagtaatgttttaaatataaatttttatgaatttttttatgaacttataacaaaatattccatatcatcctttaattttatcccattagtgcatttgagattttgataaagtgaacattgtgacaaaacattatttgggttttttaaatgattaatgctagatttttaattttaatattttaaatgcaaagaaagtttgccttcattatttgactatatgtcactttgctcagttttgttattttgtacatttttttctgacgaaatataatctgctcaactaataaattactaaaattttattgttgattaattattaaaaaatattttttattgttatattttaatctaacaaaataaatttttgttgtgaaaataacattaactaaataaatctcaaggttgaataaatgaatttataattaaattatttttaactactatttcctagttctagaaattgaaaaaggctatatgtcaaaaaatgaagagctttaaaactaattcataatgcattaatttcttgttttttcgttattaattttttcattttcagcatttataaattatatttatttaagtaatgatatacatactttggagctgtttatttgtttatttattttgataattacaaaaaaattttcggtctagtttgtccaattgcgttgctggtagacttgtaattgggcaaggataaattgaatttttgattagataaaattgattttgattttaatattattctaattaaataaattattaaattttattgactcccttttcagatagtctatagaattactttaatttattaaattttatttatattaaatttattttattgatttttaaatacttcaatttattttcacaatttattagtgaaagcaaagcggaaaataaatattaataaaaaatctcaaatttaaaattcgtcgccgcgttcgatcaaattcgctacactccgacgcagacgcttaaaagtggttcgctgccattgaaatccngttgttttcccgatcttcaccattctaacacgattgtggatttgttttattcaatgtatcaattggcaaatgtttatgttattaaaaacttctttttcctcaaaatgaaatctatcctttaatttttcaaccaaaccccccccccccc

SEQ ID NO: 5552 - DNA, 6220 bp, Heterodera glycines
ataagaatgttgtttactttttagtttttcatcgtaaaacaattttatgtccaatttaattttcacgcactattcgattatagacaaacataaagtacaaggcgaaaatgaaaaatgaaaagcacttgctgcgtttcataactgttcttggccacagaactaatgagcggcaaattcgctttaaaaatcggtaattacattttaggtgtaaacaaaaaattgtggcccccattcttttatggccaaacgtatcgctttttaacagatattcatttagtaaaaaattagaatattatttaattattgttgctaattttaaagattgataaaaatgagttcttttggcaatgattcccaaaatacgacctctttttctcccaattggtcaacggcagacactaattctactgtaattacagtagcctattttttggtcagcggtatgtcgcttattcacgtcgccacactaacaatttcatcctttaatctgattgtgttgggctcgaccaagctgcttcacccgaatttgaaatttgttttgatgtgccaaagtggggccgtttttttgtttgaaatctttcgcctaattacgatcttccaaaaatttttgtcaaacgacattttcaatccatgcttcgtgttttttcaggtgaaaaagatttcaaatgttttttaattcaattaaggacggatatttaattaccaaattgacagggaatggtctccgatcggagattaggaattttttaacactcaaatataatgtgccatttggtccttttttggtcaaaatttaattaattgataaaattttcaaaaaaaaatttcagacggcgcctatctgcatagacggacccctttgttcctagtttttgaaaaaattgcgccgaaaaaagcatttttaaaaagcaaaaaatagtcaaatttattgaccattaacagatttgatttccgatctctttttaccgtctgacccattcgaaaaatcttagtcgcccttttaatgcatcccgccagcccctaaaatttcttctcgtatttttttttggaaatttcattgaaattttttcaaaatttctaagaatccgcaatcctgcgcgtgatcctgcaaatttaaaatgcaggattaatccggccggatccggtcctgcaaaaatttttgaattccaatcctgcaaaaggatccgcaaatttgaaatttccgagctctagtcacaccgtttcaaaaaatgagatgtgtaccaataaatagagaatgcagagaaaaaaacatctctcattttggtgtactatttatttatctctgttaatagagaaaacccgaatttacttcggcacatataactttttttctactcatacaatttacaccaaattttgcatatcgattgagaaaaaaattcttcatttttctatgctgaatttattattattgtctatgctcaagttcaaaagttacaagtttagaacacccatatattttttctaactcaccaaactgttcaacatttgcttagaaaaagcttctcctcatcaagagcttttgaatgataccaagatctttcaatttagttggcaaaaagcttccaaaataatttccgaaaatctatttttaaattttttggacaaaaataaataaaaatattcatgttgcacaacggactcgaacctccgccctcctcctcccttgtccttttactatcttacaaaaaccacttcgccacacatgcaaatctttttgaaactgggaggcaaaaattgaaacggtgtgtagtgttttaaagttcaagcaatgcatccacatgactttgtatcaataaaaaatttttgttttttgtttaaaatacctagaaatagtgtaaacatgttaaggctcttatgcagtttatcctgatcacgaatatgacattcattttgaccaatttcgaatcccggacccggatttcaacaaaaactcgaaaaatcaaaatttacaaaattcatttttatgttcattctgtacagaatgaccttttttgatcttgcaaatctttgtgactaaacctagcttgtttgaatcaatttagaaacaaaagtgagaatttttaggtttcaaatttttgttcaagcccgggtccgcgattcgaaattgctcaaaattaatgtcatattcgtgataagcaaccctaaaacccccgtaagcatgttttcacgagttttagaacaaaaaaaaatttcaaaaagggcgggggagggggggggggaccatcggcagtgttactgaattttcgtttgttgtactgtttcacaactcttcggttttgcttgaccgtttcagtgatagttagcgtgtatcacactcaaattttagctaatttcactttaacgccaaaacaatgaccatcctcagcttcttttgcaagagaaattttttaaaaattcccgagataaatggacactcctaagtcgttggattgcctaaagtgcgacagagtcaaaattgtcaacacaatgaaatgtgtccaacggtcaaatggaaattttttgagctttagattttttaaaactaaatggagggatttttagcgggacattctcaaaaaaaaaattttaccaatgcaacctagccagaaattaccttcaaaaaaaaatttttgttttttttcactttttctgcaaattgctttggaaacaatctgagtgatcgttgccgtttttggtcactgtcgatcagccttttgataattttcatttaacttggaaagttcaatgagtgttcctttaaattcctatgttatacggagtacaagcagtgaattctgatcagtgttccattgaaaataggtagctaaatgtcacggtcaagttcgccatcgctgtcggattcttctggctcgttgaagccgaatacggctattcactctggctggaataattgctacccatgccagcatttctcatcattcaaagctttcaaaattaagcgcatgtcacacaaaatgatggagttcgaggtagctccaattttacggcatcatgccgtacgcatttcgttcaaatgtgcagaatgtggtgacacaacctttaaaacattcgacttcaattcacgtggaagatggggcatgtatttttttaagcattaatcaattagttggaaaggattggaatgactttttgaaaaattttgttgtcaaaaaagaaggggtgaaaattaatattaattgggcttcgtttttaggcaaaaaactcgcaaaatggcattaaataggcacaaaaatagacaaataaatttttttttattaacgctttttaggtagtaaaagacgtaaaaattgaacaaaaagattaattttgttttattacaataaaaacgaagccctaattttaccgaatttttatttcgtttgggaaattgatgagggacaaaaaggcctacaaaaacattaaattttccaggtttggccgttatggagaacacaagagcatccttgacaaaaaaacattcatctgtcacacgaaatgataaatgatgtgttcaaaacaatgccggacagaggctatgccttgttaagccttaattgccagatatgggccaaaagtttttatagtaaaggtttattttgtttgtttttttgggggtttaagggattagccaatggtatcgcccagagggccctatttataaatgcatatggattaattaatgtgcctacgttatttcgactttgaacacacgaggattcgaactgcatttttgattcaggaatatgacacgaccattttcagaattccccctccccccgtgcaaccatttttgaaaaagtttaagatttttgaataaaactgttgcaattaggggaaggaaaaatgccgaaacactgccaacactccagcaaatttggcccaaggaccgagaacaaaattgaaatattatttatattagttcaaaaaattaagagaaaaacaaggtcaaaccatggtcgaaataaatagattattttaataaatgtgggccttactccctctgaatttcctcctcaaccaatttgggttatgttcagttgttaaattgaatatgatcgacactgctctttgcccttgtccgcttacaaatatgaaggtgcagaacgtggagcatattgaagtcataaaagaccatgaagaggagaagttgaatgaatgcccgcggaattgcgtcgttctttcaatccgttgcaagtgcaatgcagagatgcgcaggacttatgaattaacaaaatatggcacacgcaaaaagtaagcaacagctaatagagcccgtacccagaaaataaattgtagggaacttcagaaatttaatcatgggatgccaaacggcgggacggtaacggatgggcgctttccaagggaattccaaaaaaaaggggcggacgattttgtatcgacccgtttttgtctacatatttatttattttttaaaactcaggagacatttttgttgcctccttaccaaaaattgacagccccccccctcaaagttcacattatagtcgggaaaaaatggccagtgacaagcaaaaggatcatcacaaagggtggacccctagggcaaaatgtaatttttttttgagtacaaatgaaaaaagcttttgtggttaacgctctaaagtcagagggagggggagggagcacaatctgacgagctttttttctctgcccagaaatttttatttgccagtgatattgggtaaattaggagtcgtttaagaagaaaaaaacttttttttgctgttaaataatttttgttttttttgaccaaatttagcccaagagctgtaatttttgaagaaaataaaaataaatttgcctggtacggaggtacctaaagaaattttagtttcgaggtgggagactacggatccatttcttgtttctcccctcctcatcaaaattattagattttgtgacaattttctgggtacgggcctaattaataaactcaatctcctccaacatcatgacaaattttagcatcgggcggcctgaacgagaacggagtgtacacagtctcaagacgggaatcggaatggaattggttaaggtggagataatttttgcaacaatgccagccaaattcgatgaaatacatttcaaccagcgacattgggctcgtcgttttttttacgcgagtaagcagttttggaaatgttttgcattaaggggaattatcccatgggcgtcgtggtcacacagaaagtaggatttgcatttacagcccacccaaacccgaaaacatataaatgccaatttttatttcgaataaaaaaaatttcaaaaattaaaaatgaatttcaaatgcgatcgctagggataaattataggcaagaaaagtggcataaatatgtaaatggaagtccaaatcagacgaatttttattatttcccacttagtcatttccggaggacaagaaacaacagcatgaaaggggacaaaacacaagacaaatgctgccgaattttgccatcaacgccgatcatttttgttatttttttccgaccgttggcctattacgtgaaactttgctgccgaattttgccatttaattactacaaatcaatccgatcatttttgtcatttttccgattgttggcataatattattttttgctcaccaaatttatatgtttgtttttaaattaaaatatcaaaacatttgaaaaaattcgttccttttatgtgtgtttctctttttactctttctctctcgtatgtttgttgatccaatatttcacctttactcattcgttttgtgaaaaatgccgttatgcatatccaattccatgtcatgtgcccaaatatacttgaaaaaatacgaaaattaaattccctaagacaagcaaattgtttttttacgagtgaattcgacaattattgattcgacagttcctataatttttaaaaaacttacaaattaaacggctatttttggggatggagcaaaaattgacattttaatttatttacatatttggaaggaaattttgttcgtcgcgcgtttgttgacctttttaatttaaaaatgatggcacagaacaggatgatactatagatggtgcccccccccccttttttgaagaaaattttttttattctgtaaagtcttggaaacatatatgtgcgggagggtcgctgatcaagaatctgacattcatttggaccaattccgaatcccggacccgaattcggacaaaaatagaaaatt

SEQ ID NO: 5553 - DNA, 5534 bp, Heterodera glycines
ttcgtgcctttttgagttttttgagactttttgaccttctttcaggacttaaattctcagccctagtaatgagtaatgtttttcctttttgaagcacaaacaatgcgagcagctcttcattgtccaacccacttaatggcaacagagttggaagccaaccattcggccaacaaaattcggaaattctgtcaacttctggcataaaccaatttgaaagctctggcccatttgtgttggaaagctcaaacccgaatggatatcgtagctcgtatgaacaaaactatgtgtccaacaaaaacagacgctcttgatcataccagtgttcatcatttctcatgattgttgcttttattcatttgctgactcttcaaataattaaatttcccgaaaaattctcattctttatcgatttagctccacaattacggaaatcagatttccgaaaattttgataaaaagtcggaaattttcggaaatttttttaaagtttttttcaaattattagcaattttttactgttaataaattgcactgaaattttcaaaattttcctggcgttgcctatcggcaccacgaagaaccctaaaaattcttaattttcttaaaaaatttgctcaaaaacgacaaatttggtcatattttggacaaaactgttaacaaatctcattaaaaatacaagattttctccggcaccgcctttcgataccgccggacgccccttctccttccccccccccaatttttgaaaaaaacgaaccgcaaaaaaagctgtaatagtacctttcccaaaaatgttctaaaacaatgtaaaacgacacaaaaaaagattttgatgaacatcattgaataattttttaaaacaaatatagaaatataccaaaaacttttttgaaatcaccttttacttggtttagaagcttcttctttcatccatagttcaacacatctaataccatttattcgtgctgggtcattttaaatccaccaagtgctaggaaaacaaaaaatataaattcacaaaataacttggctctgtctctatcaaattaatatttctttgtatcattcaatagctctagatgttctctacctgaaaatctgagtcagaattttttgtctataacattttgaaactcaattaattcttttcaattttaatgtttaatggttttataaagaggacttcgaattctaaaaagaaaatttaatttgttcttctgaaaaaagttgtaaagcattgaacatgctatatatttttccattttcatatataaatattatagccgctaaaaattttatgagcctaaccttaatgatattcagttataagtattttatatttgacttttgaatttcaaataaattatcgtttcaaaaaagttatggacaatgacttaagacaaattgaaattttataaccgaaccttttttatattattttaccattttgaaactaccttttactggctaagaattttaaaatttagcctattaaaatatttaaaaattttattatattttaaattttttcaaaatttccgagttccgaagtcgttttccgaaaaatttttgaccctcggaacattacgaaatttcagcgcttctcctcccattatcgtccccctttagcaccaattggaccgatcagcaacattagaacaattagagcgggcggcaaaaagtgtgcacaattctctttacggcaaatattatcctaatctcgaatcgacccttaacatgtaaattttcattttttattaaaaatattattttattctttttatttttttggtgttttaacgatttgccatttgttaatcaattattatttttgcgtttagcacacctaggcttaggccttttctatgcttattactaaagaaagacattgccgcaataaatgagaacaatgcctttcatcttccaaactggcaaaaaaaaatcaatcccaacctaacatttctttttccattattttaatgggcaaacgtcataatagctttacctttacgtgaagaaagatttggccatcataaatagtcgcgccattaagggcattcgacaaaaaagaaaattccacccatttcacttcattttgccgctcctatcattatgaaacaaatttccaccagtgcgctgctcttggcattgaatactttggcattgtgtgccaatttctgtgaagcaagcaattcgtcgttcaacacatttaatagcaacttttctggtagaactcagccattcaatccaccaaattcagtgaccaactcaaacaaatttgggacgcaagcattgcatggatttacttctatttttaaatcgaacaaatgtgaatttcaatagaattttgattaattaacactcctgcaggtcattaggaaatttcttattctaattaatcgcaaatatttttccattttttccaaaaatggaaagggctttctgtgcgataatttttttcattaaaaaatattacaaacacgtaaattttttgtcttttccggttatattaaatcattttttaattcaaaaatattttaataattaagtataaatatataacggagcactgggacggaaaaacattgagcatttaataaaatggatataactaaactcaaaaatatttgcgaattttcaacgcaattcatccgattttcttacttttttaataattttaacatatcaattctttctttttgttcaatttaatttaaaatatttagttacaatcgaagattggaaaactttttgttcgggtttcacaacaaaagacaaatgtgaaggtgaaaaagcaaagaaaaaaatttcaaaaggagagaacgctggtaaatacacttgtcactggatcaccaatacggaagaatgctgtcattatataatattataaaccgtaactgttgcatgatttgcacggatttttgcattttttttcttcggttttcgattttcgtttctgatgctttttggctttctgtttcacttttttacaaaaaaaaaactttcacttgctttgtatttttatatgtattgtataaacaattctttacaatttcaacttagtgtcaacttctggccccctcctttttaaggtagcaaatataaaaagtgactcataaaaattaaaagttaaatttaattaccaaatttaaaaaaatacaaactaattagtaattactattacacatgtacaaagtcctgatttatatataattaaatgactccaatttttcaaaataagctggcaataatcatggtatctgggaataataagcaccgtaataattagagctacgatttttaggtgctaaaaaacccccaaataggtgctaaaaatgggaaagtaggtgccaaaaagtttcaattttaggggggggggggggtgtaaaatcataaaatcaggaatatatgcggctggaggttgtgcgcgagcgaggcggacggatgacgaaagactatccgacgagcctgttcgaagaagaccgccaatatttcgggatcctcgacaatgaagttatgcagcagaaggatatcacggaacaggcacttcttttccgttcggtttttcctcgccgtgtccacccgttattaacgattcatttcggcacctgaaattcaccatgaataagggttgattgatcttcacgatttctccaatttcagatgatcaaagccctccatcatcacattctcgtcgaaaaggaggcggcagcagctgggatttaccgcgagattgatgtgctggtcaggaaccaccgtgtcgtcccagcaaatgaaattgcgaatgccatgtctgaattctgcatttggttcaacaccacgcaagaaaataacgacacggacgcagctacatttgcagccaattcacataaccgcttcgaaagaccacattaatttatttaataaaaaaaatttgcgttaatcaattcttttgaaatatcaatttttgctttgggtgtagcccacttggcaaagtaggctacaacccgaattcgaacaaaatgtctaaaaatggtggtgaacgcataaacaacagacaattgatgtgaatttgtgtgaaaccgttagcgcgcaaataaattatcaattcactattcattcaaccattatcatatatatgtatttaaattaacgaataaacaagtaaaatttaaatatcctgtgatacctgaaagtgccggtgccattggaaaaatattgagtgtattatatcggtttcttaagtggttgtttatgtgcatttaatttttgatcattttgagtcaattctgtatctgaaaatttcaccaaaatttcaaaaattcccccggcagcgccacaacatttatttcaaaaaattaataaacactagataccggagattttaaatttgcggcatttgaactcaaaattttctgtgggacggaaccgcctaatctcccacttaaaaatgcgggattccgcgcggaagtaagtgtgatttttaaataaaattttatataaaaaattttattaataaaaagaaaataaaaggttctatgtcgatcgacgaaaagtgcaaattgggcgaccgacgaaaaagtgcaaaaattaaactcttgatttatgcagttgatttttaacctaattattagatattaaagtcaagaaatcgttagaaaacttaaaatcacaattttaattcaaaagttaatatagtaaatttttttgctaattttcaaatgaaataaaaacaaaaaatattttatggaattcctttttaatgaaactttattgataacatttttttattattgacaagcggcaaattgtttcgacattttttgtagcatcctatgggtttactaatgatatcttcgctacactggtggaaaaaagtctttactcaagccgatcaaatttgaaaaaattaaaatttcgactagaaaatttaattgattattttttgtttatgtgtttttatttacccctatttatgtgctttttatgcaccacataattattttgatccactcattcattctgagcatgagtcgtttgatcactctttactcaaaaaaagggcggaaaaaagtctttactcagaacatttatcatcgaatttcttaatatttagtcggtccgccctttgcccagattggataaaagcattcaaaattggaataaatcatcaatttgtgtgccatcttccgaacaagcaacagtcgtttttatttccatccactttttcgaatttttcatttgcttccattggcaaaatgtcactgtattggactcggctcattcgtaatggaaagggtggcacctaacaataaaaaataaatattgaaatgaaaattactaatttttaaacatataataccattgggaacaatcttttagctttttcaaaaaactagtaagttttgtacaatttctgttaataaattgaactgaaatttttaaaaatttcccggcggcgcctattggcaccgcgtaatctcctccaagttcccaaaaaagttttgaaaaaatcgcgctgctaaaaaagtgcaaatagtcactccttttcccaa

SEQ ID NO: 5554 - DNA, 2551 bp, Heterodera glycines
tagacatttatcaaaatagttatacatgaaaattttgcaaagtcgtaatttttgaagtgttttcttattataatttttttcaggcttgaaaagcttttcgtttttaataaggctaatagagcatgttaagagctctcgaatgataccaagattgttggatttggatgccaaagaaaaaagcttaagtggaaaaccgagctggcgccgaaacgccagcgccgaaacgcgtgggtcccttactcagaacatgaaaaaccaccttaaaattcatttaaaaacctgaaataattcatgctagtttatcttttgatactgatcaaaaaagtctcttacatcaacttgatctgagcacttcttcatgatgatcttgaccctccaatgtatactaaaactgggaattttttgataaaaatgttgtttttaattaaatattattatttaacaaaatttttatcttttgcttcgtttacaaaatagcagaaattaattttactatataatatttaggttattttaatttttgaactaaataatcaaataattagattaaaaatcaagtgctaaatcaagtgcttgtatcactcaaatcaaaatcatcaatattagcatttttcggcaaaaattaagaaattggctaaattctttaaaattttgtccgcgcggtatcccctgggctcaaacccatattcactccaaaaatccacacaacaattagaaaaataatttatcaaaatacattaattttcattgtttttatttggcagagaagtgctgtatccaaaaaataaaaatttatttcctttatcattttaattggcgtatttagcgttaattgttctcactcgcactcccaattatcggttaattgcccctcttccgactaattagacagacactctttcagtttgacgacgacagcttcttggtattaatggaccactaaacactgctgggtggcacagttgttttatagcattgtcagtttgccgaagcactctttctttcttgtgataacagctaaaagtgccggtgccatttggacgataaaaatggattccgaaatttttgtaattaaaatatttctttttgaagttttttgtctccaaattcttcaataggataatacgcgaattcctcaaaatctccaagcatagcttcttgtgaatggtttcagcttggttaatctgttgtcatatgcatataattttcaaaaattttttaaaattaatttaaagaaaaatatttaaaaaagatggaattgctgcttttccgttatgccgaatttgaacggctgtacaattgcacttggttggacattgactacgtcccgttggaacgccggacgcaatttaagccggaatcgatcacaatttgcgtattatgtgccatttattatgtaaataaaattttaaatagttccggcatttccaattaatgcactcaaacaataaaaaaggttctgtacgtgccctgcatgtactccatttggaagcatttgcacgacaattcctgctacaaattgctcttttacatcggtgtcaccgatctcggcattttgtggattctcggctttttcagcggatggcttaacctgcgcggcgatgtgttctgctcgcaccccattctgatttatgtgatgggaattgtggccacatgtaaaataatattgcaaaacaattccttctttcttttattcgctattttattttatagccatttggatggccgaaagcactgctgatctggtaataaattaattaattagccaaatgattaatcaatcaactaatttcctgtgattgaattttttggcaaaaatggcgaaaaattttgtaaaatacaccgcataattcgggatttcaaaaaaccaaaaatacacccctaaaaagcgaaagaaaaaagaaaaatacactcctaaaaattgaattttggacttcagccccccccaaaagccaagggtctggctacgcccttgttctttggccatttttgacagattcttttcaaacccaaggtgttggcattcaatcgctgtctcgagctcacctcgccacatttctcgcgcgttttctttgaagggtaccgtacctccctttggatcgtcggctgctccctctacgccctctattgggccatgttcatcaaaccggtgctgtacagtagcatttatttcggctggttcttctacccttttgtcggctacagtaacgatgaccatcatcaggtgggggatttagcattcgctgatcaaaaaaatgcgttttcaattttaaaatgtaccgtaaaaatattttctttgctacagtatgaacattggctgcatgtcgttcataatatcgccgtcgcatttctgagtccggccatttaccttttctttgccagcaaattgtttttcaacgtccaaagcaatcggcgacagtttgccgttgtcgcctccgaattaaactcaatgcaaaaaagggtttggtaatttggaaatttaaagcaagcatatgtaaacaatttgcttaataaattggctaggacacagttttttttcggttttcttgca

SEQ ID NO: 5555 - DNA, 7525 bp, Heterodera glycines
  unsure (1)..(7525): unsure at all n locations
ttaaattagcaaaaatgttcacttactcccagtactctnccaccaaactcttggcaatgtgccgaggaatgccctcctcgtgtttctgtccgcgtccatttcgtacactgtgtcggggaagctggcgatgccgaatttggactcatcgctgagccagtagaacacccaaagtttgtctaaattcggggagaaaaaaaattaaaaatgaatgaaagtgttcgtatgaaattcaaaagggtcgaaaattccaaaatttcggaccgcccggcgacaaatatttttgttttatgtgccaataactcaccatcgcccgcccgtttttgcgtgaaaaacagcacggggtaagcagcagatgaggaagctgccattagtaaattagaaaaaaagtgatttttctaaataaaataaatttaagagtcaattttaattaggaaatgcctatgtttttggtaacaaatgaaaattgcggactgaaatcccgcaaaatctcggcgcgtggctccatactttgagcaaatttgaataaaaatcttttttgaaatggtactgtttttgatttggcgatatatcagttttcgtctgccatctaactacaacactatttcccttttcctctgtgtctgttttacattgtttgtttcgtgggcagagagtacaacaaataaattattttacgcattttcgcccccggcgaatactaaaattttcaaacaccgaaaaagcactgctgttctgccgattagtcattttcttccacttttgttcattgacataatacaaaaaaactgttcaatcactttattcgctccgctagttcacttattaaatattttctcaacaattcgcgtaaaattgccaaattttgatacaaaaaaagttgtaaaactggcacaaaaagaaattcggttgacccaacgctgccaaaaatcaagattcttaatgagtcattaataatgacagatgtttaactttatcgtttttgactgtgaaaaattatacggtcaaaaattggatgattcaaggaattgacaatgttacgacatacctattcctgtttggggaaacaaacccttgtgttatttatttatttcacgtacatgtgtcttttttgagctatcctttgcttctttttttgctctgtcatcattttttcgtacaaatttaaatggttttcttgccaaaaaaatcatttttcaggaaatgttcatttattactgttgccgaacaactgaaaaatgtacatagcaacttcgcagtcttacaatggaatatcgggcgagcccagtgagttatattttccacttccaaaatccacgacattaaattgtgatggccatggatttgacatttcatgaacctgtaaaaatttttcaattggtatgacggtcctgccactacggatgccaatccatggccacagagacccaaaaatgccacaaagttacgaatttttaaaacagaatttcctcaaaaaatgtgtcgggatgaatggcatcaaatgttggcacattccttatctttttcaccccattttcccaggttcgtcctctccgccggtcaattggcgttccggcgcattgcgcggtggtcgaaaagtgaccaaggagccggtctacgccttcattttgcccaacttggagcagtacccggccgacttccgccactttttggagcgggacatcatcgaaatcagcacactgagggtcaaacttctgcatttatttgccatttgagtgtccgcccatgcttcagacaatttttttcagaaaactgcccaacttaattgcactttctggggctgtctgttttcactggttcagttcacccccaggaattttaatcaccaatttttaatttaaaatcccacaaaactggccctatttttggcgtaaatatgaaatttgattgccacaattgtcactcttttttccttacagtcaaagccatggcggggtcacccgtcaattttccccataattaattgcccccctttttttgctttttcagtgattccgatgaccgacaaaaaccgcaatttgccgcccgtccatttctcagtcaattctggcgccgatttcacttggttcaacgcttctaatacggatgattgtcgatgatggaaatgatgtcattttgtccgcaattttctttttattcatttgtttccatttattacgtatttatcaataatggttttctactcgcttctccacccccataagcataagtgtgcctcggcattttacgtaattccgacatgcttcttcttttttacatattggtcaaaccgttaatttcaatttcttgttttgtgatgtgtttttgtctgaatttgtccgtaatatttgcgaattcaatgcgtgtgttagacacggtgtgtcatcgctctctgtcatttttagtgcgcctttaaggcaacaacaaataatcgatagtcttctgtttctcttctgtgctttgtgttggttctattaggtcattttctgtctgctctgctctgacccctcctcctttgttcagaatctgtccgccctcactcattcattcacttcatttgttagtcattcattcatttatccgtccaatttttctcatttcttttctgcaaatttctttcgaactgttgaagcaaaaaccacatcaagcaatgatttgagaattcgttctaaatccgaaaatatattgttttttcgaatcactcactttcaatgatcccttcatattaaatatctaacgaatactttttgcgactgttttacgattgtgtcatgccaactcgtacaattgcttaggccgaatctttggctacgtctaggcttggtcttgcttcggcctaggcttaagcttaggctttgttttgtaaaaatacgagttgacttttgacccgaatagtaataacattcattgttctaaatcaacatttttttgttaactttgttctgctggtcgatctgattttttcactttagccatcactatttttaatacactttaaacatcaccaatttgttccaaatggccgtcccattgcccttctctgtgaatgtgtccaccatcggagtatgtttaaaaattgatatattcacaaatttacaaaatatttttaactgattattttgtcgttttcaaagtttgatttgtatcaccttatattttcccctttttcgggccaatttttatgtgaatttgacctaaaatcgctttttagaaaatccaactgattgatcccttttccgacgttttgtcggaaaccctttccccttgttaaccctttggccctttactaatgaaacctaaaattatccgcaaacttcccgcagaattaaacaacgaattgcttcaatttgcccccgagtttttgtgtcgaagcgttttggctaactctaattttttgttttatgatttgattcggaggagtgaaagaggcaaaaaatggaaaaccaaagtatggaaaactgaaacaccatcactcaatggacatgattttgggtccacttgggcaaatttaattgtggtttcaaatagcgataaacatatccaagaaattttcgctttcctacgcatttagcacaattttcttttaagtctgtggaagaaagtgaagcacggaccacgtacacgtacggcaatgtcacagtccggcctttcatcctacgaaaccgacgccaccacaacttcaatttcattgttgaagacctggtcgaccccaatttatttctccgctcggaccaaaacaacggacgcattggcctagtgtcaattcgtgtcggtaacgctgcacaggtgaacgaccataaaaataagtgcaaattaagtcatttttcacccatttgatatgtcttttttaatgtcgttggattttgtgttcggatattttggttcccaccttacgattagcttgtttttgttttgagttttaattacaaaatctaattatgaatttttacctaatccaagacctggtttcattcggaatccttttttattgctcatatgaaaaaaacgcccaagtgcgaaatggattttgtttatagaataaatttcaacacagagacaagaactccgacagttcttcctcaactcttctcaaaatataatggaaacgtttgaatgcatcattatgttcttctccctcgtccacgtaatgtttactctaacggtcgtaaattatttaagtaggagtaataatacgacgattttggacaatttaacagattatgcccaatttgaattgttgagattttagtctattaaaaaatatctaatatatttttatccaaatgctaagaaccaaaaactttcatttggaaatagcgcgggaatattgaaatttaataattaaaggcgtgggatgtagtccaagtacgatttttgtcggacaacttggaaacgtggactgaagtcatggaacgttttgagagggccgtaacggcagtgagtttccattaatcacctcttctgcaagcttgggatttttaacagattgaggatggcaggccgccaacgccggtgaatagtccaagtccagtgcaagaagttgtttcggctaacaattccggcgagaaattgccatcgctcaatggaagcaacgaggaagaggaggcgaattgaacggacaattcattgttgtgtttaaatatcatttgttgatttcacaatttcaaaattttacataattgaataaatttccacaaagtggaaaaatttgattcaaaaagggatagtttagtaattttgcgttttttgctgtggttaggtcgcaatgattttctaccaaaaattgtgtgagcaaattaaaaaaatatattttcttttgcgttttatctattttcgtctacaatctgacaacaacactattccccatttcctctgtgtctgttttacattgtttgttcctaatggcagagagtaccaacaaataaaataaatattttacgcgttttcccaccggcggagacgaaaaatttgcacaccccgaaaaaagcactgctgcttctgccgattagtcatgtttcttcaccctttgttcgtcgtccaatttcagttttggatactgtaaatcagaaaaagaaattttaaaaaaatgaaaattaaattgaaaatccgtccaaaatttcacggtaattaatataaaacaattagcgaatgaatatgtgtttttttcttgatttctattttatccaattcataagcattggacattttacaaataaaaatgtaatttgcacaattattcactctcaaattcaatcatttttcttttttattattttaattaattgtgacacacatacaatgtgtaaaaatgtttggggtatggaaaaaataaatatatcaattaaaatgcaaatccaaaaatggataaaaaaaacaattttttaaattttcaaaaacagcggaagaaaagggaaataaatgctgagaaatgagttggtgggcatcaatcaaaaaacaccacagattcattcattcgttcttcaacggagaaaagaaattcagggcaaaggctccgtgtcaatctgtgaaaagctaaaaaatcagcaaaaataaattggagaaaaaagcccccgaaatctcaaatctctccgagtaaaaggaaaccaaaggtttaaaatgccattgattggccaaagattggaaaagggaattcaattaaaatttaaaaatgagaggaatttattaggtcgcatttcatggacaaatcggaaaccgcgtcatatttttggttcatttcattctccacctcccggaatttttttcaaactttgaaatttttcaaaaaatcaaatttttaaataaatttaatgaaaaaatttttgaaaaatttttagctaatctttggaaagtttttcagaaaaacttagtaaacaatcataaagttttgaaaaagtcactcaaaaaatttcataaatttacttttcttcgagatttccttataaaaaattacatgatttttgggtttgcaaaattttttcttaaataatttccgggggaggcgggaaacgatttgctccccattttttcaagtttttttcactattaatttatttatattttccgacccaaccgggtgcatgtcgcgcaaccgttgctgatcctcctcaattacgtcgtcaaagttcaggcccatggtcggcaacttgcggagtgccttgcgcgagtttgccggcaattttcgctgaaaatatttcacatttgttaggctaattattttgcatttcgcatggttttgttgggcctaaatccctctcccgatgaacaccatattcccgtttttctgaaaaaatccaaatttgaaaataaaaaccaaataacaaccaaaaaaaacattttttttaatttctaaaagttttcgattaatttttatgtttaaaaaaatttccggtaaatggatgggctgtccattacattgcttggttgccaatcaaaacttattttacaaaattcatacaattttgtgacccggccggaggctattagccccatttaattaggcctccccctctgggaaaaactgacccccccccccaaaaaaaaaattttttttttttgtttaaacaaacaaaccttgatcggactctttttgttttgtggtagtccatttgttgaccaattgttggacacggacacctgctgctgtttgccctgctgaaaagataaaaaaaatggacagacgacaaaaagtagtgattttcaaaaagtttatcttggccggaataaatcaaattcagaacaaacttgtagccagaaactttcggattagcggaacccgaaggccttttcctgtttactgttcggagcaaaattacaaaaaaaaaaaaaaaaaatttctcaatggttttataaattttcagcccccagggagagtaaaagaaggaatttgtagcggtttttcccaaaaaataggtctaatttttgccattttttaccgttgcatgtgtttgaaatttcctagtggaaaattcaagattttttaagaaagattcaatttttagttttaaaacagaccaaaaaatttttttaaaaattcctttgaatttttgctcgcagaaaattacgcatatttttttagaaaaattttgttgattacacgaattcagacattttccatcaaatttgaattcaatttttacctccatgcgcttcttctccagcgcttcgtcgatgaaaaatttgacgagtcggtcaatgcgttggcgccgtgccgtcgcgtcgtccacgcgcggaaactccaggaagtgtttgaaggcgtagcaaacggtggcggactcgtcgttgacctgcttgatcttggtccggccctcctcgaacattgtcctaatccggggaagggattgcataatgtagggaaaatttggtaaaaacaaattatatttttaaattcgctaaatgtccaaaacctgagattttgacaaaacgtaactttttttctaatttgttggtaacggaaggcggtaaaatacataaattttcaaaaatctgaacctaanttcaatctatactactttttaggcatatatttttt

SEQ ID NO: 5556 - DNA, 2532 bp, Heterodera glycines
attaccggccaaataatgatcactgatcaggctaatttgcatgtgtccatctcttccccatgcttaacctgttacgtatcgaacgtgaagatgctctcccgtcgaaaaaatgctactcggtgcttcgtttttgcagtaacggccaaccaacggcgaagcttcggagggaccgtctcgaacctccaaaaagtcccccgcacaactgaaatggtcaaaaaatggcatctttcaatccgttcctttttcttgttgctcctttcctctctctctctctctctatcccttcattttcccctttttccttccattatttcttttctcccttttgcgcactttccatcgtcgtctcgggtgcccataagcaaaaaggtctttgggtccacggtaaatttgagccgtctgcctggcggtgcactcaaaatccattggcaatcgagtgaattgggcgacaaatggggaaattcgggcgaagaaagtaatcttaggggcgtaagctgatccaatcggatgagggaagaggcacaatcgtggacactttcgacgagtgccaatttgaatcccttcaggggaaaaagcattggaaaggctttgctcttcgactgacccttcccctggaaaaagtgctgcggaagcgaatgaaaacgtaaccaccgctgatggtcagattgaactgctcttggccacaaaacgaattcgatgtttttgccgttgctgactcgcggaagaaagggaagtgggaaaagtcaagcgaatcggtggaacattcgttggactgccaatcgcgcggagccaacggaaaatgggaaaagtgaaagtgagacaaacggaagaacggacaaaggaaacggaagaacggacaaaggaaacggaagaacggacaaaaggaaacggaagaacggacaaaggaaacggaagaacggacaaaggaaacggaagaacggacaaaaggaaacggaagaacggacaaaggaaacggaagaacggacaaaaggaaacggaagaacggacaaaggaaacggaagaacggacaaaaggaaacggaagaacggacaacaaactcacgtccatgtccaacgatcggatgttcaagtcgcgtcgagaaaggagcaaaatgttccaatggcaagaatggtttttgttggtcatcggagggtttgggtagccgggcgaactgagcacagagtccatgggaccgttttggacgggccaaatttcggtggagccacagaccaacgaatagttgagggagaagccgcggtagaagcgggaccttaaaaagggcaatttcgggactaatttcggcgggaaggggcggaggggtcgctttttgctgttcttttgatttgcctgtccgaatagaaatagacgaatgcgttctccgccgagttcacttccacttggctgtgcacttcgctttttcttgcatattcgggagatgtcagaaagttctctgtggtgaaattggcatttttctctgttattatttctctctcatctttcgattcatccgattattaattagtttatattgtatctctaattttcgctaattacccccccccctttcgacctcaattcgtcctccgtctccaaattcttaatgctcaacgacaaaaagtcgtactgacagttcgggtgctgttccaactcaatagccgtcacattcatcacaattgtctcgaacattggtcttctcagcgtccatttgcagcgttcgttgttacggtacctattgtaatggtattttcggtagggcattccacgggttggaagggtcgtgggttcgagtcccaccggcggcgaattgtcctccccctcccctcgtgccaaatcgctttctcaccacatgcccatgttggtcgtcggattgcgaagtgtgtttgccgtccatcttggcactaactctcccccacatttaaatccgctcgtcgcccctttcccctccggcgcttcgctcccttttgcctccgtttcttctctccgtgtcccattttctccttccacccatccgatctcctcccaagtcaatcggaacttcccggataaattcgggagaaacaccaaagtggcacgattagagcgcaaagtgtacattttgccacgttggggaggcgaagcggcgtcaaaacgaaatgccaacgcgtcggagtcgcgacagatttcgtcactctttgggaaggggaagagaaaggaaaggatggacgaaagaaagacgaaaaaaccggtgaattgcgacgaacggaacaccaaatgggataaacggaaagcgaagatgccgactggggcaattgaaaatcgctgaggacaaaacgaatccacgagttggggttgggcgcggagaagtgccaggaaatggcagagtcttcggtgccgggcggaggggaaacgatcagccgggacgaagttgcaccgaaggctgaacagaagtgatcagacaggcagtgctcgacggcccactatcggcagcttgggtagatgtcgcctctccatctgctgttggcacgggttcggtctgctttagttctgaaaaat

SEQ ID NO: 5557 - DNA, 2463 bp, Heterodera glycines
cagggctccccccccccccacccactctttgcgtaatgcaatgccatcgccgtcggctcgtccccccggggcattccgtccccttcccctccctcgtcctcctccgccttgtgtctcatccttatccacatcgtcccgtcactctccacttgtctcggcgctgtgccacaataatgtccgagcaaattgccggtggcatttttctcgcgaaactccacgaaggaatctgtgcaaaaatcggagaccggcaaagaaaggcgctccaccgacaccaaaacgcgacccccgggcaccgtttcgatggtccattcgcagtcggaaggcaacggaaccggggaaagggcgagtcgaccattcattccagaaagggagcctccgcaaactaagcaaatgccaactcagagaaagagtgcaaattcagagccattgatcactctcatcttctctctctatctctctcgtctttctgtctaatttctcgcttcccctctccctctctctctcatttctaactccccctcccttttcttctctctctcgtctcttctctctctatctctctctccttctctctctctcatttctttcttccccttgtttgtttcagtcatccttccgctttccttctattacatttgctttccgtgtcgtacgaaatcaaaaacaagttctgcttctgatttgccaaattcgtgccaattattcgcatgtccgagtcgcatgaaaactcgcggaagtgtttgggactgaaagtgccggttccatccggcggttgcggcgcgacaatgccaagtgattggggcccgcagaacaattccaattgcacttcttcggccgaaggcccattttgctcgctttgcctcgtcatttgaatttcttccacacggacgaaaatgcgttggtcggctgaaagggaaaagccaagcgatcattcgctgccaatcgaaagcaatcacggctttgatcagtgatctcccgcgtgatcagtgaatcaccgctttgatcagtgatctcccgcgtgatcagccattcgcactttccctccgcgccgcccattcgcgccttggccgtgtttagcactttccgtgccgaattcgccacgagagtccccccgcatttggcaaaaactctgagccgaaagccaatgggtttttgtgttgatttggcgccagaaggcgaatcgcccgagataaccaattgatcatagggtgcaccgcggaacagaacaaccgactgaaaggaattgagaagacaggggaaagagagagagacagggggagagggggagacagagagagagagtgaaagagagagaggaagagacaaggaagagagagagagaaagagagagagagagagagacagacagacagacagagagagacagacagagagagagagagaaagagagagagagagagagaaagacagagagagagagagaaagagagagagagagatagattttgtacttaccttattcccgcccattgtgatgttgagaggcttaattaattatttactgtaaattacccctaatgagtcataatttacctccgcgttcacatcctggcaaattcggtagcgcgtccgctgtcccctaaagtgccaacgaattgactttggtgcattttgcccacaaattcgtcgattggttggctttggttggtccgtcgatgaacatcagtccgccgcgaaggtaaatcagacgaaaaccgcaggaaaattcgttggggtccgaataattgaccattctttccttcttctcgagactggacacagaaggggcggggctcgacaaattgagaatttggaaggcgacgacgaatccctcgggagcttcgaattgccaagccaactgacagagggacgatggcacggaaaatgacaaaagccaacctcaacgcccttcgggtaaggcttggggaaggagggcgaatggatgaatgtgtccgagcgcgggtccactgaaaatgccattgttggggggggggggcgtaaatcaaaatgccaatgccaacagtgaacggcgcctccttcagctgccactgcttcggccgattctgccgcaatcggatgaaagctgacgcgggcactgaatacaatgtgatcgtccaactcgtcaatggtgccgaaagcaatgccgacaatctgagaaaatggcacggaaaaaccatcgaatcattggccccgcccgtctcccccccccccacttcatccgaaatccttgcggaagagtcagcgtggtagctgaacacaacggtcagttcgccgaatgaccacgcgaaggtttcgttgcgcaatcggccgcacaacgctttgatgggtaattgaacaccgtcagagtgcgtgaagggaacggcatcggcataaaactgaagaaatacaatgccattgggccattatctttctttgtcccacttactctctcccactctctctctcgtccggtctctctctttc

SEQ ID NO: 5558 - DNA, 3645 bp, Heterodera glycines
attatctttctttgtccacttactctctcccactctctcttttccttggactctctctttctctcccactggctctttctctcccactcactctctctctcccactctctctctctctctcgtccatctctttctcttcccgctccacattatctcttgtctttcccacctgaactccgtcgagcatttccgtcttcggctttcctccgtctccgtccgatttcatttcaaaacatttctgatggtccgccacttcgtctagcaccattcgatccaccaaaatgcgaattgtatgcccgggaggcgcgcggattgaccaaatgcatttgcggaaggaatcgcccggcacaaaatcggcgccttccgacgcatttgccgtgagaagagaattgtttccgctgataatgccgaccacagcctaaaatgaaattctaaactcattgcccttcgccatttgatctttgggcccaccaattgtcgtccaactcagccaaaaatgattttccgcctcatttcttgactggaaatcgacccgaatttggttgtgcttggtgatcagttcagttggctgccacaactccgagcagtaccgacgaggcatttcggaattggaggacgaattgaagacaaaaggcaccgattcttttgttccgctgatttcacttatcgagtcgggatcagtctgatcaggcagagggccaattagtgatcgaatgaatgaatgaatttgtcatcccaccgctaaaaagtttcggccacatttccgctgatcagaaaacaaagaacgaacgccgtcaacgggttgtgagttggcgatacggaaaagatggaaattaatccgaagccgacttccgggcgaagttctgatggtccattgacagactgagcaatttgaaaaaaggatcagttcagcggaagaacgcatcagcagaacaacgaaccccggggagggacgacgggggacaaaaagccgggggactgaaagaagcgaactcagtttaatgatcaatgggtttgacattgtacctgcaggtttccgttaaacccatccaagacgatgtccgtacattctgcaatttgctgattaattaacaatgttcttccacaaaatgataagtcaccctcccccccccccgggatttattcattttgcttcgaatggcatcgtgcctgtgctgaattgtgccataaatccgaaaatggccgcgtggtgtgccccgccgtgctgtgtgtatcggacggagagtgcgtttccgtccgattggatgggccgcgggttcgtctccttgcggcagtgacgcgctttcatctccgtccaatcgctgccctcgcccacttccagcaaattgtgcccaaacggtgaacatttgccctgactgtcctccgagtcgaagtcgtccatggcggagatttgcagtaggacttggttccctgggggaagagaattaacgggccaaaacaaagggataaacaattaggcaacctaacgcaacggcgattagccattggcaacgcaacgactgcgaatctttgtggggaaattgcggcgaggaaatggcaccggcaaaggcggagatgtgcccgccacagcctaagaagaaaagcaggaagcatatcaagggacacggcacaaacaaagcgaggaaagagtgccaaactgtgaggatgactcaccattctcaaattgttcgtaacggatagaaaagcgcattaaacggctgaaagccaagcggaatttgaggaaaagctgattgccctgggagatgagccgaggctgggggtggtcatctgaaacagcgaaatggcacaataaaacggcaaaacggacgaatggaataccacaaatttcggagtcgccaaaaagtccggggaaagcgggcgattgttcggaaggaccgttgcgaaccatcaaagtgccaaattcgcaagggacggacatgtttaggatggagaggagaatacggcggtttgagggcagctgagggagggggaaacaaatgagcaaaaaaaggacaaattgacaaagggagacaaatgatcaaaaaagtgcaaatgaataaatgtttaaataaaaaaggaccacaattcggtagacgcaattgtccgattgagcaaattcactggcatcgaagtcaaactgtgcctcgggggcagtgaaagtcctatcgcaatgggaggccaaatcgacggcttggaagcgggcggcgaaaccggcgccactgagagaacggtcgctgagaaagacaagtgccatttgggcaccggaagaaagaagcggcgggggcaaagacttgccacaaaatctaaggaaggcaaattgggaaatttatggttgggggtaattaagcatgtaatgattagataattagtgtaagcatggaaatgcttaaattttgttgcctttcactcacttgcccaaaactttgccatggttctgttcgtcctcgaagaattcgtcgtacaccgtcacactgtcaaattcgcagttgtctctatgcgcaacattttccacgtcgaacacgtcaaaagatagtcggacagcccttccctaaaattatttatttgttttggctctgattgcctgctatttccctcccccctctctccctctctctctctcctctctctatctctctcttttcactctctcttttgtttaccgttggcacttggagaaagtaaacacaaaacatgaatgccatgtacgagtccgggtagttggggctggtcagctgtggcgcctctcccgccacttcgtccgatccgatggagaggacaccgccgcatccgatgttgatcaactcgtaactgagcagaaaccctttgtttgaggctgctccacttgtgcctttgaattggaagaaaaagtatcagcagaggatacggtagggacaaaatccaaaggcatactgtaggttatggaaaagggacggatgccgctgctcaccaccatttctccgtccggcgcaatgaacggataacgggcacaaacgtaccgtctgttggccacttcgttggacgggtgaccgcccgaaaactgaaaaaagtttaataaaaaagcaaatattccgtctttaatttgccatccccccccctttttcacttcaacataatcctccatttgcgcatgtctctcgcggtggtaattgcacgtgttgaaatcggtgctgatgccaatttggtcaaaattgatgcgaatggcctgccgaggcccggcaattattcggtaagtgcatttgaacggacgcggggagggattaggaaagttcggaggagagattgtcccattcagagcagttaaatccttctcacacgctgaaaaatagatgaataaaagatcaagaggattgatcgaaggcgaatgattaaacattttcaaagcaatcgctaattaccaaattgatatttcaatgaaaagccggcaccgccgagggacgcgtcgctgtgaaatttcagagaaatgcgcggcgccccaatggccgtcttcggcggcttgtgcaaattgcagaaggtcatgtccaactcggaaatgtgcacaaagtcgccagagcacgagctgatggtcacatgccgaagcattgggttggcatactgtacaagtgaatacagtatgaatggatgccgaagaaagcgcagttcaacctg

SEQ ID NO: 5559 - DNA, 3005 bp, Heterodera glycines
tatacttttaaacttaatgaatgtatttaatattaatcttgaaagggctatttgttaatggtctcatttcacattaagatttgctcaaaaattctgtgtgtgatcataaattgttcagacttagtccaaaaagggtttgagagacacaacttccttaataccaattccaaaaaagcaatgcgatcacagccatactgtaagcctatacgaacaatgttagatttggtgagaaagaaaaaagttatagtccggagcccaaacgtgccgggacccaactgatcgagtccgtgtagcggtaacataaaaggtaaaattcaccggtgtgactcgtatttcttttggaggttctcttttttctttatcccactttctcccacaatccgcttcctctgctggcatcacatagttgcggaaatagggaaaatgaagcgtagaaagagcaacaaattacaaaatgtcccttatctctctctttctatcaatgaattctctccatggaggaccaaaggaaattatgtacttctttattatgtattttaatatgaaatatattaaacaaaaaacaaatgattgtgaaaggcggtagatctataattgctgcatcacagtcgggacagtggtcgatttgccgttttctgaggagatgaacgggttctgaaccaatcattttctggtcattgtgtggctctgctgccatttttgccatatgcgccgaattttcttgtcccaaaaccaatggcaattgtggggctgaatccgaaactgccgtaatccgtcgttgtccttttgttaattggtgacaatggcgatggtttgctgccggggacaattactcgctgctttttttctgtcattttattgttgctgctgaacagaggagaaatggtgaacttattgtatcggattaatactttttttaccaccctctccctaaataaaaagttatgcaccctacttggcaccagagttaccgtccgaagcccaacatttctcttaccgagtcccggcccaaaggttttgaccgggattcgggacaaaaaaaacatccctaaagtttgggtatggcaaaaatcaaatcaaaatttacagtaaaattccaagattttgacccaatattcccaaaatagacacaaacttaaaatcaaaaattataatttctgaatgatgtgttcagtatgtacctttccggttgttgtcgttcgtaattttgctcatcttttgtcgatgagcttggagatggaaatgaattggaagatatttggggcaagcagcacgaaaaacagcagaggaacctccggaactcagtactggtgaagctgaagtggaaaggtaatagcgaattatgggagaaaagtgcctgtaaatgagcaatttggaagaaccgccgccaattgccagccaagaaaatgcctatggaaaaggggcattagcagagacaaaggcggacgacacttgggaattgtgacacttacaaattgcatcatggaaaggtccgattggcccaccagcgaattgggcaacaactgaaacacaatgatcggaagccatgagagtaggaaagagacgaagatgaacagagctaaagggagggggagggtaaagccatgggccaattgggacacacaaatgacgaagtttgggtcggtgtcgagaattgttcgttgcaagtcttccaactgaatgagtgggacagatagctgaaacttggcacaccggggaacctcgtccggtttatttacagctgcaataatggcagcggaagtgaatgccattgtgcacagagaagggaccaggacgagcacggcaagcgtaacggaatatgccattgtggaggtccaattgagcagacaaagctccaactgcggcgagtatttggactaaagcgaagtgccgggaaagtgacgattatcgaacgatgcgacctccattttggcgataagaattggacaggcgatgagcagagaagtggcccaggagaagaagatccaacatttgcaccgagtggcggtatgagcaacttcgtaacgactcggcttcataaaggcggagtatctgtcaacactgatccaagcgaagatgtacacctaacaaacggacggacgaattgtcgaacggacggacaatcggtcattattgaaaggtaccgtggagcagatcaacatgacatgcacatacacagtgcatttgcaaagagctgtgggaatgcaatttggcaaagagcaaaacgcattctaccggaattgtctccggcgaagtgccaaccgggcctcaaagaactgaacaagctgaacgggatgatgagcaaggagcagaaaaggtcagcaaaagagagactgatctgtcggtgcaaaagcggactttcaaagcgactctctttccttcgttttgtttttgataaatattatttactaaacaatattgcccttctcaaattcctccgtggattaattattccccgtccattgcttcttcgtcttcatcatctccactaattccgattccgaccgatccgtccctttttccataatcccccctctcccccctccgtcccttggctaattatgcttcttccttctgtctgtcctatctatgtctctcaattcttcgttttctcgactccctttccgtctttctttattcgtctcactctctttgaccgtttgtttcttccgagggattcctcgccggtcgtagtgccctttttgccgggagggattatttgggaaaaaggcaaaaagtgagagaagaggcaagtgacgtcacttcgcttttcattcgtttgcttcacccttcccccccccccctcccttttcccttccgccgatggcattgccatgacggcaaagattttaagatgaaaatgaatgacttggccgtgtaatttccaattgttaaaagacccatccataacaaaaaggtagaaaatgtggaaaaggtgtcttaaggaaacgaaagcgaaagccacgacaaaacaatggaaaagaagcatcggacaatgaattggc

SEQ ID NO: 5560 - DNA, 959 bp, Heterodera glycines
cttaaaaagcaaaatccctcacgaactttgacttttccatgcctcactttcttctccgatcagtccaatcagtttttgaatgtttgtgggcgttccctttatcactgcttttctgctgctgtcttgtcaatttgagtctatttttgccgttgtcggttggttctcttggcacgtttcctttccctcccctccctttgcttctccgatgtgtgccttcccctacctcccccccccccctccgttctctccccctccttttcccttcttccaatttattttgtctgttaagccccgcccgcctcagaaaaaaaagatgagaaaaaatgaaaggaaaagagaaaggaacgaagggagaaaaggaaagagaaatgtaagtaattggtgagtgattttcaaattcaaaattcgaaacaacaacttcgaaaaactgactaacataacaagctgcagaaaataggaataaaagtggaagactccgttagctttgtagctaaaattaaatagcgacgaagaaaatggaaatgaagccgtcactggtggaagcatgaaaattggccaggaaggagcgagggagcaaaagatagtcctttcaaagcattggcacaatcaaataggagccaaaagcaaaagcttaaaacgggagaaaggaaaggaatgccgaagcgagaaagaaaaaggcaaaggaagtcctttcagatagaattaatttgaaaattgggggggggggggggaaaggacgcaaaatgaatccgtccatttgtttattggcgaaatcggcaaataattactacatgtaataaagataatgaataatcacaataaggggggggggggccgcagtgctttcacgtgccgttgccgccctcagtttccatttcgccgcatgaatttgcctccaccccttcctcctcctcctccaacaattcaacgtcctccatagcttcctcgtatgccaaagt

SEQ ID NO: 5561 - DNA, 3435 bp, Heterodera glycines
  unsure (1)..(3435): unsure at all n locations
cccccccccccctcgttctctccccctcctnttccctcttccaatntattttgtctgttaagcnccgcncgcctcagaaaaaaaagatgagaaaaaatgaaaggaaaagagaaaggaacgaagggagaaaaggaaagagaattagagaaatgtaagtaattggtgagtgattttcaaattcaaaattcgaaacaacaacttcgaaaaactgactaacataacaagctgcagaaaataggaataaaagtggaagactccgttagctttgtagctaaaattaaatagcgacgaagaaaatggaaatgaagccgtcactggtggaagcatgaaaattggccaggaaggagcgaaggagcaaaagatagtcctttcaaagcattggcacaatcaaataggagccaaaagcaaaagcttaaaacgggagaaaggaaaggaatgccgaagcgagaaagaaaaaggcaaaggaagtcctttcagatagaattaatttgaaaattgggggggggggaaaggacgcaaaatgaatccgtccatttgtttattggcgaaatcggcaaataattactacatgtaataaagataatgaataatcacaataaggggccgcagtgctttcacgtgccgttgccgccctcagtttccatttcgtcggatgaatttgcctccacccattcctcctcctcctccaacacttcgtcctcctccatcgcttcctcgtcttccaaagtctccttctgcctgtagaacagaatgtacgcctcttgggaaagcacttccaagctgttcactcgggtgacattcgcatcgtcaaactcgtaccaatcgaggtcatccgaattccgacaataggccacataatgtccatctgtcaaaatgagtttttttcataggaattcagtcatcgtttcatagtccatcttatttagagtaaacttacattccaagttttgtcccttgtgagtgattaacccgcaaaggtcgtatttggttgggtttgggcattcgggtgggtcaaattgtgcctcggagtgtataaatggacgcaagtccaagttggtgaggggaaatgcgactttggagcccaatttgacgttgtacatcccttcgttgcggaaacgctttaaatggatgaccaacacttggggaaggcgagtcagcgaacagagtttagtcccatttcgaagtctgaataagcgagcaagtgacgagaaagcgcttcctgcccacctcaccttttgcactgttcgcatttgtacatgtcatcgccgtgcaaataatcgaccgagaaaaaactgcccaaacattgctccagagaaatgggacccgaaaaaaagtggcgataaagttcagtggcccagccggtccatggacgaatcagccactctctggcaattatcagaaaccactggaagggaagcatgacactcagagaaatgagcaaagcacagtgtaaacatgccaataaatattccaatccgtaataattggaccgaaggcttcgctgtgtaagcgtaagattttcaactgcgtttcgatgcctctgaaatggacaaatttattttccgccagtcaatggacagaaatgtactcacttcctcctctctcgcagtcaattgcatcaaattgtcagagcttttacggctttttactgcagttttcaaaatttgaccattcgttggcatcggcataattgaggaggattcctttaggggacgaggcggaatcggcacggagaggaagcagaaggggtcgaatttgacactcactttgccacaaactgaaaccgaagaatcgtttctttcgtcataaaaaagagcaccatttcactcattaatttcaaaattttgttaagtcagaggcgaatttcggattttcgttcaatattcgaaatgaaagcctttcaaagttcgggtctctgaacaacaacaaaaggaggttcggctaccattgcaagttaatgacgacttcagctgtccatgcagcagatcggtcacaatgctatcgttcactcttttgtactcctcccacgcctcctccgctgtctgctgtaaattgactgaacatatcaaaacgagttcagcaacaatagttgaattgcactattcacctgcttcgaagtgtccgcttcctccgacactttcggctctttccttcgcttttcttcgatggcattttgctcttcacttttcccatcttcggcacattgtccctcttcctcgttgtcctcccttttttcagtttcatccatcctattgttagaaatttgtctgtgattaatccgccgatttaagtcctcgtgaaggccatccaaaagaaatgcaataaattcgtgtgaatcctgctgggcaaatccgttgaaacgggtcgcgaacattccgacaacgcactgagttttggaaacatgtttttgttataaattattgtgaatgtataatttggtgatcacaccagaaataaaattcttgttttaatttaaaactttactttgagtcgaaacggtctaaaggtgcaatatctgcctgaccacatattcttgagaagttcagcgaattcttgtgccaatttgccttgggtgcccagaggattttgggtatttatttgttcggaatattctccgttgatgaaaaaagtagccaattccggaatattgcttaggcattgtaaggcactaaaaatttaaaaattaatcagtttttggttaaacagataaattctttctaatattaaaatgttccgcattaaagcagacattaaacattcttggcaccattcgaaaaattttctattagcctgcaaaatttcaaaaaatttcgttatgtttcaaaaagttatggcctaaaatttcgattcaaaaagttttttaattttcacgtcataaattttttgaaattttaaccttttgaacaggctaatttggggctaaaaattatacaagaatgtttaatttggatgctttctagaaaaagttatgtggcatttaaaattgtctaattatttattgtcgtgtaaactgtaataaagccttaatgctgcctaaggatggataaccgacctgttcatgaagcaggtgttgcccaaattggccaagccgcaaaggcccttcggataccgaacaggcaaagaatacaaactaaaaaaggcatttcgttcattcgaaattggtctttgaattatgtgatgcatcaacctgtgatttgttggcaaagctccgttagaaaatggaattgtcgcgacgcgtcctccaccattgtatttttccggtctttcgtaaattttttgcatcgatgcacatttacaaaactaaacaaagttaacgcattaaaggaacaaaggaatatgaacaatttgctagttggttttacataattccttatttttgaacagacaaaattaataaaaagaaaaaaaaatagaaaaattttaatggctttttaa

SEQ ID NO: 5562 - DNA, 1038 bp, Heterodera glycines
  unsure (1)..(1038): unsure at all n locations
ccatagtagctaccnttcttctttaaaaaaattgaaaataacatacaacaaaatgaggactcgaacctgagaccccccttttggtgactaactcacagaccactaagacgaaaaaaccaacttatttgcgcttggagcccaaaattgaatcgccgtgttaacccatccttccttaccctttttccaattttcaattcagcccccaaagttagataacaaaattattattgattattttttgaatttttaaaacttttgtccgacggcattctaatgtagtttggaatttgctagttttgcaaagctttttaaaattttgagacaaaagtaaaaaaaaagctgaaaaattacaattgcaattgtatttacttgaaatggttaacgtttcacacagttttgattttcagatttcgtgtattattatcttaacaaattaagggtgaacatctaaatggttagaccaaacttctatttttatgttaacccaaaaattaaggcgaaaaaatccacgaagaagaaggtcgctgctcttcccgccgcgatcaaaaagacggaaactaaaaagccggcaaagagtactctttttgaacgacggcctcgcaatttttcaattggtatgagcatgataatattaaatatggtttttatctgtatatttaggccaggacattcaaccgaaacgggacttaactcgctttgttcgttggccaaaatacattttgctccagcgacagcgtgccgttcttgaaaagcgtctgaaaattcctccaccaatcaaccagttcaaatttgctcttgacaaaccaaatagttagtttttgttttaccaatgtactacgattttctaaattcccattaagccaaccagctcttcaaattgcttaacaaataccgtcctgaaactcgccaggcgaagaaagaacgtcttcgtcaacgagctcaggatcgagcagatggaaagcaagagaaactgacgaaacgtcctcctggtgtccacttcggcattaaggatnggtgtcaagccgtggagaacaaaaa

SEQ ID NO: 5563 - DNA, 2964 bp, Heterodera glycines
cattgtgaagggaaaagatttctcggtcaagttgtctaccgcaagactacttctgccgtgtgtctttgcgacgttaatccgtgcgtttaacattgttagttattatcgactatacaattttagggaggacagaaacgcgcttaaaaatttggctgatgttgcggtcaccaatttcaatgaacgcggtgatgaacttcggaagaattggggaggtgcgatcatgtcccagcgttcgcaagcacgacaggctaagattgaaaaggctcgccagaaggatgttgggcagaaagtttgatggtagttatcaaaaattgttgtttctctgttgatgataaaatttgttgacttttggtttcaaatttacaatatttgttcataccatcgttatctcttagttcttgaaaatctttttgttatttgtatttgctgtagagatgttttcttgtacgttaaatggggtgccggaatcacacgatcttttggagaagtgtcggctgccatttggtcttcacttacagccattccgtgatttgagggtactctgtgtgcatctttcttcttttgtagttctggattaagggattgaaagtcttgcagacagtcatcacgcggtgcagatattgcaggacatatatcaacccttttgtgtttttaatggacgcccgtcattggaaatgcaatttgtgctatcgcgcaaatgaaagtattactttccttgttgcgataattttttaagccttataacagtgcctgaggatttcgcatgggaccctcaaacgaaaacttttggcgacccatctagaagacccgaactccaagaaaccactattgaatacattgcaccatctgaatacatggttagcccgtgcgaaaattttttttagaaacaacaagttaagcttcgtcctcctcaacctccgatttatttgtttgtttttgacgtcggttccgcagcaatcgattgcggttacctcaacacttttgcagaacaactttcgctggacattgacaaattgcctggccaggaaagggctttcattggctttatcggtttcgattccgctttacattttttccaattcgatgaaaacgagagagagccgaggcatattattgaatttgatgttgaaggtttaactcaaaatattaatgtataataaatacttggcttttccagaaagttttgcgcctgtgttctctggactttttgttgaacttaatgttttcaaagaggttatttttaagaaaacaaaccagtttcgcatttttttagatcatcaaaaaatttatatacaacataccatcaatttttgaacgttctatgtcatcctcaaattgtctcggttctgcacttacagttgcaaaaaatttaattgtaagttttttttatctgtctttaattttattgtttaaaagaacgaaatcggtggacggataactgtttttaccgcatctatgccaaatctcggaattggtgctctgaaatgtttggaattcaacactgcaaaagtatgcgtgagtaaattggtactttaggattttcataccccacccacatttttcatgctaaaactaaacactgacccttatttaaacgtaataccaaaccagattttctttgatttgaagttacgaaacagaaactacttctattagcatgtactaattgatttctcttttacagaagatcgcatttacacctcaaattgacttttacaaaagtttggctctcgaatgtactggaaaacaaattgccattgaccttttcgttgtcggatgtcaaaacgtagatcttcgaacattatgtgatttgttattcttttgttattcgcttctgttaaccatttatggacaagggtggagggattagagggctctgttgcagttcacacgaccataaaaatttttgcaactttagtgcaccataactgttttaagaagcatccaaattaaacatttagtatcattcggtagccctaagaaaatcctctattagcctgcaaaatttcaaatcgttgggtttcaagaaatttatggctaactaaaaatatttagaaaaccaactttgaaattttgcaggctaatagaggattcttagtgctatcgagtgatactaagaatgtttaatttggatgtttcttgaaaaagttatggaaatttatggtcgtgtgaatttcaataaagccgattagagttaggttttttgaaatttcttcaattctatatgaaattatcctacattttccttttggcaaaaaatttccatccttacactgcctttcatctttctctaatttttcgcggaatttcaatcctcataaaaaatcggaatttgcctcaacccttggctatggttcaacaattcgctgattttttgctttttaagctgatatgtctcggttcagcagtggcaccgtgtaccatttccctgaatatcatttccttcgggaccaagtcgaagtcaaacggttccaaatgattttacgacgttactttattcgaaagcttggtcttgaggccgtgttgaggatacgttgctcgaggggtactcaagcaattgattattattgttttcttatttttattgtttaaattcacaggactttctcttcacactttttatggaaatttcttcgtccgttccactgatttgctcgccttgcccaatgtgagtcccgattcggccatgggcgttcaaattaaacacgacgaagtgatcacagccagtcaagtgtgtttccaagcagctttgctgtacacctcgacgaaaggtttcccttatccattgtttgaaatgtcgaaaagtcaggtgaccgtcgtattcgcgtccacacactttgtctccccgtgctcacacaagctgcacatgtattttcttcgctggacattaactcgtcaatatcgctactttcaaagatgggttagttctgttcaggcccgtaaaggagcgaggggcgggaaacc

SEQ ID NO: 5564 - DNA, 3442 bp, Heterodera glycines
  unsure (1)..(3442): unsure at all n locations
cccccccccccccccaccaaataaatgatagagggaattttataagggcgtggccagggaacgagcaaaattggcaattttcaaaatactttcatattgatattttagcttctgatagagctttgcaaggcgctagtttatcagactgtcgtgaggcactaataaatgccgttgtcgatccgaccgtctgttatcagcgatcacatggtcaagttggttccatgttgcgcatgcctcctgaaggtggtcttcaatacatgcccatttacatacttggattgttaaaaaatgtaagtaaaacttataataattcttttattggtttaatttatgtccaaaagaaatccttaaccaatactcccgttaattattgttgcttgttatttttatatagtaatgatcgaatttcagagggcgttttcggattctctgcaaagggtcaccatcgatgaacgtgtggcaacttttctgcttttcaaaaatgctccgttggaagttctcttacttgagttgtgcccagctctttacgcttttcaccaaattctttactgcgaaccgaatcaggttgccggacaagcattttacccaatatagcaactgctaatcaattattgttaacgactgaaaatgattttctcaggatggacaggtcccttttcccgaccgtcttcctcctacttatgagcatatctcccaaaatggcatttatttgctcgacattggcacatttgtctatgtgtacgttggctctgccttaaatgtctgtattttgcgttctctttttggcaccgattcgttcgctaaattggattcggatgtaagtgaatgttcgactcttttgctatgactgtttcttttgagtcaacagtaattgaaattgacacttcgcaaagcaaacatttgcatgcctttcttcgccatttacaagaacagagagggaatatgtatgctccagctaaaattataaagtaagcgccttccgaaggaatagacgcgattcgaatttaatttagggatgacagtccaaggcgggaggcatttacgcgacggctcatccaggatcggtcggattcttcacattcttacaacgaatttatgcaattcctccaacgagaagtcagcaaagccagtaaatgaagaggatgaatgaaatttcttgtgatatcttcattttattcgtcaggaaattagtctctgttaataccgttgttcactaattggtaaatacatgtaaatgaatagccatttattatcctgccagaaacaagtccctgagagacccgcttatgtttcggaccgctaatggcccaattttcggttctagtcggttttacgcgtcccatgacgtgtccatggtatttaaccgttacaaaatttcgtaaaaccgaccagaacacacctttctactgatatcattgggcgtaagaaactgacaatgagagttgccagctttgctgcgcaaattgcattagagtcccaatattttacaatataaaaattaaaacaaacataagacaaaacttaaatgacatacaatgtattaataaataagtgaggtgtgacaataattcatttcttaatataaattctcaagggctgtttgatagttcctcgtcgagtcgccaatatttaacaatttttgccgttgtctctcctttttgctaccgaaatttgcctctggctttgatttccataaaatacgaatgagtagcgcggccaaagacaaaacacaaagaaaatagaaaacggagggacccgcggagaaaagcgggcgaattcggctgaaaatcgatgggtaaaagaattcgtacctataatctgaggacaccttttttgctttggctgaataatccctttgctttcagcaaacaatgggaaatatcgcatctggtaaataatcgcaccaagcgccttaattcaaattggaatagataaaccgcaaccatttaaatgatcagcacccattggacttcttggccatttattcgaaatgcactttgaaagtgatgttggatttcgtcgacgtggaaaccgttgtgcaacacggcgtggatccacgccgacttaaagcattgcgtctccaatctctccgagtccgccttttggtagaagtgcgctttgactttcctctcaaaatggcaaattttaatttgggaacaactcactgaatttggttaaagtgactcacttttatcactgcccacggctgcccgcaaaattccttagccttttgttcgaatttgtcgtgttcgtatttgccgcccagtgaaagaacgtcgtcgacgctgaaccaatactcgctgaacccgtacaattcaacgtcggaaagggacaattggggaggggcgtgaactccgttgaaaaagcattctttggctggagaacatttggagttggactcgaacagctaaacgataagtcgtaggggttggttagggattgacaaattcaaccagcgaaacgatgtcgctgacacatgaatcccagtcgccatttccctgaaagtgccaacaaatgttttggcatttttttcactcccccccccgttgaaccacgcaacctttcgtacgaattggtcgtaattctcctcggcatggctcaatttcagcatattcacaggcaaacatccgtcaacgacagtcggcactttcgcgccgtcttttccattgtccgtttcggtcgaatttgccgcttgtcttttgttgttcaaccgcttccacaaaaacttttcgtatgcttttgctccttcattgactccgaagccaagaaaagtggtgacgaacaatcggaaacggaaacgcgattcgtcgtcacgacagccgaggtttagcagctgaacattctcttgcccacccgttgcagcatcggaatggcccaatggaagttcataggcaatttgagcagaagcgccacccatgtcaatcattcctcaaagggcggactaaccaaaattgggcaattaaccaatcatttggccttttccaaattaccccccaaattgtcacttattttgcatttcttagttacctgctgttttcggtcgctcctttttctcaacagaaagtgctggttgtgatcgctcttcgagtgactccgatttggatttgtccaccgatttcgtgaagcgtcccagcatataatttatggctatccaactgtaaattccttctaaaattttttgaataaaatttagatttaaaagaaataaaaggggatggggtttgttctccccccccccccctttctctgtgatttcacaatttaccccatcggccgcttatcacccgaatgtgttggtccaaaatttgcaattttgtcatctgaggaagttcattgcggagatgttcccattaaatctgttgttttctcaaaatggagcgacaattattntgaaatgctcccatttaataacgaacgcactcaaatggcaacagacgcatcc

SEQ ID NO: 5565 - DNA, 3302 bp, Heterodera glycines
ctggttgcttttgtccgatttcccatgccatccatctgagatgaaggtgggccgctgctcattattgcaatgcacagcttggccgtggaagttcgttggagagacgaagggcgaagccgagagtttggactcattcaatcattttcacctcattcttcatttaaggatcgggacgatcctaagggaaggggggagttgtaaggattattcgacgcatttccctcatttaagtattccctattggccattatcaattcaatcatattttatccattcacacgcttttcctttttcgctgtaatgattctccgcccattcgcttcttttttctctttcccccagtgatcagttagtcagtcagttgttgagcagacttcaattattattccgatttctcgtttcgtgtaaatccaacaacgagtgaataaatatatcgacagtcaatgaatcgttgggattttggggcttagtcaatggccatggctttccccacttcctcccatgttccatccgggatagacggtgcggttggtctggggggcacagtgcgcatccctcactataataaatatttgactatttgggtaataattaaatgttggcaaacatttccggctacttccgtcaaaattaaatatatttatgtatttgacaaatttggtaataattaagtgttggcaaacacttccggctatttcagtcaaaattaaaatgtttatctaaattttgcataattattattaatattattattattatatatgttttcaatcaatttatcgaatttatatgcatatatttaaaatgcgattgttgaaaaaatattcaattacctttttatttgaatatatttatgaataagatattcattagcgtcaactaattaccatctcagcggaaatcctaaacagcttttagacatgaaaaacactcacatgatcataccaaattcgtagagccaacaaaatttcgaattccaatcccgagcttgattttgcgagatcccaatccgcaatctcgcatttcgcaaatttcgggattatgggattttgcgggatatatatctgcggatcccgttgtgtaaaaattttttagttccaatcccacgcggaatttatacctgcgtgatcccgtcaattttgaattccaatcccgcgcgggattttgctggatctcaatccgcaatcccgcattttggaaattgcgggattatgggattttgcgggatataatataccgagggatccgtccagtaaacatgtttagttccaatcccgcagtggaatcaaaatttcagtcaaaatttggcacattcttcaaatggcacaatttgtgaatttggtacaattatttaataatgctccccatatttgggcataattatttcaaataaaaagtttttcttttaaaggtcagctttttgattttggtcctctcattattgccaaatgcattattgtcaatcggttggtgtttatttagcttttcttttttaattgtaatgacaaatttattatgattttctagacacagaagctgtgaaggatatggcagatgaattttcagcgctaacatcctcaacatgggacattgttaatcagttgagatttgtcagtgaaaatgccgtgaaattcgttcgcgtcgccggccccgtgggcgccatcattgcgacagccattgatatcgcatttagtgtaaaaaatatttgattgaaaattatggtacttttctgttattcgaaagctcatgctctattagtcttacaaaagcaaaaagatttcatacatataaaaattttttaagaaaaatttcaaaatttgattttttttttttgcaattttcgtgttatatcttttttagaataaacatgttagctttcgaaagataacaagatcgttggatttggatgacgaagaataaattatagccaaaaatatgctggggcccaatcgttagggcccaacaccaaatgacatagaccacctgatccgggtattttttgaaaaatgcaccaggatcaggagtactgaaaacaggatttaagatcctcaaatccgtctgctccggatcagggctgggcgtaattacggatcacgcctttttggaccccgtcatgatggattacggatttttgggattttttcgtaattttcatccgtaattgggtttttggattatttttcgatttcatgcaagattatttttttataaaacaatttttataaaaattattttaaaaattaaatttttgaaaattacgcattacgggttacggttaacgggaaagtttacgcccagccctgatctgggtccagttcgataatcctgatcctgaatttttcaaggttccggccttacaatatggtcacggagttctaataaagaaatacagtactcatttaattgattttataatttgcattatacaaattgaaattttaagccagaatcagacgagcaaaaagccatcaaagaattgcacgaatttgtagaaagaaagtttgaagatctcaaaagacacgtagaacatgaagctaaatcaatcataaattatttagttgaagtcgaatataaaaacgtaacctaataaaattttaaataatataattttatttataaataaataaataaaatatttcataaaaatagttttaattaaagacatgaactttcaaatttgaggatcccgctacggggttagaactcaaaatttttttgcgggacagatccggccggattaatccccgcaaatcccctcattttccaaaaaaaaatgtgagattgcggactgggatcccgcaaaatcccgctatctctagttatataggggcgtgccatatcatagtattatggaaatctcatcatctttgggtgatgtgaatgtgtgtgtgccgtgccaagatatgatgaagttacaaagtttttatcaaaaattatgattttaggtattttaagaaaacaaaataaataataatttctagtgttgatgttactggataaaagtagtctcaattattaaagcatttggcactccataatccggcacacaaacgcatcgcgcaaaaatggttgcaatttcaaaatacaattttagggtgatatgtgtactttatgtttttttttcagacggtaacaaaaccattaaagattatcgatgatgcttacaaaggcataacggatccacgaaaagaagagcgttcccactataaagaagaattcattgccaaatgtaaaggaattaatacagcaccacgtgatgttctgattgtgagtactaaattctcaacattgaattttcgaac

SEQ ID NO: 5566 - DNA, 1468 bp, Heterodera glycines
aaatgcttaaaggatgtctgtacgttatcttagtgctgattgctgttagtttgattcggttgggcaaatgttagaggcgatttaagcattttggcccttaatttctccggaaaacttggaaaattcaacacaactccgcctaaaagacagatttctgtctgcaaaagaaatagaaatgtgaaaaaagatttgttctttcttatttagcttattttatcagtttctttttggtagttattgagatttgattcgtttttatcaagtgtctctattttaaattaacacccctttttcgggaaaaaattcataaaatttttttccatcgtcatttcgccttctcctttttagaatcttaatattttcagaattgctacgtacagttaaaaattcagctcgatcggttcatgggaagtggtcaaactcccaaaaaacagagtgtctttattttaaattaacacagtgtatttgggcattttataatttttgaaacaaatcgacaatttttaaatttaaaatttaaacaaaattttgagaatctatttctaaaaatgattttttcggacaatttccgatctttgggggtcaatagtctaatttagctgatgggagccgttctattagatcttttttggaaagctgccaaaatatgtacataaatatgtaaatgtggatataaatcgcggattatggaaaaatatggatatagaaattcatcctagaagcttcaaaccaagctaaaaacacgtttttcgtgcgtttcagggctcgcacagtccaattccatataattccaagccctaattataacttcacaggtgttggatacaaaaaattgctgatggcaacgaacggaaacgagaaccgctcgttcattttgctaaagtagtttggttggatttgatgagagcggtgagttttacggcaacggcgtagccagaccctttgctacgggggggggggggctcaagtcaaaaattcggtttttaggggttatattttttagttttttgaaatcccgaattagcggcatattttataaaattttagccgtttttcgccaaacaattactattttttgccattttgatctccatttttcaaaaatatggtaaaatgtgggtccggcgatgccgtcaagcgctaccgggaaaattttttgagaattttaatgcaatttgttaagaaaattgctcaacatttcaaagaattaaattacaatttttattttttttcctttttcagggggggggggcaccccaaaacgtcgccggaagactttttggaccataactttgttcattgtaaatcaaattaagcattcttggtgttgttcgatagctttatgtgtttactattaataggctaaatttaaaaaatttttgttaagtttcaaaaaagttatggccagaaggaactcaaaaacctagtatttcgaactttttttgctctgattttttttgtacattaa

SEQ ID NO: 5567 - DNA, 2988 bp, Heterodera glycines
  unsure (1)..(2988): unsure at all n locations
tatgtccatattgggcatttntgntccatatctggcatnttatgtccatatttggcattttttgtccatatatggcttttttttgtccatatttggcattttatgtccatatatgtgttttatgtccatatttggcatttttttgtccatatatgtgttttatgtccattttggcattttttgtccatatatggcttttttttgtccatatttggcattttatgtccatatatgtgttttatgtccatatttggcttttttttgtccatatatgtgttttatgtccattttggcattttaactaataagtttggctgtcaattttaattatgtaaaagtttttaaagtcgattttttggaagtttgttttactacaataccaaaaaatcaacatcaatttttgctatttcaggtcgtttcttaggggtgtattttcccgaatttattgtattttttaatgaaatttttcagagccaaaaaggcaccaaaaacggcaaaatgccaaaaaaggcatttaaggcaagaaaatccccaaaaagacaaaaaaaaacataataaaagtaaacgtagaagccttataaactaagtggaaaatgtgttatttatgctcaatatatcgaaaatagtgcgcagaaaaaaaggcatatgcttcaaaagtcggtctttacttataacattcgatagctctgcaaagattaaaaaagttttacgtcccggcacccttgggtttcacaatttccaccgttgtgcacttggaaactgacttggtatgatccgagccctgagttaacaaataaatgtttaagaaagttttcaaaggaagcaaaaactttagattttggcacatttgtttacacaaagtttcactatttgtagaataataattcaggaaatcacttggccaacaatttcacgcactcgtgcaaaatcggcaattggtgtttcggatatcgcagagagtaaagaggcgtatcaatctgtagcggaaaagataaaggatgaggttgaccaattaggtgcagaaaagtaagcaaaattgagtgcttattcgtgagcacagtatgatcaagaaacttttaaatattatgtgtttgttgatctttcagtattgaattttagaaaatccaaaaagatggccaaaaaagtctgcctaaacaaaaaatcaatttacaaaattaattcaaaaaatgagtcgattagaaaatctttcttattttatttttaaattgttcgaattttaaacgtctttttctattataaggttggaattcttgcgccttgtaaaaataatttggttttattctgctggttttcaaaaaaccgcttatttttatgttgctgaagttttagctgatgcgcatagtttcattttaaatgattaattttcctctttttttacaagtacaatgttcagatacgattacgcggtcatcgtttttcctaattggactgacccagaagcgatggcaatcattagcgaagctaattcatactttgaattgattgacgtaaagcaaatcaatgttatcgtagtccgaattgaagacaacgaaacaaattttgaattggcatgcaaagcaaatgaatggtttactccaaggatagaaacaaaaatgaaatataccataaagtaatttgtatttggtagagaaagattaccgtaattattttaatagagccgccccggggctctgtttttcaacctcccctcccccctcaaaaggggggctttatttcggaggggtggctctaattcaggggggggggggctataattcaataaatacgatatattattttattcgtactgtttttcgacaaaaaatcgtcataacttttatttaagtcggtcaaattaaacattcttggtatctttcgatagccctagatgttttcttttagttcacaaaatttcaaaaagtttcgttaaatttcaagaaattgatgatcaaaaatcgaaaaaaaatttgtttcatttataacattttattcaaacaattgtcaattttttgaaacttggtatgcaaatagagaattttaagggctttcgaatgataccaagaatgtttaatttggtcgactttgacaaaagttatgacgaattttttgtcgaaaaatttgagtttgattctgcatcaaatattattttctgctgttaagaatgtggtgggatcacaaaagacatttaaagctcagtgatctcgcggatatgctgaaagaatggcttcaattttaccgtaacttagtcttggtacataattggaagtttttcagctccgctgccacaattactctcggtgaatgaaaaacattttaaatttatttttaaatttaaatttgatttttgacaggtgttactccgacctttgtcagatcggccagggccgaaaagggtttccggcacaaaattgtgccggcattatttgatgcagaaattttccatgttcacatgcttttgtgagtaatgcgccgacaaattcaatgagtcgagagcaatatgattagggataggatttttttcgtttttacaattgagtcattggatttcgaaattctttgttggatcaatttataaaaataattttattagcaaaaaaacgagcaatttttaatttttaccatcgaacacctcgaaatgtatttaatttgcaattttgcgggcgaaaaaaaaataaagaatgtgagatgatgatatttcttgaatttttatcataaacacatacttgattttccaattttgaatacatattttggcattttttgagcttttgccaaatattttagcatttttttagcacataaaaatcccatccctaattatgatattttctcacttttcangtaatttttttttttttggaattttttgaatgattttttaatttattattaagggatcgatttttaggcacaaaaaatcgcgaaataggcattanataggcacaaaaatcatcaaataggcactaaataggcaaaaaaaaagttttt

SEQ ID NO: 5568 - DNA, 1887 bp, Heterodera glycines
cagcagtagcagataacgatatttcaccatttatttgggcttcttctttcccttttggtaataggtaaataaaattggctttttctaattccaaacaaaaaaagacccaaaggtcatttaaattaatttttatttaaaaaaaggaaaataaattaattgcaaattttctactttaattcgcattaattttaaagcacagggaatgaatgaatgggtgccaatttggcaattggtcgttctcagcctggcccaggtattctgtccaccgcgtgtttcagtttcatgtacatttgactcaccgggttctgccgaattgcttaaattggaagtgtaactcattaatggtcatttggtcatttcttgccatggtcggcccggtcaatggtttttgtgagaaggacgagaattatggcaatcagaaccatgatgatcaaaatgaagatgcaagtaaacacagtgaaagagaactgcagccacaccaaagtgcggtacagccgagtccgtctccgattcagccgcagcatttcctcctgctgctgctgatcacttttctgaagctgccgattagtgcttttgcctctctgcacttcctctcttcccctctttctctctctcttccccccccctctcccactcactctttcttttcctctccctcttccccgcactctttctttaatgctctgcttacctgcctctgatcactctcttctccatccccactttctccttcatcgtctgctgttttgtcctccaaattggccctttctttttctttctcgttttcccttttcttttgtatttccatcggataaagaaacatttctgaagccgaatttggcaagtaataagctttgcttgatctgctgctgtaatttgttttttcatttgagaaggatggcgaaggcgcggcggaaggcgacgaattgcgaatttccgccgcagggggaggggacggagagggggcgaagggcgacggggggtgccaattggtgtccatttgacgccggcgaggagacaacgaatggtcaacgaaaaatgatcgacatttgaagaagcaaaaaaagggggtgggggggtaattattattaaaattaaaaattaattaaaataatagagaaaaatttgagagagtgcaaataataggtcatgtgatggcgaagtgttggtttgtgaggacagtcgattggctgtggcgaaaaggcggccgactaaggccaaaggatggcagccgacacaattcattgatcagtgatcaatgaacagattttttattgtgcccattttgcattgatttcaagctttaatacatttttatgtggcgttcacctgactgggcaattaattgatgaattgcattgaacaaataaaaggaaccttcgaattatatcgattaaaaagggaagggaaaggcccgcgggggggatgctctgctgctgatggtggtggtggtgatgtgatgggatgggatgaaaaagggggaaacgccggggagaataattagggggacgtgtgattgggaaggacgactttttaggttttgagccaccgatgatgggcggcgaccaactcacaacacacggaccgttcgatacaacaagctcacatttttttatacaatagtaataacaacaaattacaaatatacagaaaaagacaattgaacaaacaatcatgacgatttgattggatattgtcaaagtgaattggcaagtccccattgcattcccgtcacggcaaccgagagcccgggaaaattaggactggtaaaaatgaaattctgaacaacagttcccaaattgttagacaacatgaatatggaaatgcttctaaaatggcggagttttatgaatcataaatgcaaaatatataattataaatccattt

SEQ ID NO: 5569 - DNA, 5109 bp, Heterodera glycines
tcccactcactttcttttcctctccctcttccccgcactctttctttaatgctctgcttacctgcctctgatcactctcttctccatccccactttctccttcatcgtctgctgttttgtcctccaaattggccctttctttttctttctcgttttcccttttcttttgtatttccatcggataaagaaacatttctgcagccgaatttggcaagtaataagctttgcttgatctgctgctgtaatttgttttttcatttgagaaggatggcgaaggcgcggcggaaggcgacgaattgcgaagttccgccgcagggggaggggacggagagggggcgaagggcggcggggggtgccaattggtgtccatttgacgccggcgaggagacaacgaatggtcagcgaaaaatgatcgacatttgaagaagcaaaaaaagggggtgggggggtaattattattaaaattaaaaatgaattaaaataatagagaaaaatttgagagagtgcaaataataggtcatgtgatggcgaagtgttggtttgtgaggacagtcgattggctgtggcgaaaaggcggccgactaaggccaaaggatggcagccgacacaattcattgatcagtgatcaatgaacagattttttattgtgcccattttgcattgatttcaagctttaaatacatttttatgtggcgttcatctgactgggcaattaattgatgaattgcattgaacaaataaaaggaaccttcgaattatatcgattaaaaagggaagggaaaggcccgcggggggggatgctctgctgctgatggtggtggtggtgatgtgatgggatgggatgaaaaagggggaaacgccggggagaataattagggggacgtgtgattgggaaggacgactttttaggttttgagccaccgatgatgggcggcgaccaactcacaacacacggaccgttccccgccccttcccccccccccgcccaattcggcaccgctttatctcctccccttccaaagtttcatttttatttttccatttgtttacagacaactataactatgtacacatacaaataacatatttggcttctgagggtagttgaaatgcttctcacttcgctttcgtcccttttttctacgctttttctcatttcctaattagattctcacatcgcaatatctgagtgcttcggccgtcggtggtctgatgccttcgctttcgattacgtttagtgtccgcgtctccaccgccactgtccgtgcgaatcccttccgcgtgccgacgtcccttcgccgcctttgcctttttttcggcccctcagtgtccgtctcatcaaatccgaacagcgaaatgtttctgcccacaaaatgcgacgtcccttcgtcccccgccgaggccatcggccgtttcgagtcgcattttgggggctgtcaaagcgcaaaaagtgacgcttaaaagggccaattcttacgatcatttgggcacattcgtccgaactgctcaaatcgcagagggaaatcaaacagcggaagaccaatttgtcatcgtcagggaatttgaaggcggccattccctttaatcattgggtaatgaattctcgaagaacggaaaaatgcactaatgaattgggcatttacctgggagacaaaaatgttttgagtttcgtgtttggcgccactttcgttgccttccttcagaagcatttgcgaatagtcgggcgtttcaatgaaatgggggtcgatttcgcatctaaaaatgcctttccgtttattcagtcaatcctttagctcttactcacccattctcgtccaaaatctgcacattgttccgttcggaagttgcgtaacagtcgtgcaccaaaaagcgatgttcgtcccctaaaaggcggtagttttttttggcattcgatggggtcatttcgtcccaatggcacctgtctcgcattcccacttgtggaacagactttcgcccactttcgcatccaacgcaatgcaattgtcggggccgaatcggtgcaagcgataggagcaacgcgaagtgaccagagaccgctgagaggtcagttccaattctctttcggagaccggctggtggtgcacgcaggacacgtccaaaccctggggaagggggggggggggcaatcggagtgatcgccattccgttagcatgggaaaggcacctgatcagcccttgtcacaatgatcggatggaattgcaaaatgaccgtcacattgaacacgtagcccgactcagccgaattctgaacacggagcaagcgcatttaaatgggctaagaattgcaaaaaacaaaaacagacccgaatcggtgtcttctgaacaccgcactgaccaactcggaaagtcagagaattctcgcggttggcaccatttgagcgcaaaacgcactgagggtcatcgtggaagcgttgcgcgtatatctgtggggaggggagaggaaggggagttagtgggtgccaatccacagagatttggggagattagactgatttggaggggagcaattcatctcccccgtgaaaaaaacagaaaattgtttaattaattttctaactttcctataagcgtttctaattaaaaaattaatattttttcaaaataatatcccataaaaaactttactgaccattccctgcattggcttcgtggttctgaccgtcaaagtcaccgagtcgggtccgcaagtgatgtcagtggcgccgcggatgcgaggcgctgagaaatgggaattgaaaatgctttaatgggttgactcggagaatggccgagattaagcaattaaaatggggaaatgtgtcctttcgccactcactggcattcactcccaattcgaagccatcgcagccaaagccgacaaacttcaggaagctcttctcaaattcttgcaagttcttctgcgtgaagacgtgctcctttcgtccggcaatggccaacaattcgcgctcattcgaatttgtcggatggttcagcgaaacggccattgtttcgactccgatcgatcggagcatttcagcgacattttccacgggttccgaaatacgtccgtccgaaaaaagcactaccaatttggtcgcatttggtctcttcgctagtaataaactggtcatttatttcgcttttcaacggatgaattacgtaaactgttctgaattgggtcgttgaacaaacgcagcgcagatgccaatgccaaatgagccgaagttgtgcctttgatgggccgcaaggtgtttaagtagcgaatcacttccgaattgttgcccacttttgggtcgttgaacccgaaatgcttaaggttggcttatactccggggttgactcaacaactgcaaaatgccactcacaacaaatgcttgtcctgaaaaggttatcagtgccaatctgacagcctcggcatggacgtggacgttggagatgatccgattgatgatgaactgcacctgctcctggaacacctggttgatggactcgctggagtcgacgagcagtgccaaatcgagcggctgaatgggcggccaattaattattattattttaactgtgtcgaatggcatttacgctgttaccttatcggaccccttcacacacactggtcgctgttcacagaccttatctggccaaatggtggttagtcatcgccccaaaaaaggcccacctcaacgccgtgccacggggcgaacattggctcaattttatccaagtttttattcgtaatgattttcgattcgttctgaaaggtaaagttgacattgcgacacttcccaatggcactttacttttgttattttcatcagttcagccaatgccacatattctcccgtacctaaagtaattaatttttaaaacatttaaaataatttcgaattttaaaaaggcgtaaagcaaaaaaaaaaaagaaggagcttttagtagcaaaagtttcgcataaaagaatgacaacaacaatttgtcagcagaattggctcaccatacgcccaaatgtccgaatttgacactttcttccgcaatttttcggccatttcactgtccgtgggaaagtcatgagttcgaccatcggaaagtaaaaagacaattttgggcaccgccgatggtctgatgccatggctggcattttccagcgccgaaatggcaaattcaaaggcgccgccgactcgagtgatcttaaaaaagcgcaaccgtagaataaaaatgctatgattgttgttctcgaggccaatgttctcgagctcgtgaccgtgcgtaaatccccccttccacaggcaaatggattatcacggttcggtggactgtgccccatggcatgcccccccggcatttaccccagaaacatgtcgaagaacatcaagggcactgagtagctcgtccctgtgcgtgaacttgttgaagtcgaactccaaatgctgtacaccactgaaacagcaccgaactgtggtcagtttgacaggcaaaagcctttgcttgcctgaactgaatgagcatcacgcgagttgccgtgtccccaatggtcacgtggcgaacgatgcgtcggatgacgtcaatctcatcttggaattgatttctcagtgagccagaagagtcgagaataaagaccaggtcgaggggagctgctctgatcagacaacgagctgaaccgaaacaatggaaatggcacttcgaaggcaatgaatggcacttacgcttaacgtccatcggactatgaacaatctccggaggggctaatccgttgctaatcactcttatggcatcggtcagttgccaatggaccaaaacactcagtaagaaaaacgcaatctctccgacattcatttccacactgttaggtgaaggaaaagtgactttgtaaggcaattaaaggaaaatcgaagaaatttgtgcaagaaaagggaagaaatatttttggtgatcggagaaacgaaaagtgatttttccataaaaattttccaccataaaaacgggtcagtggtgctaagagtcagtccattgaaacagttaaaacgcgcatggaatttggaagtcctcattcgccatcgagaaatgacaattgttttgacccaaagaccgacctttgcccatcgaatgatccatcaa

SEQ ID NO: 5570 - DNA, 420 bp, Heterodera glycines
  unsure (1)..(420): unsure at all n locations
tactgtttgctcgaattcgagtccggggttctacataggtcgaaattgatgccanattcggattctcctacccttaaaacccctaatacaatcttttctcgaaaaaaatttcaaaaattttattttttgaaaaagggggactaccatcggtactattaccgttaattttaggttcctttttttggtcgttttcaaaagaaaattttttttcaaaattattaagagtagaatttttgaattgtttccattgatctagatgcaattttgacacatacggattacggactaaaaacccaaactccgtaaaatacggattaagatttttttttcttttccgataaagattagggggcggggtaaacttaaaaggtgctgctataaattcggtgtttccttcaattcattttttttcttttttag

SEQ ID NO: 5571 - DNA, 4350 bp, Heterodera glycines
  unsure (1)..(4350): unsure at all n locations
taatttcacatctttacgttgccctcccctcacactngctcatttgtgtatttgacaccgtttcttttatctnttcgttaanaattaaaaagattgtctggaatttgtcttgcgccaaaccgctgtgccattcatttatgtaatttgacaccagtctgataataatttcgccaaaatttatttattatttgtccatttattacgaattattttgcatctatcactccaaattttgttaaaaaaaaaaatttttttattgtcccaattttgaccattttgtgttttttcaacaaaataaatatttgttcaaatttaaagaattaatttttaaaattttagacacaaaaacaaatcatgagccaaaaccgtgacgaaaactcgcagccacctgtactcgatggaccgtacccgctggcacaagagcgcaatgagtttgtggaagatgaagcaccggtgctgcttgagatgttggatcgtctgtcacaaggagtgggttttgttttgaattatttaaatttttttaatttttccattttggcttatgctaattgttgattttgtttagggaatttgccaagccatgggcctgttttcgtttgcacttgccgactgtttggccacatttcatacatttgccatactgttcgactgtgagacacctgtgccatttgacgagcagcacaagcgatacgtgttcgaacacagggacaaaccgcggctaatctacgtttcggaagatggtagcgctatacaggttgacggtgtggtgaagcaaggggaatttgtgatgagcatcgagacgatgtatctcgataagcgaaacggagttgatcacttttgcacattcctgcgcacttttggcatttgtttcttgatgtgccattgaatgtgtttatttgttgcctattcagagcagtaaattgtttgcataattctgtttaattattttttgtttacaaccaaaatattgatccgcatttttatgttataattttaattcatttttgaaatttttatttaaatggcaaacgaagacttccgcttgtccgaatgcatccgttttattgagcgaactgcccaagagtatgattgtgttctgccggttccacggcttgggtttgtcacggaaaattttcttaataattttttttttaaatagctcaaggcgcgatgagcacctggatgcctgtgttcttatggaatcagtgggctcaggccatcggctctacattttcgagtttgaggattgcctccaggtatttttaaaatatgaggtcaattaattaaataaataaataaaacaaaaccccacaggtgaaaggacacatcgaaaacgaagacggaacaagtacacgcgtgatgattgagcactatgataaatacaatgggttatgtggatttgaatcgtttttggcgtcatgtgcttttaccttctttggattttttgttcccgtttcctatgaagatgatgattgatttaattttaaaataatttttattgtatattgtgtttcacaaattcataaacaaattcatccgaattacttggccttttcaaaaattgcataataaactcaaaatcaaatcctaaggacataaaataaataaaaactaaaacataatgaccacaaacattagagaaaatcgattgaaattttcttcgattaaaataaattttccgaaaattatttgccaaatattttttgatcagatcgtttggcatctcgccataggagtcaaaaaagtaggccacccccggcgaacgcgcccatattgcgcaccaatgggttcccggcattcccgacgggtcctgaagtggcaaaatttattttattgaaaatattttggcactcaccaaattgacaattagactgcagggaaatttcgtgcactttggcaatcggtcggccggaaaagtgccaacaaaatattttctcgtcgcccggttctcaaagagagctctgtcgatgaaccgattgtccattcctgcgacgaatccgcctctccctcaaaaacaggtaaaatcccgcagccgcagtacctgctgcaccaaacaggtagatgaggcagagaaaaaagttgattggcgacttctcgatcacatccggaaaacacagtacaatcccttcgtgtgcagcattggaggaggaggcatttgaacaaaatcggaggaataattctcaccattcatactgtaaggtcactagtgattgatctgttccggtcaatcagaatgagcccgtcagcctcggcataggctattaaagtgaccccctcgttcggaaccgcttcggcaaaccgaatgttcaccgctgtacagccctccttgatcagctcaaagcccggcgagtcctcctgcgcattggtcatttggaagacatagaggcagtaggcagtcttgaacatgctgtagctgatcccgttgctctcagttgtacaggccatgccaaggtgctcctgggtgtcatggtacgcccttgcgtacctgttgttcttgtagtccaagttgtacggaaactgtgggtatgtcctgccagaggcggtcagttcaatatcccgcacctgaacattttttctgccagaaatacatgtcaaagcggcacttacgttgtggtggttgaagtaaaaggggttcttctgattgtgcccaatgtaattttggttgggcaccagcccaatgatgaccctccgtggcacttcctcggtgaacagattggcagaaaaatcgtatcgtccaccggtgatgaacagcgacttcatcagcgtttttcggatgccgtatctggcgggctccaggtccaacttctttgcaatgtcaaggctgagaccgtccatcagatcaaccgtcttcactatcagcctgcagtcgacaatctcaagcgtgtacttgtccctatttgcggcttcctgatgtatcataaaatcgtccgactgcagggcgagctcaatgtcaatctcaacattgctgatcatgtacaagtcctggttgaatatgtcggcgctcagcttgcttatcgcttgaaagcccttgctctcctccaccgcctttttccttcgatcgtttactttggtcgggtcactgtcacggaaatagcctgccacgccaaagtatgatcctttgccgttacagggtagctgagctcagtgtccaggaacaccttgtagctgtacagctggtttgagtcgtacacctcccgctggttgatgtgcactttcaggttccggatgaacgttgcgccgggcatttggataaggccgaccgctgcgtttgccggcacatcaaccacaaccccatcatctgccacttttttgagcttgaactctgtgcacacaaacaccttgctaaggtctacatagctggtgattgggtggatctgaaccaacggatttgtctgctattgtatgtgaaaaccacctgccttaaaatgaaagggcctagagcttattgggttcagcgtcaggtactccctgtagctggagttggacacagcgcagctcgttgggggtatggtgaagaagtccagccccgcatttgccacctcagcacttgacgcatccacttttttatacaacattttgctaataataaccgagtgagtcaaatcttttcttctttaacagagctttttggggaacagtttgtccaacaacgtctgagggtttcaaaatgatttcagcttttttcccgcctcctcttctcttccttcttccgcgccccttttgtagtgatgaagaggccttgtccagcaatttttgcgctccctcttttccttccgacaccagcgcgtctttgatgttgccaccctttgacacctcgtttaggaatcgtgcacccgtctcgaggccctctttgccaatctcggcagcaatgtttgccgcatagggtcgtgccgcagtgaccattggacgaaggtagagccacaggttgcgcagcacagagccaactcctgctcccttctgtcgggggacacccaagaaataaccgtatccccgctgaaacgttggtgccccctcaaagacgctgatcggtccaccgcctccactttgcggataaattttctcgagccgtaaatttgagccgtcaaaaatcacgcgaaccatctctctcagaacgttaacacctttttaaactgaagagtcaaaacaacttggccaaactcaaatggcacctcccttaaataagtgattagaaataattgccctgctgaagagcctaacctcccggtcagagtgcgaatctcaacgtcaagcacatccacctcccttgctatgattttgtgaacccacggcgcctgggagtccttctctaccacactacccgactttccctcaacggcaatcacttggagc

SEQ ID NO: 5572 - DNA, 1271 bp, Heterodera glycines
aaattttcataatcttccatttctggaattttttcatccattttaatgtttttacatttactttttgtgcatgagcccattgttggatagcgtctttttgaaataacatttattttatatgaccgtaaccattttaaagtttgttggttacagtgtagtcgtaaaaattgtaaaattaattctaatgaacccattatttttcctttatcatcttttaatgctaatgaaactttttgtccagcgggtaatattgttaattcggttgttccactgactctacatacagaaccatttgattgtctttcacagacttcggaagttgactgaattgatattacttcggcaccactgtgcactaaatcaggcattgtcaaacataaaaatagtaatattacaatgcttacaagtctatatagtcttctgttttttcttttttgaattttttctttttctcttttttcaaattcatttaataaacttttctgtatctcatcgttaaattttttgtctaatttttggttcaagacccattttaacgccaaatatggcccataaaaacaaattttaataatccaccatatttttatgataaactttatgataaaacttgcttgcaaataataaaagaaataatacaagttaggccgattcctattaatatgagcgtttcggtcaacatgcattcaggatttgccaatttttctaggcaaaataaacatttaattaatttgcatatttctattggtgggcaaataatttcatttctataagattttcctttctttgtccagtaatttacggtacaatagtgttctgtaatcaatatttctttgcttaattcaaatagataattatttctaaaagtcggtgatcggcaatgacccatacaacaaatttcaaatttatttatttttgtgggtgtatttaattctattccttttgatccgcatttaatttcacaatctttgcattttaatttgactatgctttttgttttgttattttcctttgtgtttgttaatccaaataaatttgaactcattaataatattgtcataagtaatcctatgcctccttttaataaataatttcttgtttttgatcttgttgtcatttgatgtgtatttttcttttgaacttcacaaatttccttttcttttatattttcttcttttttattttcatcataactttttgtttctaaggaattattcacttcaagtgagtatattttgtttattggtctttctattattcttccagtcatttct

SEQ ID NO: 5573 - DNA, 4204 bp, Heterodera glycines
tttttagaaaaatgggaatcgggaagtgaaaacgaggcgttattggaacagaaaatttcggaaatgattgcgcttgattttcaaccattttcagtggtcgaggacgaaggtttcacaaggcttttgaattttcttgcccctggctacaaacaaaagtaagaagcaatttttccgcacaatattatttagctcatattaaggaaacgaaagcatttttccgactcattaattcccaacatttatcaaaaattgtttgcaaaagtcaagtcaaacctagcaaaatcagacaatttttcatttacaatcgacggttggacttcaaggaatgaagcgcagtcattgatttcactaacagttcatttcattgatgaattattcgagccaaaattttatattttggaggcaagggcccgttcatgggcggcacacggccgaaaattacgttgaaattttaaatgtaataaaagattaatattctagaattaaatcaattttttaggattctttggaactctttggcattgagcagcacaaaatccacttatttatgcgcgatgctcaaagtacaatgcaggcaaccacgcgtggtttaaatgttgtcgtgttgcccgaaaatttctgagcgcaccttgtggatcagttgaaagcgaaagattgttttctaaagccgggctcatttgtacggatttgcgaaaccggattaagggagacaatgttaggaaattgatttttttgcagtccaatttatcaattgttgaatttgattattaatttttaatattaattttttaatacataaatacatttatatttagtaattttgatttataactttaaagttaacttatgaaatattttaaaatttctgtaaaatttttcaaaaattccgagttccgacttccgaccttttttgggtcggagttccgacttccgaaaatttttggggcctcggaattccgagttccgacttccgaaaatttttggggcctcggaattcagagttccgacttccgaaaatttttggggcctcggaattccgagttccgacttccgaaaatttttagtgcctcggaactccatccctgctttccatgcattaattttatcaatattcaaattgtcgtcccattttctttcttcttcccatagactttaaaaaataatttttgcaggtaaaaggcatggggctagccatccacatggatcaaaaatagaatttaattccttcagtactaatcttctgcttaatttttcattttcatgcattttaggaaaatttataatatacgtatctcttttaatgcaccaatttatacccagtacttttgggttttcttttaataaacgatctttttcaggtatttgattattcacttcttctgaattggaaataaattctcttatattcatttgtgcattttcgaaaagtatttttaaatttttataatttctgattgcttcagctgaattattacatccaacaaaaatattgtctacaaaagtattttgtttaacttcattagctaattcggatttttcattttctaaatggtgtcttactgttgcacctaataaaaatggagatgatattacaccgaaaggcactcttttgaaccgaaatgcgcaaagattagcttttgttattggtttattaacatctttcaaccacaaatattttacagtatctctgtcattttcttgtaattctaatgtccaaaaagctctttggatatctccccaaagtgcaattttagaaagtcttgatctcattaacagtcctggtaactcaggcatataaatagggcctctaaataataaatcattgaggcattttttgccccgtatttttgacgaagcatcatagactactcttggcttctttccggctaccaatacacaatggtgcggcaaaaaatgttcatcatatcctttaatttcgctttcttcaacaattccttcttttaattgttctttaaaaatttcattgtactgtttaaggtgctcttcggatttctttaatttttcaataatgcttatcatcctacgataagctaatgtaaaatttgtaggtaattcctcttttgggcctttccatggccaacttactacgtatcgcccgtcttttctgtaaattgtgtctttaaacatttttaatgctacttcatcatctttttccattgggttatcttttataccaattgtttctaaatcccaaattttttcggattcattttcagtgcattctaatcccattgaagtgagagcacataatttgtcatttccattaatttcaccacatattattgggccaaaaactgtatgtactttaaataaaccttctttaaatggttcaacttttttaaagaatctccaaaattctcgcattccaattaaaatgtctggcttttcttcaattatttctatttttccgagaaattatatttgctcttttaatcttttttgttattagatcgattcgattgacaattatttcttccaaacctccatctgttgtttcgagttttattaaatattttggagaattcaaatgtgttggtttactttttcgaactgacaataattctaattctccttcgcttatctttggtggtttcaatttcataactatttattcttttagacatcagtaaaacttctttttcttccaatgtattttttattgcagtagctgctaaatttgaccttggattttgcttctgattagttctattaaagggcaatcggatttctgttcggtttgcacctgttccttgaaattctctcatgcatattaatttattgtggtctccattgcagttaaaacacatttttcctgtgcaatttattttttcatgtccttttttgagacatcgatgacatctgctttgttcgtttattattttcaatcggttttcttgaccaattatttgtctacattttgatggccaatgctctccgccacataaaaaacattttggattaattataggtggacgtgagttttgtttattatttgaatcttgcgtaaaaaagactctttgtgggtttctttcatcgtttcggttatttctcggctggttattttgccatttattattttgattaccaaactgtataaattgcttttgattattattccaattttctctttgtgttcctgctgttttattcatccttgtgcataaataaattataattccaaaaaaatattaattttaaaattatattatatcattatacttagaaattaatgactggagtacaatatcattaaatcatattttgttataaaatattaaaaaaatgcttcgaatacatatttaaatacctaagataatttataataattcacaaactaaataatcaaaatgtgaataagcacaaataaaaatctttttatacattataaaaaatacaaataaaattttaaaaatttttggaggatttatttggtcgccatgctggcggcaccgctgggggcttgaaccttatgcggacttcttacaggagctgttggcgcaggagtggtgattgccacgggaaaagaaaaatacatataaaaaatttcaactgaatatggaggactttttatatatagtaaaaaaatgaaaactaattaaaatataagaattaaaataaaggaaaataaatctatataaaatactttaatttaagaaaattaaagccttttcaacaatgttaaggcaaaaataaacaaattaaattttaaaattatggtggaatttagatgcaaaatccgtaaaaataaattattacaaatacatattaaaacgagaacttccgaaatcgagagtagtagatttcatggcgtcaactatagatgccaagattaaaaagaaaaaatagaaaacgtttattagaaatgtagagaaaaatatacattcaaaaaatataacaaagtagcgaggactttttttgttactcgtctaaatcatttttattttgagaaaaattaattttactcgcaagcactgccggtgcatttttgcgattactattagattatcgtatagtaaaaatgcaatgtaaataaagtaagaccaaagcaatagtaaactttatgagattaatttaaaagaataattaattaccagcacgcttaataacacaataattcgaatattttttataaaatttttataagccgcgtttttcattttgtagatgattaataattttatat

SEQ ID NO: 5574 - DNA, 1622 bp, Heterodera glycines
aatagcagcttcattgccctgcggtaatttcaataattcattctgtagtgcttcttttatgactttttcattaccgtaaagtcgctttagtgcatttattactaaattataatttctgctgttggttgataccctctcattgctcgggctgctttgccttttaggcttaacaataaataagtacatttttgtgcttcgggaatcggtttatcgcccatattggcatgaaatgcttgccaaaaaactggccaagacattgtgtctccataaaaatttggccatgggagtttcggataatatactggaggagcctcaactctttctctatttacaattctttgttcattcctttcattttcattttgatttattcattgttggttgccttgcgcacctaattcaaatgataatgtgtccgaaccatcatctgcttcatttactaaaattatttctatttcatcaattgcttctcttgcatcttctaaccattcagttacatggcgctgatttgcgttcatatttacaaaaagtgcttcttctgctgctcgttcatcaacttcaatttctgtcatatatgtgcgccattgttcaattctttcatcaatgaacgtcactgatctttttatttttaccaacgaatttcttaataaatcaatcccctcagggtctctttgttgcgcatcaattactggtctaatttctaccagtctttcagttaattttcttaaagacggatttatccgcattctaataggacctgacatgtttggtcgtggcaccactttattgactctcttttcagatagtcaataagaattaatttaaatatttattttatttaaattaaattaattttattggatttcccaatacttcaattatatttcacactttattagtgaattttgatcgaacaaatatatttattaatgaacgatttgaacgataaaaaaatggtgattttacaatggtttaaatacggcaattttacataggcgggctgacagaaatttaaatgtaaacaatgctgactaataaaaaggcttaaaatcacaaaggttatgaatttggcgtaaaattattttaaacagatgaatcataaaattttaaattttcgtcgctaaggatgaaattagcgacaattttatttataaactttaatttgtaagttagtcaatttgatttcctttgactttgtttttatttcaaaaacttcattattagtatctatgcatgatattgaatcattgtttatcaatcaatggtactatttaacaaattagacttacggatgaagaaattctttcggtccgcgctttaatatcatcgcattcaggcattaaatataaataataaaatgaatttcaaactaagttatataatatttttcttaagccttcttggctcgtcaataattttaaaataatttggacaattctctaatttttagcagtttttggtgtgtccgatgctggtcgtcgaaccctacagtacttgtctgaacattatgcaaatctgttgatgcattatttgtgcaccgactgcagcaacatggtcggcacttagtcatgccgaattggtccatctgtggccaaatcgtgtttttctatgcggaactgctt

SEQ ID NO: 5575 - DNA, 5023 bp, Heterodera glycines
  unsure (1)..(5023): unsure at all n locations
aaagaaagatgcactctctgcggatgattaccctcgtggtaattcgatgttccaaaaaatgacttttggtcgaaaccattgctcgtttttcattctctctggcaatttttcgatttccgtcggatggatgggaatgaacttttcaaagcggtgcgaaagccttcgatttgaggaaagcaattttgagaaatctgtgcgaattgtttattcaaagcaaagtttaaatattattcaccgaggaactcattttgacgaaacgaaatgaaacggaatttgcaaattggtgccaactctcaaaagaatcttcaagctgaaacaaaagttcaaaataaataataagcgaatgaattatcaattgaccatcccattttcgtccccgtaacaactgaggaaggaaaacaatgtgatcaaagggggcgaatgttgccacaatgtttcggtgtcaatcgtcacgtcgtacagagcggtgagaagtgcggtaattgccaaagtgacagtctgtccaattaaagacaatggccaaattatgtgtttttggcccattaaatcgtttgcagtttcggtttaccaaagaaagcaacgcgtcgcttctcagttgtaagtggaaaaatgtttggcaatcgctcgccttgcgcagactttggacgagcgcgaggaattggccggaggagagggagcacgtcaaattgtgaagagcgtccagcgtcgagtggacggcggcacgggcactctgttcgcattctgccaaattctgcgagcggtcgttggccgtcgcaattcgttcgacggcgaccattttggagctgagcgactcgaactgcgcgttgagattgtccatttgattgcgcaacgaatccttcgggacggagtcggctcctttgtgctgtaattgggcgagtccaccctcacagagagaatcgaccaaattgaaaatgttggggaaggcattgacgaaatcgattatttgttcatgcatcttaaaatatgagaatgcaagtgattctctattgttggaatgccattattacctgctgtatttcctgaaatattccattgccaatttcgtccgtttttccgtcccccgaaatgcgccatttaatgtcaatgtttctgcttaattcaccaatttttcgtttcatcgccaacaaaatttgtcgtcgcgagtaaaataaattttcatttgaatggtccaaagcgattgatcccaaagcggcggaaaatttactgctttaatggataaaagtaattttttttaaatgagagtaaattgaaccgaccgaattctgaaaagtccgccggatgaaaagcgcaaaggcaaagcggcaattgcgccgatggtgagaaaagcagtggcgggtcggtcgtcgataaggaaagtctgcacgtggagattggtgggcacgaacagaaaggagacacggtatttttcacaggatggccaaaaaaggaaacttttgactttatagaaatttttgcgaaaattctgagggaaattctgtcgaaattggaccgacaaccgctaaaatttaaaatgggacaacgaaaacacctgaaggaaggacccgcgtaagagccgagaaattcgttcgcttgagtgcaaatcttaaaaagagcacaccgtacggaaaagcagacgaaggccagacgaccaacttcaatgttcgagttgaggtgacgaattgcgttgtgcaaagtctccaaaatggcggcattctttacgccccaaagtttgtccaataattcgtcgcgtaattccgtcgcccatttatgcgaaagtcgaaggatttctcgcggcacgaccatggacaatttgctctcgtacatcacttcttggcatttgatttgacgagagggaaaattgtgagactgaatcaaaaaggggaattcaaagatatttaaaaaaaagccacctgagacaaagaaaagaattgttcacgactgaaaggggcggtgagaaagtaggcgaaattgttgaccatttgttggcttagagacgaagcgggcaaaggctgagtgaagcgattgtaaaggacctattcaagggacaatcgacagaaattggcgtaataaagggcgaatgtgttcattaaacctggtcgtattcggcttggactatacgatgagagcaagtcataagctgaatttacaaaattcttcaacaaaaattaaccaatgataaaaaggaccttaactacccactggtcacattgtttctccgactgaaattccaagtgcaattctttgttgctttgccgaatggccaaagaatttttgttttgttccgaacgttggacgtttattttttcacatacaatcagaaaaggttcagaagcaaaatccaatggcttaaaaccgagcagattccctcgcaatttgacctggaattaatttctttaaaataaataagtaattgaaattaggcaattaattttaatcacttggcaaagtttggaatgcaaatgttcgcttgtaactttcactttttcactgctgcaatccaattttgtcgaatctttgtagagccattttattatgtctccggcattatcttcttccatgctaacatagattttttacaaaataaaaaaccttaaaaattaatttaggtatttaaattttcaatgaaaatagggatttttttctcttccatattaatttttttttttaatttagcatttttttagttgcccgagcatttttgcctgcatgtccttgcgcaatgttcgaatatatcggaaaattctcggaaatggcacatccagcactttggtggattcttccgccaatgagggctttttgctgctgcaatgtggtggcatgttaaccatcggcaaagatgtgggcaactcgcttaaacagcaatacaccaaagtctcagacggatacgcacttttgggcatccacaaaatatccaaaggcatttttaactgctaacagttgcccaattagacaaacacataaaagaacgctgtttagatgaacattttctggttgtggtgaagtccgttttgtcggttggccaactcttcaattgcgatttggtttggcaataattagccctccgttcgacgcttaattaactttaaatagcacaaaataaccaatgtccaatttgtctcgctgaatgttttgtcgaacaccgagcaaattgacgcaagaattgtggaggcatggaatacaaaagcaacattgtttgaactcatttcgactattttcagatgcaaaaatttctttcggcagggattttttactttgctggctcaaacaaagggagtaattacgacctgacgcattcacttcaacgcaggcaaacaattggcgaatttggacagtccgatttccgcttttattggtgttttttaaagttaattttgtataaattcataacttataggaatcggactttgtcttttccttttgaacgctttggagtgtccatcgacgattggctggtcaaatgcatttgtgggtcggtgcttgtgcggacgatttacgtgggtcatcggaccgcaaaagttgctttgatctcccgacttagctgcgactacgtcggcacccgtttcaacgttcgtggaataaatgtgagtttaacatttattacagacttcagttttataattgctttctttattatttttaggatgacggaaatgtggcaaattttgtgaaacggaacaggtctttgcgaactgaagagaatcgcatttaaaataaaaaatgttagcttttnaacgttcgaagaaaaagattgttcatatgtccaagttcggggctcagtgccacttttttgggaacagcccggcatcaatgttggctctcacacaattaaattgaaaccgttggaattttcaatgtttgcaatggaaaggcatggcataaataattcaacgaaccaaaaacaatccaattgttttaggcattattcatttttgaaacaattttacggtgatttattaagtgttaatttgctcggttcaaaaaagggcgaacggagtctgtcaacggcatttcaggcactattatttttttttaattcataaaatgaaatttcttttttcagacagcaataaatttgtcaaaattacattcggatgttcgattcgtttcatttgattaccacgcggaggtgaaacagtccaaagaaaatgcgaagcgattgatcagcgaaattgactcatttattgaccattgcagtttcttcttttctcatgggtaagttaatttcaccataactgcactttggttcacttttcctttgttttcagctcctttcagaagggtgtcatccgtacgaattgtttggactgtctcgaccggactaactgcgtccaaactgttcttttttgttgatttaattggtttatcatttgttttatgaccaattaagttgattgggatgagggcactgctcgcacagctgaacattttgggcgttgagcaattcaaggcgaacattgtcctccgatttgaggaggtcgtcagagatttgtggcaaaaaaatggggacaattgcagcgttatttatgccgggacgggcgcattggagggaaagtcgaaggttgttttgttgttatttggtctaaatgaattaattaaatcatttgctatttcattgaaacagttgaaagatgccagccgttccttcgtccgaaccattcaaaacaatttaatggacacttccaaacaggagtccatcgaccttctgttgttgggctgcctttttggcgacgacaaattcgacaaattgtccaaccttttgcccccttatctgatgaaatgtcagtccattccgttgttcatttgttgattaatttctctcttttcagcttcttcttactttttcggtcagtgtttaaataagataatactattactgtaattgaatcattataaatttcatgctctaaattatggttaagaatgtccgagcatcgaaagttttgttgagcaggagaaggaaatgtgcacgagtaaatcgctgcgagtgtttgttggcacttggaatgtcaatggaggcaaaaac

SEQ ID NO: 5576 - DNA, 1152 bp, Heterodera glycines
  unsure (1)..(1152): unsure at all n locations
atccgaccaaacggacaaattattgtagatatattagccgcaagaaataaaaaaattaaaaagttaagaaatttgtccgaatgcgggttcggattcgaaacatggatgttttgcacaaatccaaccattttcagtcctaaacagctactcacgcgaaaacgtccccacgcgaaaacggccacgcgaaaacgaccccgaccgaattttttttttcttaatcgaattaattcaagtattcgcttcaacaaaaactataaaccaaaacagttattcaaaattttcattttttattttcaaatccaaaaataagcacaaaataagcatgtaatgctgaaataagcacaaatcttagaaataagcagacttggccactctggaataataccaagttacaaggtcaggaccagtcagttgatggacaactcagctttgcgacaattaacaaaaaaatataaaaattgaaaaataattaaataaataaaataacaaaataaaaataaagaaagtttttttgagaaaattttcgtttctttaggggaccaaagaactaaatgaagcgaaattataaattaatgttttcacaaaaagcttctaatttactaaaataacaatatttgataaaacaaaataaaatattctgtaattctttatattttataaataaatttggatatttttcaaaaaagaaacattttaattaatttataattccttttgttcatgccaaaactgcaagaatttaattaattattttaaaattctttgacttttgttaattagtagatcataaaaaacatatgtaagcaactaaactctataaatagttcaacactccctctcatatttattctccagtaaaatgggcacgttcattaaaaactgcaaatattcaaatttaataagggatttagtcacataatagaaaaataaaatataacaaaaaataaaatatattttatttaattttaattttaaaaataaacaaaagcgcataaaaacttagaaaatttgtgcaaagtcatcgctaatcatttcgatattctccaaaatgctaatataagaataattcccattaccantttaagatcgcagccatttatttttgttgcaactaaaaaattcacataaaagttgccatttttgatcaaacct

SEQ ID NO: 5577 - DNA, 2689 bp, Heterodera glycines
  unsure (1)..(2689): unsure at all n locations
ttaagttttaatttatnttcaattagggctccaatccttttggacgacaccacggtcaattggccctcagattattcgtccatttttgagggggcccatccgaaatttttgcgcttcggccgtgccagtccgagtttgtacgacatttttgggttggaggcgcaccttcggccgccgcgtggtgacgaaaaagacaaattcggtgaccaataaataaattgaaaataaagtgaataaaaaaataataattataatttagttggcaattacgaacgatgaaaaggaagcgacgaaaatgaagaaaagaaaggaagaagataaaatgaagagaaaatttaaatttttattcattaattaattaaataaaaaattattcattcgttttattactataattttaattacttaattttaatttgtgcaactgaacaattgataagaatccaaacataaaaatggttatattttcattcaaagaatgggacaaaaccaatggaatttaatacaattaaaaggtaacaccaaaagtcaaaaataacccattaattttagtcaattaattgaataattaaaccgaaaaaatgctaaatccattaattttgacaattattattatcttaacaacaaatgcaaaagaaattgtgtcacaattatgcacaaagctaacgtcggcgagtgcggacgaaatcgaagcgttgccgggcctcggaacggcgcccaactttaagcattattctggtgatacgaagagcaataatggccgagaaaagccctaaagtcctattgtgtggccaaaaatccaattctgagttcaaaatgacgagagctttttcatttcaaatgatcagagtccaaagcccaagagccaattcccgagaatttgatcccgaaaaccctgtcttttattctcgcgattccaacacttaatcaccccacaaaggctacctgaaatcggcggacaaacactttctgcactattggttcgtcacctcgcagaatgacccgtgtcgggaccctctggtcggtcggattaggtcaaaatcggctttagcccaaaactgctcacaggtcttttggttcaacgggggccccggctgctcctcgttgggcggcctcctggaggagttgggcccttacctggtcaactcggacggacggacgctgcgcttaaacccgcactcgtggaacaaaaacgcatcggtgggccaaattcagcttggaaattttcaagagtttggccaaggtggtgttcatcgagtcgccggtcggagtcggcttctcctactcggctgacgaagaacgcgtaatgtcgggcgatgagtcggtcagtcgaaggaattcacggaaaaatattaattagcaatttatgaggcacttgcctaattgcctaattatcaaaaacatttgcttttgagaccgcccaaggcaattacgaggcggtgaagcagttcttcctcaaattcccgctgttccgtaccaatcgcgtgtttataacgggcgaatcctacgccggaatttacgtgcccacgctggttgccaaaattgtggacggacaagccgacttccccatcaatttggaggtgattggaaattgaaaaaaaaacaattacttcggcaattaaagggaatggcaattggaaatggctttatgaacgaagcaattgacactgatactttggcacgattcgcttattttcatggatttgttggagagactgaatggaatgcaattgaaaagcactgctgcggaggatgcgcaggcatttcgaaatattttttattgtcaatgatcgtttgcgattaagacaattgtaatttgggcgaacaattcggagaatgtcgcgcaatggttcagtaattatggcaaaatatgcatcgctttttccttcgcaggtgcgcgacataatattgttctgctggacgggagggattaacgtttacgacatttaccgcgactgctgtgaatttgctaattaattttttaaaattttaaacccattaatttccattagttccgcagcacagtaaaatggccgcaattcgacggggaattctccgtgcaaaagcatttcattcaaacgacacgaatctttgggaggtaatttcctaactaattgtaggtttaattcgcttattaaaacagccattggaggagattaatttccgcggaggtgccccgtgtttggacggtaaaaattaacggcgattattactaattagagataattagaccacgcgataaccaactacctgaacactccacgaggtaagttcactttaactgctactgtcggaaaaggtaacaaattttagtgcgtgaaacgcttcacattccgccgaatgtcccaaattgggaaagttgcaagtaaaaaatgagtggacataaaccaaagtttcagcaatcatttttatttagcgattgggttggcatactgtacacgacagaatactgtaattatattgattagtgatcagagtttaaatgctcttttaattttagccgacatgtcgccttttgtgaggaaggcgatcaatgccaatttgcgggtgctgctttactccggagacactgacatggcctgcaactttctgtcgggccaacacttttcagcgcaactggggccttgcggttgccnaatggttttttttggcattttnaaatcattttttanatttaacagacaatcgc

SEQ ID NO: 5578 - DNA, 1879 bp, Heterodera glycines
  unsure (1)..(1879): unsure at all n locations
agtcgccggtcggagtcggcttctcctactcggctgacgaagacngcgtaatgtcgggcgatgagtcggtcagtcgaaggnaattcacggaaaatnnattaattagcaatttatgaggcactgcctaanttgcctaattatcaaaaacatttgcttttgagaccgcccaaggcaattacgaggcggtgaagcagttcttcctcaaattcccgctgttccgtaccaatcgcgtgtttataacgggcgaatcctacgccggaatttacgtgcccacgctggttgccaaaattgtggacggacaagccgacttccccatcaatttggaggtgattggaaattgaaaaaaaacaattactttggcaattaaagggaatggcaattggcaacggacacatgcatacgtcgatgaattttgatacgatggcacgttttgcctattctcatggcttattggcggagtcatcgtggaaagagttggagaacgaatgctgcaggggatgcgtaggtggaaaaagtgtttcttacaaatggatcaccaaaaaagggagacttcagatacttgcgatttgggtgtactgtacggagaatgccacagaaaggtacggtaaccaccttttgaaatggcaaccaaatgcattaaaggttttgaatatcatgcgttttgtttggcgtggcggactgaacgtttacgacatttatcgcgattgtggtcagtcctcgaatttacccacttcccctcaaaatgaccaagggtcctaatttctggcctttcagaccatcaaccgaactcaaaacgaatgaaagcgattcgaaatggcattttcaaaagtgccaataaaaccgaccggtggaatattattggagaagagctggacgcaaaagcaggcaaagttggcagtctttcaaaatcagataacttaaaggaaaatgaaattgcgcgcgagtcattacgggagattaagccgtgcgcaaacggtgggcaaatggaaaataaataattaaaaaatatgtaaaaaggaaataaaattacaaattaaattattaagacgaagaaagtgcacaatatttgaacactccaaaaggtaaatggggaaaagaagagaaaagttaaacgcataattaagtgcgagaggcattgcatataccagcgaacgtgccgaagtgggaggaatgcaggtgaacttggggggaggtcggcacgaaataaatcaaatgccaaagcacccaaacccggtacattttatttaaacaaaaaatgaattgccctttcttaatgagtcttaattgcctttgtctgtttctggcgcactgtttgctttagaaattactaattcatctctttttaattgtccttttctccagtgaatcggttttctcttcgttcgtccgaaaatacggtttttttttaaaatttatttggcttaattttatttaattgctttcccatcagatgacctttcgccgcttgttttgaaggccattgaggccaaggtgcgcgttttgctttactttggggacacggacatcgtctgcaactttttgcatggacagcgtttcagtgctcagcttggcctttcggtcggtgtctttttgctctttgtgccattttcagtttttcagaccctcgacgagaagaaaccgtggcattttgggggacaaattgctggttttaagacggagtacgcgcgaaggctcactttcctaacgcgtaactttcaaacaaataattttgccatctttcgtcacttttttattcagttcgcggtgttgggcatatggcaagcattctaatattttttttatttcatttttattttacagcatatttttcacttttcttttaaattttcggtcccccatggcgccctgccgaaagtga

SEQ ID NO: 5579 - DNA, 3321 bp, Heterodera glycines
  unsure (1)..(3321): unsure at all n locations
aaaaataaaattatttatcgaattttgnggaatcggaattccgtgctaaataatgtccatatataaataatcaaaatntcaaaggaaattaaaatgttccaaagtgtntaataataaaaaatttgaaataatgataattttattaatgatattgtcataattgaaaaaagtattattaatttagatgtttaaattaaaatttctaatgcaaaaaaggacgaaaaacattttttaaatttttaaaaacttttttttaaatatttttaaaaattttatgtaattcaatttaaaataaagaagaagaaaaatagaagaaaacaaaccctttttaagtgaaattctatttttcattaaaaaccagaaaaaaaattttcaagtaatttcattaaaagagcttttttttattattaaaaaaaaatatttctcaaaattataaagggtagagaaagtgatgaaggttagttgaataattaaatgttcaaaaataaaaatgaaaatttttaatcatttcacaatagaggtaaaaaatcaaatttttaattatacaaataaaaaactctaatgacaaaaaatattcacttttccaatttttattttgcgattttgcacccttttaaaaaattaaaaagtgaattttaaaatgaaagaataattaaatattttcatttaaattatctaatatattaattttgcaatgtgtgtgtgtgtgtcacaaatattttgaattatttattgacacgaaatcttttttaaaaaataaaaaaattattgacaaaactatttcttaagactttcatcatcatcatcacagaatgttgaaatattaaagaaaagaatgttttgcattattttacctgtttatattcatataaatctttcggactcgctaatttttcatttttttagcattgattaattattgtttcatcaatcgttacaaaatgttgaaataataaaataaaataaaataatgtttttgtattgttttatgtacctgtttatttcatactaatctatcacacccgctaatttttcactttttagcattgattaattattttttcattaaccgttactttttgtacctgtttattcatattaatctatcacacccgctaatttttcactttttagcattgattaattattttttcatcaatcgttacaaaatgttgaaataattaaataaaataaaataatgtttttgtattgttttatgtacctgtttatttcatactaatctatcacacccgctaatttttcactttttagcattgattaattattttttcatcaatcgttacaaaatgttgaaataagtaaataaaataatgtttttgtattatacctgtttttttcatattagtctttcgcactcgctaatttttgttctttttagcattgtttaattattttatattttttaatttttaataaactacgttttatatttttaagattatcaattcttatattattcctgcaaaaattatggtacgcaaaaaacaaattttttcgaaagaacgggttgaaagctcccgcgaaaaaagcagatatgacgggttccaagctcccgaaaaaagcggtaataacgggttccaagctcccgataaaagcggaacagacatacaaacacaaacgatgaaaatttttgaaaagaaagactatgatattggaatagaagaaacaatagaaatcataaatatagacgacgatgaactatcagactattcagatatacaatcttctagccaaataaataatacaactcttagaaaaatgaaacagcgaaaaaaaatgaatattgatcaaaaagaaagcgaaaagcaaaaaaatcgcgaaagaatggctttaaatcgtaaattttttctagaagaaagtcaggctgaaaagcaaaaaaaccgtgaaagaatggctttaaaacgaaaaatttttttagaagaaagtcaggcggaaaagcaaaaaaatcgtgaaagaatggcttcaaaacgtaaaaaaggattaaatgaaaaaattgaatcttatatttgtgcagatagtttaagtgttagaaaacacaaacttggaccaatgaacaacgaatgtgtgcattgtcattctttaaatttttcagaagaaatagtcgcaggcaaaaaatcagaatttaaaaattgctgccattatggaaaagtattgatttcagattttcctgaaaaaaattttcctgttggattaaaaaatttatttattcgaaatgatgtaaaatgtcgtatgttttttgaaaatattagatatttaaatagcactttgtcaatggcttcaattaatcctttaagatataaatttaaacataatcgaggaccatattgtttccgaatttctggccaaatttttcataaaatgaatatagcacttcttccggatgaaaaagaggaaccaactaatggacaattatttattgtcgatacgggggacgcagtaaatttgatgaaacaatcaaactcaaaaatagataatgacttattgaattatttatataatttaattaaatcagaaaatccttttgctaaagcttttgtaatgatgaaagaagaagaagacgctgaaaaggaaagagctaaacaagaaggaagagaaccaattgaaatgaaattattgtttggtctagccccgaatatggacaaaaatcgatataaattgcctagggcaaacgaagttgctgttgtttttgtacctggagcagatggagaaatacctgagtcaaaaattgttgtaagagaaagaggaaaagaattaaagattttagatagtcttgacaaaaatgtaacacctttatgttatcctttgttttttccaaggggaacacctggctggcacccagaaatgaaacaaacaaatggctataaaagtctaacaagactacaatatgctggatgctgtatggctgtaagatgtgagtttaatccgatgttatttggagggagattatttcagcaatggggtgctgatgaatatgtctgaattgataatgatagattaaaatggattccaaataatctttgaaagattttggcagattcttatacaaatgtaaatagttttttacttaatatgtctcgagaaacaggtcttccagatggaagagaaattattttacattctacaattgtaaggtcacctagatatattgatacacatttccagtatgctctgaccattgttcctatatatgtaaaaccagacttatttgttacaatgacatgttgccgcatatgtgaagaacttcactaaatttatatatagaacgagatgctatcgaccgaccagatattattgaccgtg

SEQ ID NO: 5580 - DNA, 1702 bp, Heterodera glycines
  unsure (1)..(1702): unsure at all n locations
gaaaacaaaatatttattaaagaaatgtcacacatttcattttaaactacaaatgaataactgataaaaaattaaatggaaatataaaaaaagccttaaataataaatataattaaattacattaaccataatttatgtaattttcatttattatttatttatttaacattttgtggaaaaattatggaaaaatgccgaaataaccaaaaatggattaaaaaaaataaactatattttgagatataaaaaaccatgtttcttttagagaaatttttatgaaatttcttgttaaatttagatttcttagtttttaataatttttttgtccattttctcttttcatctcaagttgcgttctttgttggatatatatcttgctgaagtacttttattattttaattatatatttgttatctccttttttcttttatcattttttagatttttatttcatctcatgctcaggttaatcacctttaaaaaaactaaaaattataagaacgaaaaacaaacatcttattcgtgctcagaactaaattaacacaataaaaaaatctttaaagcccatttaatccaatatccattctgtaaaattgttaatttcggtaattatgaattgtaaagtttttgaaaaattagtcgtccaaaccagaataagtccggaaattttaaagacaatttttttaaaatattataaaattctacgcatttttctacattctgtaaattccggaacgcgtcagaattattctggtgtgcttcagaataattctgataaattccggaacgcgcaanaaataattctggtacacacaaaatactctggatacctaatggtacgcaccaaatacttctgatactaatggtacgcaccaaatacttctgatactaatggtacgcaccaaatacttctgatactaatggtacgcaccaaatacttctgatactaatggtacgcaccaaatacttctgatactaatggtacgcaccaaatacttctgatactaatggtacgcaccaaatacttctgatactaatggtacgcgccaaatacttctgatactaatggtacgcaccaaatacttctgatactaatggtacgcaccaaatacttctgatactaatggtacgcaccaaatacttctgatactaatggtacgcaccaaatacttctgatactaatggtacgcaccaaatacttctgatactaatggtacgcaccaaatacttctgatactaatggtacgcaccaaatacttctgatactaatggtacgcgccaaatacttctgatactaatggtacgcaccaaatacttctgatactaatggtacgcaccaaatacttctgatactaatggtacgcaccaaatacttctgatactaatggtacgcgccaaatacttctgatactaatggtacgcaccaaatacttctgatactaatggtacgcaccaaatacttctgatactaatggtacgcaccaaatacttctgatactaatggtacgcaccaaatacttctgatactaatggtacgcaccaaatacttctgatactaatggtacgcaccaaatacttctgatactaatggtacgcaccaaatacttctgatactaatggtacgcaccaaatacttctgatactaatggtacgcaccaaatacttctgatactaatggtacgcgccaaatacttctgata

SEQ ID NO: 5581 - DNA, 3316 bp, Heterodera glycines
  unsure (1)..(3316): unsure at all n locations
cggctgtcgttaatccgttccacccccgttctatcccgtctaattgagctttttttgagaacgcacagctgcatttgagcagctccgtgttctcgctctagacgagcacaaatcaattaattaattaataattagtacactaattgatcacctgcagttttaatgaccgtgcaaaaaatcgaatgtttccgtttaccgacggcaacaatttttattttaatgattagcattgacctttccttgaaaaacattgattcctccttgaaaagattctcctccgtaattgatcagaaaaaaaaactcattgatcacctgatgaaaaagccctcggctaaaaatgatcagattagcccattctaggtcccgatcaattcgaagaaatatattattattttaattaccaataataacaaaaatattacttttataaatatttataaaaagataaatactaaaattttgtctttttttgagaattttctaaattattaatggctttctctaaacaatttgctgtttttatatttttactgcttcaacattcaattcgatctcaacaacaacagcaacaacaacaaaatgtgatcgagcaagtgaatttaaaaatttaattttaaaatgaatttttcggtataaaaaaataaatttcaaaaaaaatttgggtttttttgaaatttgaaaattttgtcagcaatctccgtctgcaacagctgctgagcaaactttgccattgtcagagttgcacaacacgttgaaccagttcctgtaccaactgaagcagaccggcgaaaaagttgtggcacaaacgccgcaaattgcgtcgccgttgttgttcaacgccgccgccgcagccgccgccatgggacaacagcagcaacggcacagtgccggtgatggtggtgccgcaacggctggcggcgggtgggataaaagcgcgacaattagggaggggggaggaagttnggagggtttttaggctagagtcggtaggctgggtgaataaaaattttgagaaatttcgaatttccgaattaaaaatctgcttttggtattagtaaatacctaaaatttgtgcagattattggggtttccagtgagaatcggtagaaattttttaatttttttttttatttttaaacatatttttaaaatttatcaaaaatatatacataaaatgtgccgtatttttccaatacctaaaaactccttttttgtcgaatgaatctattgtacgtaattgaggatgttatctcttccgtgccccggggctgcccaccctttatttcccaaggtttggttttttcagcggcactcccccctctgctgtgcgtccgttcgtcccgcttggtcatgttccgcttttccccagctctttgctggtgccaaccgcggcccatttgccgccaacttttcgactgcccgctaccgtaatggaacaggtgggttacagtacagtgtagtcaaatcgtaacccaataaaaatgaatttattactattgaacagcataaagctttcccaatggaaggctctccatcaaatccgccggtggtcattctgtctccgatgaacaacaatcaactgcagcactcaaaacggcacaaaattggcagcgccgaaacaactgctggtgacagtaccacaaatggcacaacgacagacattgtatcaactacggtagcacacagtttcacacacatattactgtcattatccaatccgtactcttaatatttatgcttcattttttaaacagattgttgccgcaccacctttgagctttagccaaacccctgagcagcagaatacagtatccgatgatcctcccactacggtatccgagttggagaatacggtacatgacgatgggcacgcaaccgttgcagcaacagatgtaaatgccaacaccagacaacaacagcagcaggttgtcgctgctgctgtcgttccaccgttggcggtgccaattgaaattgaaacaacgaatgacacatcgccaaatgtgacgggtaaatttttttttagggaagcaattactgtattagccggcggtactgttaccgcgtttggtttcgctaagaatggcacggccaatttttagtgcctgtgccatttgcatcgccagcgcagactccgccactcagcgtggaaacaactactgtaacggagccgacggtggttgacgattacagtagtcaaaggcagcgcattttttttgtgcccggaggcgtaaaaagcattgaatccaacggaagccgacagggtacggtatggggagaatgggatgattacagtaattgtttttgctaaaacatcataaaaaatttgaattttttaaaaattttcagcacttactgctgttgatcttgaggcttttctgagatcagctaacgtcgcgcgcatactttcgacttgggtcagtgatcaatcgttgactgatccattaactgttcagaaattcggtcatcaatttttggctgatcgatcggatttagcaattttttctaatgggttttgatcagaaattgaatattctcacagggggtttttcctgtcgcaattttgattggaatttaaatatttcagttgggcataatcagcagataataaccaagatttatacttttttttgtcgagaaattttcatagaatcttgggctccatcattgatccataacaaaataatgatcggtgtaatttcgtgtgattttctgagtcaactttttctatttttccccaataagttttttttttaaatcagaataacgggagcagtaccagcagcggcagcaccaacgccaacaacaatagcaacaccacaatgacatcctcacaagacaccaagctgttcttggcattggtcgagagagtgttggagcaggaagttgcacgacgactagcggaacaacaaccgaacaacaacaacaacaacggggacagcaacaacagcgagtacggggacaactccacacaacgcatgtcaccgccgcaacacaaccacgcggcggcggtgaacaccgctgttgtaagaaaaagggggaacgcggaattttgagggattttaatattgccgaccatttctggatgatattagagcaagattttaaatttgccatctgggattttggctccattaaaatccgctacggtattttaggctgcggcgggcccttagatcaggaaatatctggtccataattaggccacgtaattattgggaggaaatgcttggctccacgacagtctcaactaacctttcgaattgctcatccccagaaatgtttgtccccgttttctctaccgtaaccccttttagca

SEQ ID NO: 5582 - DNA, 3202 bp, Heterodera glycines
aaatggtggtgcagctggcgtagctggcgcaccagtgaaagcggctatcaacaagcagcgccgagttgtgcacgaaacggactacaaacaacgagaacaggcaaaactaaattttttttttcgcgatcgcttgacaaacaaagaatcattggcacacagtagtagagaagtgcctgccgagaaaggtttttagatacgagaaccaagaccgagaagtgattccgagaatgagactaaaaattcgagatcaaaacttagtcccgagaatttcttgagtcaagatttcatagactctcgcacaagaaagctccgggattaacggcatttaaagcggacattcatgagttttaaggaaaactaggcgcttaaaacgcggaaagcggcaggcagggttgataagatttttgcctttttgaaggtccggatcggtttttttatatatagattcgatcgatctcgatcaatttttgaattggatcaatcattttcgaactgttcgaatttaccaggcagaatttgaccgtctgctggaccgtctcaaggcggaggaaagcattgcggacggggctgagcttggcgcgaaaagcggtggcgcaaaagtggcaccgcccgatgacaccgatttgcttttgattgtgccgcctcgtccaccgtccgatgcggcggctgtcaccaataaatggcagcaacaacaacaacaacaacaacagcatggtgctgctctgctatcagtagtgataaggaaattagagtttttgtttgacattttaaaaacaaatctggcctggataagtctggatcgtgactggacaatccgacagtggacaatccgacagttggacaatccgacagtgaggacaatccgacagaagtggacaatccgacagtggacaatccgacagtaaatttctattttaaaaaatattttcaagtcattatatgcattttactggccaaatgcattttgaggtgtccaatcaaaagtaaacttagttatgccataagtatggatgcgatttacagtaactaaaaccgccaaaatcgttagtttttaggttctaaaaaactataaattgcatccctagtcatagaaatagagggtgatcatggacaccaaaatgctctattggagcgtaaaatgcaatgtaaaatgccaataaaatacatcagactaaccatctgcaattcggctcaaagcttcaaagctatactcgaacccgtcggccaataaaatttctctgcgctgagttgtttcggaaacaaagaagattttttcatttggttgcagattagcagggggtggtgggatttgtggattgggttggactgcttggatttgtgggacgggttcatgaatttctccttcttctgaggacgacgaatccatttggacgaaaatgaatgaatgatttgaagaggtaaacggaatggtcaagactttggcaaacatttttatcagcaaaaatgctctcatttctcatcactttggttttatgggtcactccacatttacttttgcatatttatttatttatggttgtattgatcacttatctttaattattttttattttattgtacttttgttaccagcataccaaactaactttttttaatttggtaacaaatttaagctaaattgatttgattgagatatttttaggaaataatccgttctaatgacttgaaaatattttttaaaatagaaatttactgtcggattgtccactgtcggattgtccacttctgtcggattgtcctcactgtcggattgtccaactgtcggattgtccactgtcggattgtccactgtcggattgtccagtcacgttttcatagttacttcttttggaatgttatttatatttaataatgatcaataattgaaaattctcagaattttttgttttatcaatgctcatcgaattagaaactttaaatttatcaaagcataggaaataatttgagtgtgtactgtactatacataaataaaaatataataaataaaaggggagggatgccaaatgattttcccgccagcaacaattaaaaaagttggaggatttggggcatagaatgtgttcccggcttttgggctgctcccatcaacgaaagtgcgcggatggaatgttctgagcatcccgggcttctgctgcttcactcattgcgctttcttcgccacggctttcgctgccgtcggttttttgccgagtaaatacgaattgacgaagaagcggatgaaaaggaaggcgaacgcggtgtaaatggagaagcaaatgcacatattttcaacggactgttggcacaccgtcggacgggaggagaaaagcttcagacgggcgacgtacagagagatgaacacgccgataagcatctgatcagaggaggagggaattggccgagggagcggagggaattgtccggagaaagtgcgggaagaaagggcaccccatttcccacttgggtggtctgcagcgtggtcacagtcatcgacacccatttggggaatcggattccgaggctggcgaatgtgtagtaagtgtacatgatggcgtggactgagtaattcaattggatgaaccaacggccggcttaagagggaatgaccgtttagaatattctttttctttgcttttgttggtcacctgcggtgagttcagtcgcggaatgccaactaaaaaaggaaaaaataaacaaaatgatgacaatggcactttctgcgtccgtcagtcgttccactcacctgtaaatcagcacaaccgaatggtggaaccaatggaggaagatgagcgggcgtttcctcagcaccagcagaacggtgtccccaaactcggccactttggaaagcgaaaaaagaaaggcccaaagagcggccggctgagtgggcgaaatggaaaggcacaccgaatcctaaaagaaagccaaaacgaattggccatcttccgtcgaaagtgcccacttggaatgatctgttcttcataacgtagagaaactcctcgctgaacctcaacgccccgaaggtgctgaaaatggccaatccggcattccaaaagaccaaaaagttgcgcagttcgaacggctttctgtcgcgcatccaccacttgagataatggatgcctgcgaaggagaagcaaggattaaacactttagagagcaagcaattaattggtttctgaccggcgatataaaggaacaccaaaa

SEQ ID NO: 5583 - DNA, 1259 bp, Heterodera glycines
gcatcagaaggggaaatttaggatgagaaaaaaaggaggggggggggggagaatggaatatgcaaaagaaaggaagtgaaagaaaagggaggaaagattggccgatggtcgaccgaggaatgcgttccctcggaacggttggacggtttggcgaagtcatctgagaaaagggacaatttgcagcccatttatatgcatccacttgacttcactttaaaacgcgcaacttcacttttggaaatggaatttgcgtagtaatgcgatggaaagcgaattcgaattacacaaccgaccgaacgggcaaagggcaaaaaacccaaaaaaagccaaggttggggagggggaatttggaaaattcatgaaaagtgttcaacggactgacattcctaaaaaggaggccgatcaccagattcacacgcccaaaacgtaagacgcagcagcaaattacagcagagatttgtgcaaggcattaattttgaattatgcgatcaccccagggggacggacagtcgcagcagagtccgtccgttcggttcggttgaccccccaatttcattatcggacccaaagaatgtttcagcaacacccattctcgaaggttatttcaagtcggggctcacatctcttctgattccgagtgaattattatttatatgtacataataaaaatttattttaaaataaataaaatttaatttatattaataaatttttgtttttgatttaattgtctttaattttttgtcacttcacccatttgggaatagtttttaaacgaaaaacccaaaaacataaagtcatattgagaaaattgttaaaataaaaaataaatgtgcacatttttttgagaggttttatttattgaacttttaatgcgtcccctcccccttttataggccctaaaatttaaaattacatcaaaaaattgagtgtaattaattaattaattaatgagggtcaaaaattaaaagacatttaatttaaatttgcgtatttaatgttaaaaaattggataggaaaccaaaccaggccatgcctatttttggccatttatttttggcgggggagtgaaaggaatcgcgcggcgacggacgacacaaaggccaattgttaattcgctgtaaatcacgcccccggcatatttaatgttttctcaaaaaaaccattaattgaaatactatttgtgtaatgaacattatggaaatgtggagtttaccccctcccggtaaataacaatggtttttcgagttatataataa

SEQ ID NO: 5584 - DNA, 3829 bp, Heterodera glycines
  unsure (1)..(3829): unsure at all n locations
atttcgggaattttgtctcgataaaatcaataattaatccctacatagaaccaattcatgatgattaaataacctgacaacctttgaaaaaataaataatggcaatctttaaagtcaaactttaccgtattgttccccagcaattcacttccatggacaatttatatctgcaaaatattaataatttaatatattgtatttattactctgattttttaacagatcatacttgatttttgacatggggtgtgtttgtcatgtaaatcgattactcttttttgggtatttcttgccgtttttaaggaaaaattttgaaaatttgagtgcaaattgttatggttaaaaatgactaaatttgcgatttttagccaatttttgtaagaaaaataaatatttttatggggcccgcgccgggaaaatttttttctggaattaatgaattttgtgaaaaaaattatttaatttagaaattttcctctttcccccttcactggcgaaccaccgaggggccgatctccccccccccctttctataattaaaaattttttaagtttcatttttcgataataaattgataataatttattctcactcatcaatcgatgtccaagcatcaggcccaaaacagctataaaattcaatttaaatttaataaaatatcatccatgaaaagcaaatgtacctgaatatgccggcattgttcacaagagcccacaattctgtaaataaaaaattattattttttaattaaattaaaaaaaaaatcaaaataagtccaggacagaacaacaactcgccaatgtttccaacagaattcaaatctttgcgaacaaaatccgctgcatcattcacagattggtcctgggtgatgtccaatggcactgttttgagttttgccgcaattccacgtttttttgcttcctcaatcagttcatcgcgtcccttaaacatactgctattgtgtagtgaaagaataatatggctaacataaatatatttttccaaacaaaaagtataattgaatttaaaaaaaaattcttactgccgaaattggtgccgtaaattaatcattggaatattgtaagcattaattttgagaaaatgccaaaatgtgttatcgtaaaaccttcactttttcagcaagaattcagaattttttgtcatcaataatcaaaaaatggttgttagaccacaataaaattttatttttatttttttggtgattatcatctaattatcttattttctgagtctaattactgaaaaccatgcaaaattgcgcatgccatacctgtttagtaaggcatccagcatatgtgagcattccatattgtgccaatttaagtgccaacaaataaccaaaaccagagtcacatccggtgacaaaaacagcgcgtttcgaagcattttgaagcgggattaattcctggatttggtaggggagttttatgcaaaaatttaaatttttaattttatgataatattttaaattaaaaaattgggtcattcatttaaaaagtttaaattttatttaaaataatataatatttttaattattttcacatacccaaaggtagcgaagtgcataataaatgaaaacaagtaaaggcaaaaacaaaatcatttttatgaatggaaagcaattaatttcttgcgagaaataactgtaaataataaaatgataaattcattaaaaataatgaaaatgaagaggagtttttgctttggaaagaatttgtgtaagaaaaataatcaaaaaaaaagataagagaataagaaaaaattgttttatatttttggaaattttaaataacattcttatcatgtgaaaacaaatttattttaaagtaaaaaaaaaattcgctaaaaccacaattctaaaattggtaaataacgattcatgccaattaggacctaatttctccataataaaatgataaaattttcggtatataaaatgaaaaacaatttatgggaaaaaaatttcaaattttttttaatgaatattcaatttccaatttcctattttatttttacatttttcaaaattcgaattccaccgggcaagtaacattttctgttttacagatcaaccaaaaatcaaccaataataataatgatgatgattaaactacaaaagcacctccatgcagcagcagcagcagcaagcagtccaatcctacgaaaaattgttgtttaatgtttaatttttttttcgccggagaccgtttttaacccttttttaaacgagaatctcgtccgtggagacaggtcgagtctccaaccacctgctgctgttgctggaattattttgcaggtaagatgtaataattgatcgatcagtttagttgagtgatcaatcttgaaaaatgtgtgcacaattttctcacccccccccccatttttaccgaatgtaattttcggtccgccgtcatttcaatagccaaccaaacagttcacccaactcaagaacaaccactcaaattggtccaatatttatttgtttgtaatcctgtgggtataaattaaatccatcaaaatgtcccaaatccgtcgtcgtcgctcttccctaatgggttgggcagcggcggcgacgggcgcaatgctgttgatgtccttcacctcaattaccctgttaatagagcgcgtacaggcgaagccgagcacacctgttggcggaccgtattcggagcatggtcactggattttttatttaattatttcatcataattagaaaaaagcgtcgccgcaattttttaatttgtgctgttgtcaattaattgttaatttttttttcacagtgtttagcgtattcttttatgtaacaatttaaaaaattttcaaatttaaaattaaaattatcaaaattttattttcagtggaaaagagtggataagaaattgaatttgtgaaatataattatatatttatacttaatgtataaaatgtgggtaccggtcctgatgtttttgttgaaatagccaaaattacaggaaaaccatgacgggatcttgttttattggattgccaatattgttcggttgggcctgataccatttttcgagtcaatttgacaattcgtacaatgagcaattaattgtaaacaaaatttaaaaaaaaaaagatttatttttcagagaaaaaaagttggaaaatttaaagaaataaaaacataatattttttaatattcattttattttttaagaaaaaattttcctgttcaaaactttttctccgaaaaaaaatatttaaaaaaatattgaaaatttttttttgtgtacgttgaccatttcataagtgctcacaaaaaattaattgaatgtttcaaattaaattttccaaaattataattagcattaattagcctaattattttaggttcacagtgcaatgaaacatggcgcccaaatctaattgagcctttacaaaaatgttcttcaacccaagcaaaaaacgagtgccaaaagggttaccattgtaatggcgccggattttgctgcccggaaaaaggttttttatccaggaaatttttgggttttcgtcagtgatttaattttttataaaattggcaattttttttgttatgccgaattaggtcattattagtgaaatcagcccgttttagaatgggtgtatttttatttttatgaaaaaataaacaaaaaatgattcttaaattaaaaaaattcttttttattgtaaaatatatttatattaaagcatgccatttttgaaaaagtgccatagaccctggttgcagatcctggaaaaacccggggcctggctggacccagnnctaagtcttgctcaaatttataattacta

SEQ ID NO: 5585 - DNA, 3989 bp, Heterodera glycines
  unsure (1)..(3989): unsure at all n locations
agaagatatttcccgatgaatattttttntgttattcattntattaaattatgttaaaattttaaatagacttttccaggaataaaattcattttttatgaaatctataataattaatgaccaacataataaagtatttttcacaaattccatttaataactcaagatttatcaaatcatttttctttacagagtgattaaattttgggataaattcttgcaaggttattaaaggaatttagaggccttttgaaaataatcagttctttgtaggcattagagcccccttagccatttctttacttagtctggattttcgctcgaattcaaaaaacgctcaatgaaaaacctgaaaaatttctcgaaaatatctctcacgtattatcattaggggcttgccaaataggaacaaaatccgattactttaaagaaagttataacggaaacccagttttgaagatcctaaaaaatctcggttggcgcgcatttggcaaaatcgggatttttggcatggtgttgctgaccgctggggtttccttcaaaataaattgtaaggccaggagcgaaaaatttgccaattattaaaattttccttcaatattttttcattttgtggaaaaactccgactcacaaatcagtaccgaaatcccgagtctgagctctatacgatatgtataaactgcaacatttttcagttatttcattttataacttgattttaattttactttattccttttttaaaatttcattcattattttttaatgcaataatttctcataaataaattaaattaactccctcttttgtgcgttgccttaaattaccccaaacaattttatttcataattacaaaccattcattcatttctcttttaatttcttttcgcccatttatttttctgcaaaaaatccccccccccccccgataaaaaaaattcactcattttttccattcaattcaactgctgcgcttcttttattagagggggggggggggcgtcggtcgttggggtccattatgaatgggtttttatagcccctcgtcccgcccgtcttttcaccatcatagcaaactgcttgctcttccgatgatgatgatgattgtcttcatcattcacgctcatcattcttccgccaccacttcctcaaccattcaccacaatcatccgcttggttgctgttttgctgcggttgttccacatttattgtccatcattttctacctctacccccgcggctccctgaaaaacataaaatgcttttccttcctcgtcttggtactaattgtcgtctgtgtccattagccttgggcaaaattgtcattgtgctgcttcattttgtctgctttatcaaagtggtggacggtgaagatgaacatcagcagcaacagctgcaaattgaccatggcggagctgaacaaagtattgaaatttgaattggaaaaatgattgataggcttagtcgggttttgaaatccgcttgaaaaagttgtatcctacacataaccttacttttctgccccccggcattattcggactcaattttggccaaaatacctactggactcgtttaacccgaatttttgggataaaattaaaaccctggattgggaactcttaattatagcaagattcgaactttatcagggatttggtgttttataaatgccggccaaaaaataaggaatttaaaaattatttttatttgaatttaccactaattttcattactgctttaagtctgcttcgagccaagagatttgggtgtttcgtgcccaaaggacggaccgggaaaaagcaaaatgttttattacaacaaaattttgggtatttttttaaattttaattttaaatattttttttatttaggttcttgccaaccatttatctacaaaggatgtgcaggaaatttgaatagatttatctcggcgacagaatgccgaaaaacatgttcaaaattgtccaaaaagacccaagaatgggttttaggtgaggcaaggaaattaaaatgaatcaacggattaaagcgggatttaaagctggaaagaataaaaatttgtgatccgaacattcaaaaaattcagctgaacggtgtaatgccagtcacctcatcccggatggtcattacatcgaatgtgttgcagggaaatgcccggaagggcataagtgccatcccgccgatggtatatgctgcccaagaaaaggtaaacattatctggaattgagtacggtatcatatccagacatgtcccattattaggttaacgaacggtaaaaccaattacggtattaaattattcaaaaataaattcagagtacgtctgttctcttcaagataattctggcacttttgctgacggagtgccggataagcctcgcttcgcgtggagtgccgacattaaggtgcttttagcgtttttggttttgagcaccgcctaattaggctcgctcattagcccgttttggaattttaataaaattttttattttttcatcagtcttgttggcgtttctcctattttggtgcaaaaggcaactacaacaactttgcaacatttcatgattgtctgaacttttgtgatgaaacaattaattaaacataatatttgtagggatggcaaaaatatgtaaatacataataaaaaaaaaactgaaatcgctatttttttttgaaaatgtatttagaataattaggtcctttttatggcatttttttttgttccttattcacggttttctaataattttgcccaaaaaagttaaaatttatatacatttttgaccacttttttgtacatatctttgccatctttaatcactttttaaaaaacctttttataatataaaatatgtatgttttacataaaataaaaaatatatatttacaatttttttttattattacatcatataaacataaattatattaatattatacaaaataaattaatcaatggattatttcttttttttcatttttattattacgtatgtagttttataaatgacatgtagcaaatgtatttggagaggaaaaaaaatatttcagattacttatacaaaatatttcttcatttattaaaatactaaaattaaatcaaaaaaaaaatcctctatgaaattgctcctctttttctatttgttttttgcgcaattcgcaattatttggcaaatggacgcatcgaagtggcaaagttcatcgacgccatcaaaaaattttagaggcaaacaacgttttgctcatagtccattgtcacggttcgaggaatatcgttccaaatcgcgcaaaaatggtaatcaaagcccaaatgggtgttgtatgggaccggaatattttcagggtgtcgagcttggatagcagatgaaattgaattctgatttgcgactttttttggggttggaatttcaatttacgatttttttgggcctcgaaattccggtgagatttttgggggtgccggaataccatctccgttggataatacaagagcccggaagcagaatttatgtactgacaaatgagtcgggattttcgctggaattcattcacaaaaatcttaatgaaaaattttgaaaaataatttcagaaaaacaaattcaaccgcatactaacgagaatgaattaacaaaaaacaatgaaaaagcattaaatgaatcggatgttgataatgtccgtcaaaaacagaaaattgttgaatcttccttgtcaactttgcctttaaaaaaacgaaggaatatagtgaaacagcaggacgaatatgtatgtacatatttatcatttatcattagtagggctgtcaattttatgcaaatacatatttttttcctcggactcgctcagttgggccacttttttacctacattttttgcatgtgtttttaataatatgtataacaaaaaaaaatgttttgaataaatctgagaaaataacgctgaaaaatatggataattgcaaaaaaaataaataaaatattcagataaag

SEQ ID NO: 5586 - DNA, 1658 bp, Heterodera glycines
atcccgaaatgctaaacagaaacaaagcaaagtcagtacaaacggaaacaaatcccgaaatgctaaacagaaacaaagcaaagtcagtacaaacgggaccaaacccggagtttccagaaagaagcaaagcaaagtttgtacaaatggaaacaaatccccaattgacagacggaagtgaaggaaattcgataagccaaaaatcaacaaacttaagaaggcttaaaagtgagagcaatactgataaaagaaggtttttggaatcaaaaaaagaaaatcttcgaatggctgactcgtcgcgtgattatggtcccagacatcgacaattccctggccatgaaatatcgccgaatcggtcccaacgatatcatgatcattatcatacacattcaacgcgatatgcccctgaaatatcgtcgagtcggtcccaacgatattatgatcattatcatacacattcaacgcgtccttcttatcggcgaaattcatcaccagaccgacagtcttctgctatacaacaaggatcacaacattctgagaattattcaacgacagatgctgatcgaaatggaagagactcatcgcaacagcaccatcaacattacagccatccaagctcgtcaaagagtcaacggagttattcttcgcctgatcagaaaagagcatcttcgtcggaaagtcgtagaactaattattcttcttctttggaccaatatattgatcctcagtctgcacaagcacaaattattcaaaatccaacccaagacgaccaaacttcagaacacagttccaaagaaacaaatcaacaaaaacaaccggtatatgaacagaatttagaaaatcaactatatgaccctctgcagccttcatctttaaccaccaacgcgcaagcatacaatcaacctaaactgttacaaacttctcatgcttcacatggacagccaatgtttttgccgatgaattatcaccagcctttattgcaggcacaagctgttaatgtatcgactcagcctgctggctttcctttacatgcttatccactgcaaaatccgactcaaaccaattttatttatcaatcaggtatgctcacatgataacagccatagacagactcggataataaaatttcaaagttttcatgattcgcatgaaagttgcttgaattttaacttatggaaaaacgctatttaaattttcagttcaacccatgattgtgcaaccccaaccagggccacttgtaatcactcaaataacgccccaaccagttttaccacaatacattccaactcaacaaggcccaagcactcaataccaaagtgatgcgcatcatgtgatcacaacaaacacgaattcgggaaccaataattctgcaagacaaaatcaacatgcattttttgattacaaaaattatccgtctaattattccgaaagagagccagcttcccagaatgtaattgttattagaccaacctcgaatttaactgaagataaaggcaaagctttaattaaatataagaatggtaaaaacccaaccaattttgaacaatatccgactaagcaacatgttcctcattccgtatcagttaataatcaaacaccaagtacttcacaaccaaaagttcaggaatcacaacttgatgaagcttatttgatcattttta

SEQ ID NO: 5587 - DNA, 3230 bp, Heterodera glycines
  unsure (1)..(3230): unsure at all n locations
tatgtcccctctcttaacagttcatttccaggtaattacctttatgctgtttgggtaggggtcggaattgacaaaagtactttcatgttgaggatcatatcttctaacgcattttatttcttaaatttaagtgcgaagtttgcggacaaattttgtcaattcattttttgtacaatgcgctgcttcacctttctctgaccatcttttatgtggctcctctttttcaaaggcttttatttgggatttacaggtgttcataacgtttgtaattgtttacatttgttcagttttaggaggatcgcaaatattttcacgacatttcgtctcattatggaaaaaatcatgcacataaaaggaataaaaaaatgttaccaaatgcaaaatttgtgttggatggacacgataaagaagtgaattgggagacaacggaatggtacttttctgactatttaggttgaatgtgttcaatggagttcaaaagggaaatatttgataacaatggacagtgaaattgtccgaatttggtcgccatggaccggcagaaccgaaaatggatacgctgaacaagtcccacccccctctattcattgacataattatttttttttgaataattaaggtcgttttgaaccatcgtccggtcaaatttacctacccaaaaatgtacaccgacgtcgaagacgaaaggccctcgtcaagccaaacactcagccaacggacatttggtagcgaaaatcgcactgacaatgagtcgcgttgttccaatgacaatggcatccaattgctgattgaacactcccctacgcggaacgtctttaatgccctcgacaatctcccgtcactatacgccnaaacaagggaagaaacctcaaaagcagaaatgacacaaatggctaacagacaaccgaaacggctcattgtcatcaaaagcaatataaacactacgccggcaagtaaaataccaaggttgtcgataaataaaaatcgaaagaatttaattcatatttaaatctggaaatccggtctctgggaatgacaattcatcctcccttcatgtttaagagttggagggcatgaccatttcacgccaagtcaacataaaactcctaaaaggaagcgacgaaatctgactgccgaatttaaaagttgcgggaacacaaagaggaaaaagttaataaaaagcataggataagcggatgatgaactctttaaaggtattgcgtggatgcaacttcgccattgggtcggccaaggtcggcatcgacaagcggagggagcaaaagtcggaagaacgtggaacttgtcaagccgacgaatacaaaaaaaattttggattattttgaacgggttcaaaatgctgcatcttctccatcttttcaatgatttttttttcttatttgaattgaagtaaattccaatttttcagagtaaattatgcgtgtcatccaaatttgttaattaacatttactcttttgcattaacacatgttcaaaaggaactcaattaattgttttcggatgttcgatttttcggaagaccctttggtcctctcttttttgtcctctgcgcaaacgaataaaggaacgggttcagttggtatgtctctgtaatgaactttgatctttttttgttgtcttaaattccagggagtggatgttctccatcgtgttcagtgtacgacgaaaccacatcagtttccaagccagtggatgtgttaattacagcagacaataataacgttggcattctgccgggtgaagcggaagaaacggaaggcgggagcaatgaaacgccgtgcacttccacggaacaaaaggtcaatgaaaaaacaggcgctacttgcaaagcggtcctttttgaaattttttttcactttttttggtcacatttttttttttacacataatgatgaatattaagaattaatagcacaattatggtgaataaaaagtatattcacgatttttaaccaaaaaaatttttacaaaacaaaagggtcccccctatggttttttataaaattcaaaatctatcactttataactagtgccaaatttgcttaacaggcccaaataattgtcatattcatgatcagcgacctctaaaacccccgggtacttggtttcaggactttttaaacaaaaaaaaaatgtgaccaaaaaaagtgaaaaaaaattttttgcaagtagcgccaaaaaacatttaaataccgtatggctcttctgcagttaattctttttattaaaagttaaattattacccacatcttattagtccgtctcaaatcgtcaaaatttgtccaaaatgtctctgctgaaaagcgtcgactccaaactcggcgatgaaattctcaccaccatcgtggaaacgacggacattcgactcgacgacatcgaaggaaatgcaatggcaaaattagcgctggaagaaagtgttgtactgcctgcactaaacccgaaactcttcacgggtctgcgggcgccgtgcaccggaattttgttgtttgggcctccggggaatggcaaaacgatgctcgtgggttgacttggcaaattcattggctaataaatgaaaatttaaggcaaaagccgtggcgaatgagtgcaattcaacattttttagcatttcggcagcgacaattatgtccaaatgggtgggcgacggagaacgactggtgaaagcgcttttccaagtggccagaaatgcacagccatccatcattttcatcggtaaaattaaaaaagggaaatgagtaattcaaagacatcgaacccaataacatcagatgaagtcgattcgatgctttgtcagcgttttgagcaagaggacggagcagcaaggcgagtgaagacggagtttttggttcagttggacggatgttcttcggaaaaaaaggcaaatggccacgttttggtgttggcagcaacgaatcgcccccaagaattggacgaaggcattttgagacgatttcctcagcgaattttcatcgatttgccggacaaaaaagcacgttttcaaatgattcgaaggacttttgaactgaacagcaccaacttacaaattgaagatgccgaattggagtaatccgtccggtactcatttgtcaaccaaagccatttttcaggaaaatcgctacaatgactgacaattactcgtattccgatttgaaggccctctgtcgagccgccgcaaagtttcccgtgcaaagtgcgagaatggaaaacaggga

SEQ ID NO: 5588 - DNA, 2855 bp, Heterodera glycines
  unsure (1)..(2855): unsure at all n locations
aaacccccgggtacttggtttncaggaccttactaacaaaaaaaaaaatgtgaccaaaaaaagtgaaaaaaaatttcaaaaaggaccgctttgcaagtagcgccaaaaaacatttaaataccgtatggctcttctgcagttaattctttttattaaaagttaaattattacccacatcttattagtccgtctcaaatcgtcaaaatttgtccaaaatgtctctgctgaaaagcgtcgactccaaactcggcgatgaaattctcgccaccatcgtggaaacgacggacattcgactcgacgacatcgaaggaaatgcaatggcaaaattagcgctggaagaaagtgttgttctgcctgcactaaacccgaaactcttcacgggtctgcgggcgccgtgcaccggaattttgttatttgggcctccggggaatggcaaaacgatgctcgtgggttattaggcaaattcattggctaataaatgaaaatttaaggcaaaagccgtggcgagtgagtgccattcgacgttctttagcatttcggcagcgacaattatgtccaaatgggtgggcgacggagaacgactggtgaaagcgcttttccaagtggccagaaatgcacagccatccatcattttcatcggtaaaattaaaaaagggaaatgagtaattcaaagacatcgaacccaataacatcagatgaagtcgattcgatgctttgtcagcgttttgagcaagaggacggagcagcaaggcgagtgaagacggagtttttggttcagttggacggatgttcttcggaaaaggaggcaaatggccacgttttggtgttggcagcaacgaatcgcccccaagaattggacgaaggcattttgagacgatttcctcagcgaattttcatcgatttgccggacaaaaaagcacgttttcaaatgattcgaaggacttttgaactgaacagcaccaacttacaaattgaagatgccgaattggagtaatccgtccggtactcatttgtcaaccaaagccatttttcaggaaaatcgctgcaatgactgacaattactcgtattccgatttgaaggccctctgtcgagccgccgccctttttcccgtgcaaagtgcgagaatggaaaacagggatttgaggcgatgtacggctgaacaattgcgcccagtgaatgtagccgatttggaaaatgccattcgcagtgttaggccttcaatcaatgccgaaagcaggaagaaattgatcggatttgcggaaaaccacgcaaaccaacagacataatttatttttgtataaactcaattattgttttttttgttacaaaattgttgctaaaagcattcaataaatacatagctttgctaataggatgtgtttatactcaaaggtttcttcgcccagttttttgtttttggcgttttgctaaaattcttaaacataaagaaagaaaaaggcaaaagcataaaatgaaacggaatgcgcagataaactcccaaactattaaggaaaaagggagcgaaggacgaattgcgcagtcgtcgactttctcctcttcatcattgagctttcatcgatttccttcgtccaacgacaatttcaattgcaagtgaatgagcccattcccttctcttcgctcgatagagggcgaaattaaatgaacaattatttatatggtttctttgtggtaattgggcatttgtattccgtttttgccatttctccttacgactctgacgctctttgtttacgccaaaatataatttctttgataaaatcgaaaatttacaaacacgcttttgcttttgaaaaaggatttcaaatgtttggttgagatttaaaaaacctaaaagagaaaggaaatggcaaggcggtacatgataatgtttgacagtttaaaggaacaacaagaaggggaagttcgcagcactgaagcaatgtccgaattggtcggttttggggcatcggaattaaaaatggaacacaatttgttgaagttgcaagggatcgcttccttcaccaaaagtgttcaacagacgctgaacagttacgaggtgcgcaaattgggggacaaagtgcaggggtacgtgatgaacttcacggaaacggagcaaaaggtgcgggaggcgacgaacgaggacccgtggggtgaggagggcaaatgtaccgattggaaggaaaagcaaagaatttaaggaccgacggggccgcaaatgcaggaaatcgccagcttcaccttccaatacgaactttacacaggtgactgactaatcactgcgttgttttgcaattcattttttatacagaagttatgggaatgctatggaagcgaatgtttcaggagaataaattggcatggcgacgcgtctacaaagtaaaacgtgaaccaataaattcattcatttattaatgttgccatttcagtcactggttttactgaattatctgatcaaaaatggtagtgaacgtgtgatcagaaccgcgagggaccacgtcttcgaaatgcgatccctcgaaaattacaaatgtgtggacgagcggggcaaagacgaaggaatgaatggtctgtctgaatttggttggccttttgttggatgacgaagccagtttagctctagtacactttaggggtccaatgttcagtttcttgggccgtaatttctttttttctatatctgtgcctacattcttggtatcaaacgaaagcttaaagtctcatgattttttcgttttataccaagaatgtaggtattgacaaataagaaaaaatttttgaccggagaaactgaacattggacgcctcgagtctattaacgccggcggagttcagtcagacatcgtgtgaaattgat

SEQ ID NO: 5589 - DNA, 2025 bp, Heterodera glycines
  unsure (1)..(2025): unsure at all n locations
cgtttccattcaatgacagggtanatatttttgttttacagttggccaacccttcgacaatgactcctttttgggtttggacaaccacgaaatccaagtcgaacagcaggattcacaaacgcaaaacaaccaaaaaagtgcggaacagccaaaaacaatcgcagtgggaagcacgtgggaaaatttaaagggaaagtgagtgaaaatggaatctcaaaatggagaaataccctttctttcagagttaacatagactttgaccatttgtgcctcaattctccttcgaagccgactccgtcactcaacgaattgaagatgacttccacgaaagggtcaaaagctgctgcttcgtcctcaacttcagcaggtttaaatgccacgacaaatttaacgagaatgttttacaattaagggagtttgctgttgtaattggtttttgcgtgtcatcatttgccgtcgctcttcttttcgcaaaatcagtttctcttccacacggtccataatttggtttaaaatttcaaagtgcttcattaatggaggattaaattttctttctgtattttctcagccgatgttgcgaacgccttatccaacccatttttcttactaaattattcttttctcttctgtctgtccgaatcctttcctttttattgttactcatttctgtttcatgccgaattaactgaattttactgtgatagtgttcctttttgttattcgatgataaaacctcttcttttctattaacagttcatttaattttagaatacttttcctaattagcggttatgcgtaaaatacacagttagttgtaagtcataatttactaatttgaaaaaagaaccaataaatttccgataaatttaagaacgtgaaatcaataaatagaaagttggacatgtccaaagaagctcaaataacaaatgttatacaatcataatggttagttttttggaatttagaaatccatcaaattaatttactgaaatataaaacagactaaacagtttccccagagttttaaaattgtccgattggtcaatcggtggatgatgaggtaaattcatcagttttctttctcctgcgcagtcgcttcttggagaagcccgtcctttgctggtggcttttcgtccccttttgcttttccatggcttttccgactgtcaatggcatccaaaatcaacgcggcaaacacaaaaataatgccgagcacgtgtcgatttgtgtaagggtgggaaaagatgatgatcgaaaaaacgagactgaagagttttcgaagagttgtgatgatggaacaggtgagagggccgaaatcggtgaccgttttgaagataaaacactgaaaacgagcaaattaattaaacggagaatggaaaaaagggatgggacgagaggacctggccaaccgcaccggacagcgagaagagaagcatttgctgaagaatgaaagggtaagcggcgacgaatcggaaaaactgaaagagttcgccgctggcgagaagaattaaggtgaggaaggcggaagagaaggcgttcatcgagaacatcatggtccatttgtcggtggtgtggtaatggcgaattctgtctgaaaaaggggggggtgagaaatgcatttatggggaaggaaaggagggcaccttggacggcgccagtgaatccgtccattgccaacgacagacacagaaacaattcgccactgcctaactgaaagccgacactgcccttctgaggtttgtacaaaaagatggccattccggtgacgatgagaagcacgtaaaagtatttgcgaagtccgtaccgtttgtgagcaaaaaggacaccgaacagcatgatggggatgggtttgcacgacttgccaaggacctgcagagattcaaaaatggaacagttcaatgggaggngagtgactgacttgngtcgggtaattgacccattccaaggcgtaactgctgaagagcatggccaggaagtagctggttgagcacattgagtancagtgaatcggcacattgtccagcg

SEQ ID NO: 5590 - DNA, 6284 bp, Heterodera glycines
  unsure (1)..(6284): unsure at all n locations
gacccactgggaactctgctggactgctccctcttttcatttcggggcagtctcaacaagggtaaggcatcaacttcttaattacgaagaagcaacgcttctctcgtctgtattaccatcggcgaggataatgtgccaaaccatgcccattctcccaatggtttttattaaaataggcaaataaaaatttaggattgatgaatgaagacaatgcgaaagatcgtctggaggaatttattggcgccgagaaaacagaaaaagctcaattactgcttagattaaatggggaagagtacaaaggatttgtgaaggaaatgaaagagaaagaaaaattggaaaagagtgaagaggaaaaagaaagaaacaaaaagaaaagagaagaggcggatgaaataatgagaaaactaatcgaagaggaaagaaaaaaagaagaattgaagaaaagaatggaggaaatgcaacgagagaaaaaagaaagaagactgaagcaacgagagttgcagagaatgaaagaaaaagagaccgaaatggacaacggggacggaagagagcaacagaatgaagacagagaagccagtgaagggagtcagagtgaggaaaatagttcttcattggcagagagttttgtcataacgccaaaaagtgtgccgaaggaaagaaaaaacggaatatttgaaaataaggaacagaacggagagaaagaaaaaaaggaaaatgaattattgtttggaagagaagaatggcaaaatgagttggacaaaacaaaactgatcggtgagttatttggggagcgggaagtaggagaccgggattgatcaccaatggcacaatattagcatccgccaagttatgatcaataattcctaatttacggtatataattctgacaaatttattgaaaatgtataccatttttcttaaaatttaagtaaattctcaaatagttcctcggaagcgtgtatctttaatgcctgtccccaaaagttccttagttttttatatttgatattttcgttactaataattaaaatacgcataaagtaaaaaaaataaccgcgttattttaaggtcatggtaagtaaatatactaaatattttaaattatttattctttgtaaaattggttaatttatcataaaatttaaaggatttaagagataaaaaataaattcccaaaaagaaaatcacaatttactagagtgcagcgggaccgggacctgaacacggacaactgagtaccaaggtcccggttttgaccagttttgaccgggatcgggaaattcccggttttcccagccaaaaagtcccggtttttcaacccaaaaagtcccggtcccggtcttgcccaaatttcccggtcccgctgcactctacaatttacaataactatttctttttaaataatgtttattgttcatttaagattttacatctgatcaatttttacatgaaaaaattgatgcatttctccaaaatccatcagagacaaagaaacacatgttggacattggggtattcgtaaacgaacttcggcatcggatggaaatgatcagacaattaagcaaatttgagggaaatttggaaatggaacaggcagaaattgccgtaaaaatagaaagaatggctaaaattgatgagaaatggacgcaattgaaaagggaattgatgagggataatttgatcagagatcggacacaatttgagggagtgatcagtaaaatgtaccgtcttttgaagcaaatgatttcaatcggagaagcgaaagaattgcaggaagaaaaggaagagagaaaaatggtggccaatcagttagctacggtagggcgagaatcaaacgcggaatgggaagaagatacggtagaagacagagaaaaagctgcgataaagtcagtcaaaattcaattgcacaagaataaattggcaaaagcaatcttttcgaaagaaaaacgggcaaatgaaaacgcagagaaaaacacattttgggaaatggacagagagcaaaaaagtgaaattcttatggaactctttgaatacgagcgacggaaaacaaaaatgatcagccgatttgaagaacatttggagggatggcagaaattggaggagcagcaggaaattggttatttaaaataaataatatttgcaaatttaaaaataaaataaaataattatttattaaacaataattcattgtttaaataaaataatttcagacagaaatttacggggacaaaaaaatgcccagcaaatctattttgactttgctcgcccccatttggaggttaatttccccgaaatttcccaacaaattcgcaacgaccaattggaaaacattcagcagaaaaatatggtaatttttggcactttctaacaaaattgaacacataattttacagtttaccgattttataaaagaaatcccaaaaagtgacgcaaattcagtcggtgccgcatttgacacattgaaatcaattatcgaaaaatgggtaaaaattgttgtttattatttgaatttatattacagttcatcttgggcttttgtaccttccgtaaaaataattagcatggggaagaagcgtcagtcacaacatatacattttttagtttcataaaataatattttgaaaagagccgaatccttagctttttataattaagaatttcccgacaaattattggctttaatataattaactctttaataatccgctgaccattttcccatttcagtcaaatggcgccgcccgtctcatcgtttcgggctcacatttccttggaacgcgcactgccgactcggacattgatgccatttgtgtggtgccccaaaaagagtcccttaggggggaaagggagaaatttctcggctttttcaattgcgttttgaccattcaaagggagcaacgaatttgttctgacaattcgctgcactgccaattttgcaaagtgagcaaaaacaaaatggaacagagaatttaaattgtttaaaaaaacttaattaaaaatataattaacgcatttatgagaaatatatacaaaaatttgaaaatattgttgaaaatatgggaaaattttttttgatattctttcatcttagaggaatatatttttgaaaattttaaaggccgatgattttcatgttgataattaggcacataaactcaaaatcaggtaaaaacaattcattttaatatttcagcacgcaaatgtggaatatttgaccaaattcccgagtgtccatatccaattgataaagctgaaactgctcggcgttgagttcgacctttccttggtctctgtgccggacatggaattgctgccggacgaaccgttggaagcagtcgacgtggaactgatgatggaaatgatagccaaccaaagagtgccgtccgaagttatgctcaaaacgatggctggtaaaagaatataatttacctaattgattcataattaagctttcaattttatttttaattgcttctgtccccataggttatttggacagccaccaaatgattggactaatcgcgccaagaaaccggccaaagttcagaagcttcgtcattgccttaaaacactgggcaaaacgtgaatttaatttattcaaatttttgaaataaataattaataattttgtttaggatcgcatatttatggcaatgttttcggctttttcaccggtgcaattttgtccgttttggcagcaaaagtcattttatggtatccgaacgcatcgcttcctttcttattccaaaagttcatgctgctcttctccacttggtgctttatttatttatccaattccaattaattttttttcactatttgtaaaggaattggccaatgccggtgaaattaacgcaacaaattggcacaacttttgacgcgttcgcttggaacacgtcggcagatgggcaaaaaggcgcattaatgccaataataacgccgggaaaattggcgcaaaactgtgcaattaacgtaaacgaatcgacaattaaaatattacaagacgaaatgagagaaggtggttaattgggcaattaaaatgatattttctgtcccttttctttttcagctcatttgtatttgaccaaaaggaccgccgcaaattttggccaattgttttctcagcgaaatttcgttgaaaaagttggctaaatacattgtaattaatttgctaattgttcttcaccctttttacagttcgaccattttttgatcatttcatgcattgtcagcctaaacggtcaaattggtcaattttgtgactttgtccaaagaaaaattcgtcaacgtttggccaatttggatcaaattttggaaagattcgtccattatagccaagtaaatccggcaaagaatggcgcagattgggcgcacagcgacaacaaatgtcccgagaaaatgcgacagcgcttcgaaaacattgagtgaggctgaagcggcaatagcggcgccattaaatgaaaagaaattatatatttatttaatcgcttggcaatagcttaacaaaatttcctataaatatgtagagctttagaattgtgccaaactttaaaatttggccaattcggaaaaagtattanaaacctacaaattgcatccctatttattaatttaaaagaaaagagaacaggccacgaccccgggtccgatctataagaagtttagttcttggtgatttgacgggagttgggtggttcaataaagcatcaccaccctaaacatggttgctacacttaccataagcactttgacaaggaaattgtaagataaaataaacaaaaatagaattcttacagatttaagtgtgctcttttatgtgatatcaaaaattatataacaaaagttggacaaaatggtaaacattggggtgggaaatccaaccctccacctttgtcccgacgattggctccacttttatatgggtctttgtgcctccactttttaaagagtttttgaacctccccgcttgcttaattcttagattatttccttatttaccaagtttatcaccaaattcgtggtcattttaccacgtcatttaaccaatttcttattgatcgggccccagtggcaaaatggggacaatggaaattatttaaattttatccaattataataaacgcattaattaatgtcattttaaatttcagttctcccctttgtaaattttggattgtcggactcaaaataaaagaagaaaactttggcactgaccatggaatatttatgaaagaaataaatgaaaatttggagagagaatttgacgcgaaaattcacaaagaatatgtgataaaagtgctgaaagggtggatgcatcagatggtcaaattggaaacgaaatatgtgaagggcgaggaattggccgaatttttgtgaatttgaaaaatgaaaaatgggaataaaatggcaattaattaaatacatgcctaactcaattaaaatatatattcaattatcaattaactcaaaataggaaaaaataacccaattacataaaaacctttagagaaaagccaaagaatttgtgacaatgaaaaggaaatgaacagcacacaataactaggacgacattgcctcattttatttcttttttgttgattttttgttgttttttttgtttttgttttttattaaaatagctgaaagtaaattctaccaacaaagttcgccaccattatttaattccaaggaaattattaaattagaattaattgcgcacataaaaatttaacaagtattatttagaagcttcttaattcctctgaccaaaatcttttaattttgttattcttagcaaataaaaaatacaaattgggagttgttaattcacttgagttgccacaatcttcaggatttcaatgggcattaagaatagtagaaatctgatttttttttatagtaatactcaaataatcgtcaaattttcgtggttataacttaaagtaaaatttaattttttaaaaatctgaattcagcctttagaaaatcttttttcttatcgttgttatctaaattatatttacatctgctgatgattttgcactctccgcggtggtcaaattatcggctgatattaattaaatcgatcaattaatttactcttctcgccattcctttgtctctttctttaattgctttatcgagtaactgttaattgtgtaataaattccttcgaccattggtaaaaactggggtaggtcggggccgggaattttgggcaagaccgggaccaggacttttcgagttgaaaaccccgggactttttggctgggaaaaccgggaaa

SEQ ID NO: 5591 - DNA, 2721 bp, Heterodera glycines
ttatgttcagatttgattttgtaagtttttcactcggaatttctttaaaattgttcgttttcaaaactttcaaaatttcaccgaaacatccaattttctccgacggcctttgtcgttgtgcaaactcaaaaatttcagttttttttaaaattttccgaaaacccaaaaattaccctttttagtgcaaaactttgttagcaaatcggataaaaaaaattttcttgcagtgcttttcggaattggataaattaatattatgttcatttgatcaaatgaagatacataggagttgaaatggaatatatttttttatgcaccttcattgaatacgtcaaagatggattcaaaattgtaaaatattttaactatttttccaaaacttggccaaatttaatttgaaaaatcaatctttggcactgcgtgaaacgaaagaatggaacggaatggttaagaattttgggaaaaaataagaaaaaattttccttttttagagaagcctctcccatattaccaggctttgctattgtaatagcgccaattaaattatcatttccaattaattttttaccaactcacagatcactattttctcggaccgcgaatttgaacaaacgacgagttacggaccggcaggcatttttctgatatttttgccaaacacggaacgatgggccaaggaatcgttcgccttttgggcacaaattgaaaggaacgaattggcagaaaaaactggcggtaaaattcggcaattttcgcttaaactgcaatgcctttgttttggtgcagttcacctcatttcgggatattgccaatccaatgacaaagggtggatcgaagagcatgtgatttttaattatgccaattagccttaatttgtttttactaacgcatttattgaggctgatttaatgtccgacattgtgtatgactggaaatggttgaccgatcaccaattgggctcactattcgtcaaaccgtacaggtggtctcattttacacatctcattttaccagggaacctggctttgttcagcagggtgaccagggtattatattatttttctgtgctagagaagagttggaatgtcgcttttcgttatccaatttctgacatttttcagcagtcgaaattcctattgccaattgccggattatttttagccatcggaatgccaatttccgtacttttttgaggtagtcggcacacatccctggtctatgccatattttaccgcatatttaaaaaaatattaatttggcatttctataacttgcgtcctactccatattgccccctccaagctttacgcctcatttttcagctatggcgcccactacacgacttatgcagcacaaggtcgtctgtatgtgccatggctccgtgcccaactggcggccgaaagtggccaagggttgctgcacttccgacgccaacagatcggctctttgcaggaggtgcgtgtcaaacgatgctctattaattcctcactaattgtaagctggtcgactcggatcagttccgtttggtggtgaattgtgccggattggacggcggacgcttggcgggcgatgatggcacttccgtctacccgaacagaggcattggcatcgaagttagtggccaaggctttatttggtcagatgttaaagcgccttttctttctttgcctcttattttaaaggttgaagtgactggacattcccatttcaactactgggaagatggcatcttttgccttccgttgtatggcaaaggaatggccaaagaaaatttcttccaattttcagtgtgtcaaatggccgctttttaattggcacagttcgacaggacaattgttggcagttggaagtgactgaggaggaaaagcgcacaatttggacacgttttgttgatttgcaaccgaactttagagtaattgaaaaatcataaacacaaattaatgttgatattaacataaaatattcatgggtattttttgtttcttcaaaggatgccaaaattgtctccacgtggtgtgggctgaggccaaaccggcacggcggagttcgacttgagcatcagttgcgcaccaaatccaacggcacaggaacagtgcatgtgaattcttgcaaaaacttcaatatcccaattagagggtttagggcaatgggttttttttggtctcttaattaaagaagattcggaatgatatggggaagggtaatttggaattctgagcgaatttaattatacttttatagatcatgaagaattttcattggtaaataaaatgtaactcccgccctcaaagttttgtatttcgtaaaccaaaactaagaaatctcttccaatttttatcttaaaatccatttaaaaatgcacttcttttttcgttttgaatattttaaagaaaacactttcagatagtagtgtaagagtttccttaaaaattcaaaattaattatatttatttatacaaattccattttttcatataattcaattttttgggtgcctaatttttatttgtttttttaggaatttataacacgttcgcatttttggtgccggtatgcggcctcaaaaaatgaattctttgcaggtcattcacaactacggacacggctcgaatggcattttgttgagttggggctgtgcgagtgaagtgatcagactgatcggacaacaaattgttggggaggagaaaagtcatctctaattggcattgaaaagtaaacaaa

SEQ ID NO: 5592 - DNA, 998 bp, Heterodera glycines
ttgttataggccattcatccaatctccatacttaaaagggggaattaatttgagggttctcgccaaaaaacctttttaagaaagaggaagtgcagccgatggacacagagaattggggaggaaatgggacgaaaattacaaagacgccgagcaaaacgccaacccagccacagaggacacgcaacaaaagttcatcaaacgaaacgagtgacagcgaagtgcaaacgaccgcggcgaggccatcgacagcgacgccggggaaagcggaactgaaaagacgcaccacggaagacacaagcgacagcgaagcagaaacgccggcaaaaagcaaagtgttggcgagggcaactccgaagaagcagcagaaagaggcggaaacggccaaaaagccggcaccgaagccgacggagggcacttcctcggaggactcaagcggatgaacgtggggcgagaaacaagaaccgtacaattgttaatgatatcatttttgttgatcgttgattattttcagaattccactcattttgaaagtttattcataaatttgctaaatataaaattgttagtgttaattgagactcattttccaaaaactgggacaatatgacacctaattcgtttatgtgtgtgagcaatttgtgcattctattccttcatcccttcggcgggtcattccttttatatggccatccattttcatattccataagcattggccatgttggcatccgccaattggtcctgaattgttttttaatttttccgtataaatgccattcacctcaagcaatcggatcctcctctcgtgctgtcgtaagaccactttgattttggccaattcgtcttcaacgcttccactgacctacaaaattgaaatttaaatgagtcattcactaataatgatttattagctaatcaccgcggcagcggatgaattgctcggccttcgcgatgcgttcggtgtcgttgcggcggtgctttgtccgtccgcttctccg

SEQ ID NO: 5593 - DNA, 2496 bp, Heterodera glycines
atttcctcgtcgtggcgtaccggcgcggctcgctgctgctgagggggcgccggcctttgcatcggcggttcgggcggatgttcttgttggcttaatggagtctcgctttctttaaattggcaacttttcatttgctcacggtggcatttgtgccaaaatgtttgccttttttgccacttgcacttttggccccgcctttgctgcctcggggttcaccggaattaaattcggcggtgcgtttttgccgccaacgaattcttctgctgtcaaagcgggtattaagctgcgcgtgtccgggtaaaggtcggccttggcaaaaccatttgttattgaattgcattttcagtccaaaattcatttacttgccacagatcggatttccgaggcacaaagaattgaaggatgtcaacgactccttttgtggtcactttgtaaatgctaaatgcatttttccgttcgtttttcgtccctttgtctcccaccgattgatttcgttttccaacgaattcattccccgtttcggcataaaggcaaatccccgctggggttccgaggttgtgtgcgtgttaatgtagtggacgtacggcgggtcttcgttgatttcgtagtaacggatggcacagtcgcctttgcccatcaaatagcacaagcccgagtcctcatcgtacagcgggaacagcacgccattggacgtgtccaatctgagagcattggacatgacaggcacattattatgggtactgtaccacgaatttgtcactcactcgtcttgcattatcggctgggacaaattgtccgggtgacgaagagcatacaatcgctcggatcgcttggtgaatccggtgctgaacacgcgcccgtccttggtgaaaattgctctttgcggtttgacacctgcgcaatttgccgacattaattagccaatcattaaatttccaatcattgcactcatttgtcttcagcagttctcccactttctcaccttcatggcccattccggagctgagcacggcacctgaacaaatcaataatcactttttcatatcgtcggctgtcattagctgctcaaatgcccactgacccgtgtgagagtccattattcggatcattttgtccttgcaggtggtcacaaacctacaaaactatgcgaataacatcgattaaacaaacatttttgttcgttgtcatttacttgctcccgtcgtaattgaacgaaacgctccaaatttggtcgggatggccggcaacttcgagcagtgcttcgcctgttcccacgttccacaacaacaatttgttctcccctccggcagttattaaaatgcttcaaaattgttgataaaaatattcatttgttgtgccaaatgctttttctcgacttgctcgcagtcggatgccatgccaaagtgttgacgcgcttctgatggccgttcagctccacgacgggctcatggattgtgcggagaaggcccttctcggggatcagccacacctgggcaaaacggggaaaaagcggatgaaaagcggcgaatcgacggggcgggggaactttggcagtggtatcttcagagcaggaggcgatcacgtggtcattgaatggggaccaatgcacttccaaacaaggggccttatgagcgtccacaaatggtatttccttaagagggaaaatgtaattaagtgccatcattggcattgggttgccaatctctcccaattcccattggcattatgccaatctctcccccatttcttatgccatctttgggccaatccctcccccacccgcccaatgtctgactttgtcaatgcgtccagctttgttcaccggaatgaccaggaaaggaccgcccgcgcctttgttgacaattgcctatgaaaaacaacaggaaattattgtctgacagaatttcgccgactgttcgcgacaatccaacggtttttgcagaaaaatgtcggatgactcagcaatttggttaaactcacaatgaatttcgggttgacagcacaaaactgcgagtcccaagacacttcggtgatgcgtaccttaagagatggaatgaatatcccttcaaaatcgctcacttacatcctgaatgcactgttcctgtttgacctgcttacagtacaccttaaggagacaaatgatcaaaaaaagccctgccgttgaaatgctttccaatcggtcacttacgtgccggaatttcgactgacggacaatgcttgacattttcgcttcgccttgccaaaactttcaaagatttcaagcagcttcaatttttagattcacgggcaatcaaggaaaagtcaatttggcttcgatcgatcaaagctgagcgtctaaagggcccttttcgtccgtcacttgcgccttctttttgctttgtgtctccgttcagccgctttttccactcttttgatcaatttgccgagaagaaatgaagcgaatggggggggggggaaagagtgggaggacagtaaagaaaaaagggggaggataat

SEQ ID NO: 5594 - DNA, 4255 bp, Heterodera glycines
  unsure (1)..(4255): unsure at all n locations
ctctagagtctnttgctagggcacagtctgctggggcaaagattcctcaaatccttccattcattccgccgctgttcactcccatcccacgagaaatgtaatgaagcgacaaacgaacagcgaggaaaagagaaggagaggagaggagaagccgatgatgggacacaacagaagcagcagctgaagtgaactcagcggggggggggcaagtgaaatgaaagcgaatggaaagagcaaaaggggggcaaaagggagggaaagggggggggcgatcgacggaaacatcgcacgacgaacggacggacgagcggaggagggcccgcacaggtcaaacaaccgctgccgaagaattataagagttttcaaaatcaaattgtcgagatgaccaaccgaatgagaaagaagacaaataaaacaaacaaaattggaatggtagtgaaaagcattaattaatctaatcattgaactcattaattacctttgagtttctttaattaaatatttaagttttactaagcgatgtaagtgaaacagcagagttctcttcttgttaaatttagttccccttttttacaggtatacggtaattggcaaatggtatcattgagaagctaaaacttatattattaggaacatagccattcttgagctgacttttttttgttgtgtaaaaaagcatttaggttttggtttgattagaagaaaaaatattagtcctaaattgcgtccgaatacaaatggtcagctgcatgagagttagaggcgattgcttctttgctaaaaatttaaattgacaaaatgccaaaataatatctaagcctaagcctattttgggcaattttttgtgccagatttttcggcatagatttgttttgtttctagagtgattgaattcaacggtaaagttttatttattcgctagaaatttcgatgactccaatcatgaaaactagggttgagcggtaccggtaccggtaccggtactggccggtaattaccggtttttttggtaccggtaccggtaccggtttttcaaaaatgaaattaccgttaccggtttgtctagtaccggtaccgccggtaaaaatttgcactggtaagaatgggggtctggtcgagaaaagagtaggaaattggtgaagaaggagaaatttttgagaaaaaattaaattttatttcatttagtcatgggattacacacatgcacatgtggtgtagtggttaaactttctacctttcataatttttcgcctgggttcaattccccacttggatagaatattcctcacattttctttaccattattttaattaaaattttaatttaaaaaaatattccaacttttttctttcatgttaagcatcctaaaaacccaaaacttaatcaattggtcatttttttttacaaattctgttaacaaatcgcattaaaaattacaaaattttttcccggcggcgcctatcggcaccgccggccctccttgtcccccaaaagtcttggaaaaaacgtgccgcgtaaaaagcggtgttgaaagcaaaaaaggtcattgatttacattaatttacatggccggaaaccccttcgcaaaattggaaaattggctgctgatcccttgttttgcaataatctgaattttgaggtctatatctgaattttagtgttctatgtactgaatttgaaaaaaaaaacttggtcaacctaatatacatatacttctgaacaattctaatgctaaaaaacaggtactcgcgcgaaaactgaataaaaattttgtatttggaaaattttgtccaaaaatttttatgttctaaaattaccggtttttaccagtaccggtaccggtaccggttgaaaaagttggtaccggtaccggtaccggttttttcagtaccggtcagtaccggtaccggtttttttgcaattaccgattaccgctcaactctaatgaaaacgaaacttaatctggacaaaaaacaaaaacgatcgataaacaaaacgattttttaaatgaacacatagatatagattaatttccaaaataggcttacagtatttaacgactaatcattattagtcttaaaattacagaatttttaaggaccattcaacaaatttaattttcaacaatggaaggcgttgttctagaagagactatggaagagaatgtaatggatacagaatgtaagatataaaatgaatttttatataaaattaccagtttttagtggacgacctcaaaaaaggagcagcggtaaaaaggggccgtggttttgaggggtcgcagaaaagtgctgtccaagtctatgaaactttggacgaggagggctccgtcggaggaccacagcgttctgttgaagtaaaatctgtttaaaatgtcatttaccaacaggaataaattaagggatggatagtttttgttacgaatgtccacgaagaagcacaggaagacgagggttggttgtccgatttgtcattttattttcttaaaatggatttcagtgaaagatctgttcaaagaattcgggaatgtgatgaacatgcatttgaatttggaccgtcggaccggctatttcaagggctataccattgtgcagtacgaaagccaagaggaagcggcagaggccattgccgggctgaacggctacgactttttgggacaggaattgcgagtggattggtgttttgtgaagggcgggcgcgagagaaagcgatgaatcggatgagaagaagacccaatcactcattatttgttcatccattgatcatttgtttggatttcctgcattatttcgaacctcctctttttgctttcttttgtccaatttgtttttgctgcaaaatggaatatttcactaaaattttgtcattagtcttaattacagaattaagaaattgagttgttttcttgcgatggtttacgggacgccatttgaaaagttagaggatgaaggaagtaaggaaagtcggtttaagcacataatttttatcaataacttacagggaatgcaatttcaaagcggcctaagggaattcaagaagaaattgtgacggacgagcgcgggaaaaggcgattccatggcgcttttactggcggattttcggccggttatttcaatacggctgggtcaaagcatggtgagtattggctgtattatactgtatatgatatacttgtttaccgtttgagattttaatcaattttgaattcaggttgggtccctcaaacattcaaatcatcacgcgaagaccgtgccgacaaagttcaaaacacagccgaagattttatggacgaagaggtactgaattgctatataattgggaacaagaaaggatgtacgaatcggtcaaaactttcttgttgcttcgatgaagtccgaattttaggaccttggagagtttgggatcgcagcacgaaaactgcggccaaagatggacttcatcgactcgctcatggccactcccggcgaaaagtgtcttttggcctgggaacgttcgtccaccactttctcctcttcagaatcaggcgccgtggctgacagcggaagtttggtggaaaaattgtcagaaatgcttcgtccggtaaggtaggaatttcgcgatcttaaatacgttttatttgaccaaaaagttattgcattagctttgatttagtgattcgattggtgttcgtcttctcaagaaaatgggctggcgtcccggcaaaggaattggcatgaaaatgagccgtcgtcagttggaacggcaaaaaggtcctctttttgttataatgttgccatttctttttaatttttgacgttcagtgatcgattcgcgcgaggctggtcgccatggtcaattcgatgaggaagccgttctcgaggtcgaagagcaattacgatcgcatttccccatcgaattttcaccggacgatgtgtcaatggtcgaactgagtgcgaaagaaaatgtgcatggtctcggctacaaaccgctggcagaaggtgccgttctgtcacaaaagtacggagtgatggaatcggcactgaaaataaccaaaaagagcaaaggcattcgtggacaggtaaattagtgaaggaaacatcaaatccaatttaagaaatgtgacagaagcgaatttgcatttaaggcttttggtgttggagcctttgaagaggacgacgaggacatttacaccaatttcgacttgtctcagtacgatttcgaagtcggcgcctcaacttcgacggcacaacacgaagtgccaaaatgtaatccctt

SEQ ID NO: 5595 - DNA, 1373 bp, Heterodera glycines
ttgtttctcctcctctccctcttcctccgtttcttcctcctccaaacatctttcgtattacttctctgattccgcctcctcttcctcctcgtccgtttcctcctgctctccctcctcctcctccttctccatgttcttctcctcctcccccatgtcctcctccgcgtgcgcctcctcttcctcgtccgtgtcccgctcctctccctcctcctccatcttcttctcctcctcctccatgtcctcctccttgtcccccttttcctccttcttcttctcctcttgctcctcctcctactccgtgtcctcctcctggtccccctcctcctcgtcccccttttcctcctgttccatgtccgccttttcctccttcacctcctccttctcctcctccttcgccttctttaccaccaccaccttggcctggtccctcttctaataaatttcatttactctttttggcattgctttcccctcacctccttccgcgccatcgccgccttcctttccttccgatgcgaccaaaatgaagaacaaactgagaagagccaaaatgatcagttttcgcattttataatactttttaaacggaaatttaaaatgtttattagtaaaatggaaatgtgttttttccgttcccttttctcacttaaatatttcagtaaattcagcgaatttaatgaatcgcgaggctttccatagagttgtgtacatattacgtgttacagctgatcaaataaaaaatgggtttaatgaatttttaaaagcattgcataattattaggtacgaataaaatggattaatgatttcagggaacttacggcaattaatgaaattgaattttggatttttttttaaatttaattaaaatatgtattatcaaaaatgaagcataacataaattgcctccgtacccatatgtgtccaaatccatacaatcaggagcgctcttatgcaattcaccatctcgtgccccctctgccaatagtagtttcaaatctcatctcgcagttgtagtggtccctggtccattggggtcaaagtagtcgtaacataagcgcacgagtcgttgatcatcgttcgctcaagttgaacgaatctatccctcgcgtattccatcaccaccgtattcctcattcatttgaataatagttttcattccgtacagtcgaccgtttcaattttggcatatccctgtcgatcattgcatctacctcgaagatagcagagtgcatacagttgaagattgtaccaagggtcgcccctcctttcctcccatcggcatatatttgatatttatttttccaattttccccttccattcggtggttggccggcattttggaaaattgtacagatttggttggtgcattat

SEQ ID NO: 5596 - DNA, 1014 bp, Heterodera glycines
agtcgaaggtgtcgactgattagtgggtcagaaaagtcgaaaaaagtcgaaacgaaaccggaacatttggtgatcatttcgaaagaatgtaccactcgcgcaacgcatcagcaatgtaaatttaaccgaattgaaaaattgaattcatttttcagaggcaatgccccgtttttcgggatatttttgtctgattttgtcaagatttcgacgatttggtttggtatccgactgataagctaaatatgtctgtttacaactttggacaatcataaaataattaataattaattacccattttgccactttcattccttcgtttccctttcgcttttcaaatgctatttttttcgtttccgaattttgcttcaattgattattcagcttaacgttggcattttgcaatacgggataaaatggcatttttcagttaagtccattttttagttttccgtgtatatttcattcgttcgttcctcttcagaagaaaattcatttgcatattttctgccctaaccattaatttaattatttaaagaattaattaatcagataacacaaatgaattacacattaatttgcttttccattttgcttcaatttacgctattttgggcttcaatttgtgcagcagacaatggtcctccattaacaattaaacaattaatttatatataattgagtgttttttcaaattccatttaaaatcgttcttttttctttttttacttttcactttttaagtgccttttcatttgccatttcccttcaaaactttcactgatgggcccagcaaaactttgctgaaaattatgttcaattacagcaagaaacgtttctcaattctgaaccaaaaatttgacatttttcctgcggaaaattttaaaaatgtttttttgacgcattgcaaattcgtaaatgaaaattttggaggagtcaaagcatggaaagagcaattggggcgcaaaaaaatgagaaaagccacacgaaattggccaacttttaaaaaattaaaa

SEQ ID NO: 5597 - DNA, 3793 bp, Heterodera glycines
  unsure (1)..(3793): unsure at all n locations
acaaacagcataattaaagctgttttttaaacaactgtctgccagttattntggagtttaaaaaaaaatttaaattttgattattattcattaaattaaggtgaattaatgaaagaatgtgtcaccgatttttcaattctacgaatatttttcgaaacggccaatttcattctgcaaaatgcttacatggccaactttgaggaacgtgccgaacgtttagctgatttttggagccaattctctaaaaatgaacattcgaaaccaccacaaattggcattagcactttccaaacgaaagaatcagaaataagtaaaattcttgtgattttttgaattaaaatcatcatccaaaacacagactttcaaaaaataatgggagataggacccgactagacgatataaaaaataaaataccttcagagatactttatgccaacaattttcacactttaaatactaaaacgggcgaagtgttgctgaaactgttaatggccaatattagtggtcgcattttgcaaaaaaataaattgccaacatttgaaaattgtgatgaaattgccgacgaattgggcaaaatgaaatggttggaaaacgcagtaatggacgaatcaaacggactgaatatgaagggaatttacgagaaaattttggaagaatttgacaaccgtcggcacaatcaatattcggcggaacgatcattcggaatgggtaattagcaaaatatcatttgcgttcactaattggataagtgagtcaagggtggccggaaaagccattcccgaaaatgaaaatcaaaattaaattattaattcccatcccaaatatttaattttcagcctgctcagcggaatttttcaagttgcattcgctgaattatttgagtcaatttgttctcagacaaattgtccaatcggcgctgacttcgcaagcgaattttatgtacaaaatatttcaaactgaaatgaagcatttgtacgaagaattgcacatatttctacgagaacattttgggacggtggttggccaaattggcattagcagcagagaaaaaggaaatgacgaaattgaagacggagagacggacggagacggggaagacacaacgggggagagtgacgaggacagcgacggagatgagcagcagaagcaacagcaaaaccaagcagtgccagcacaagcaccaaggcatcgtgaccaacacgagcgcaatgacgatggccatggacatggtggcagaggaaaagccgaagagagtgccgttgcggaggaacagccgcgggagcaatgccaagacgaactcaaacacccgaaacaaattggagaagcagcactaagtgagcaacaagtggaagcagtaactgaaccaacagaagcagcagcagcagacaaagggggaaacggtggntggtgggtggcggaaaaattggcgaatttgtgcaacatggccacaatcaacaagaagggggagacgagggaagagttgaggacacttccgacgaggacgaagtgtaccatgacatggacgaagaccaattttgaggaggaggagaaagagggaggaggaggaaattgcggatgagaaataccaaaacccggaaaattagccaaagaacggaccaattgngggggagaaagtgccaatgaacaatggagaaagtgaaaaataaaatgaaaaggcattgcaattagttttttggtcacaaaaagtacgatttgttaaaattgaaacactcaaaatgacgtagttttgaaataaaacaaaaataaattttatatcttcatataaattcaaattaggggctagaaatttttttatttgttcaccttntaattttcaattcagtacaatnttatgaaatcagaaaaatcacttgaattttccattttatgcttttcaataagctctcaaaagtttctgtttgttcagcttttcattaaatgtaattgacgcacaaaatccattttaatgaattggtcctcaattattcgtgagcataaaaaaagaaaagtagaaatttcggaaatcattcagaaaactttaatttaaaaaaatgaggaaacttccaattcttgctcttattttctgcttgttgctacttacaacgggtaggaaacgtattaaattaaccaattagttaatataattggtctgtgaattcatttattaatcaattaattagtacctaagtaattgttttttcaatcataattataagtgtaagaaaacaattttagaaggaagtatatttcgccgaaaaaacagaaagaaaaattcatcgagcagcgaacaaagtaaggaattagaaattaaataattatttattatttaattttaagaaacacaaagaagaaaccgagggtatggccgaagtcgcactttttcaaatggcaatggcatgtatggccaatcgaatggattttcaaatggccgatttggcggctccagtgtctattcaaatagcggccggtcgaatagctttccaaatggtggatttggcggctccagtggcttttcatcgatgggacataactcgggcggacttcacggctttgggtccggcccaccttctggaggctacggatacggaagcggttttggtggaagaaaatgaaaaaatgaccgaaagtgatcggcgagagaatgatttgtgctgttgccttttatacatgcaaaattaaatggaaaaacgcatttcaccagcagaacacttttttaaatcaaatcacagagaattaaaaaaaagaaaagcgaaggaaaccgcaaaaaaaaaatcacaaaaaatcactcgccaatacataattggcttaaaaatcggtctgtttcgtttcgcaatgcttttaggattcatcttcgtcccaattgatcggctttttatcagtccgctgctgctgaaaatgccaacggagccatgccaagcatatgcaaaagcaattgagcaaaacaaacgcggggacacttctgcataatattgatatattaattaataaagaaatgaaaaataatacaaattcactagccttcgcttttcattttgtaaatgaaaatctcttcggaaatttcccacaaaattttcccgaaaatccaaccaattgggccatttcctatcataaagtgaattgatctgacgtttgaatccgctgggcttcgcaacatcaatcaatctggccaattccaggccaaacgagaacaattcgtggataaaatggaccgattcgttttgccacattttttggttattaaaatattttatttgcaaattccatggtgccgaagtctcattctccataatgttgtttataagtaatttaagttttgtgcttatcagttcgactaattgacaaatacttttctgcctataaatttttagatttttctatgttttttcagctcaatttgttcgtcgatagaaaatgaatgttcatgaaaaaaatggactctgatacattccagcaaaaaatcagggatatttttgaaatggccattccaattaatgctaattaacttcggtaattgctttgggttgtttgcgttgttgttattgctccttaattatttaatgaaatcgaaagttggctttatcttaaattgaataacacagaacctcacattttagtgcatttttcttcgctgattctgcgtttctttaatgcgacatcggaaaattccatatccaaatatgccagaccccgtgccacatcggagtgccacttttcgctaccttcaattttggcaaaatcgtcccttaatcggctaaatgtggcaccgacaaacaaatgcattgggcacagttt

SEQ ID NO: 5598 - DNA, 1584 bp, Heterodera glycines
atttcaaaattgaataaatgcgccattacggcaccggctaataaagtgtcgtaactgcgcactttgcttatcatataagtgcctaacaatgaggaaaaagaattttagtccgatttctatatttaaaaactaattaatatttttaatttttgaaaaagtaaatttttttataacaaaatgaattaaatccacgcgttttttcttttaatttttttggcattttttaatccgtgccatgaatgtcttttgcttttgtctgtttaccattttttaaactcgccccgcaacaagtccatcatctcttgcacattcatcagcaaatggttcggctctatcgctttccattgacgaatttggtcggcaaaatcgccaaatattttatggacattaattaatgcaaaaaccagcaaaatatagcacgtatttggcattttttatgcaagaaaagcttaaaaaagcaataaaaaataaataaaaaacagaaagacatttatacaaaatgataaaaataattatatataaaataatttgctatttgatataaaaatgcctatttgttaattgattataatctgttttaatagatttatgtaatacatgtgaatattgcatgaatgttgaggaaatctgcgaatatgcattagcaaatatttttatttaaatatatgtttcattgtcaccaagcttaaaattggttaaaacggtctaagcgatctaaaaaagttagaattgatggaaaattataattagaggcgcgattgcggttagcattctgcaggtgaaaaagtgtcgcgacagaagtgcccatttatttaaacttgtggattatgtatgtacaaggctgcagacgtgctaacttatcatcattttgctggtttcaaggggtcaatgatgatttttttaagatgatgatttgctgatttttgggaaatttgctgatttttttttacaaaactgggcacaattaatgaacaagtcaaaaactgtttttcactttactatttgtagaaaattttgatcagaagtatcaatcattcttcattcgtcaataatgccatcgtcggccaaacaatttccagttgggtcgtaaacgcacggaaaacggaagcattcatcatgggaaaggcatccgttttcgttgaaacgtacaaagaacagaccacttgccaaaagttagctttaaaatgctttttcaaaatgaaaatggataaaaatataatatttttaattttttgtacctccaaattctgaaaaggaccaaaagtgcctttttttattggcatctcatcgacccccccccccccccccacccgcaattgtccttccaataattacttacattgtgtgccaattgattttgcttggggtcgatacaaaacaaattaaaaaggcaaaaagaatagcgaaatgatagcagaaattcatttgaaaaattgcaaaaaaataactgaagaattaacaatttataatttaatgtgtaaaattcagcaaaaatgaatagtcattttccggacgtaaaaattaattccaccaattaacggaagtatttaaataatattttataggagccaaaattaattgatt

SEQ ID NO: 5599 - DNA, 2659 bp, Heterodera glycines
  unsure (1)..(2659): unsure at all n locations
aaaaatatttggctctgttacactntaggcggcgcccaatcaatgccattctcagtttcctatgccataacttttttctttgttggttaatgcagacattcttggtaccaaacgaaagctaagtctcggaaatttataaatagaagaaaaaagcaaataatgatattaagaaaaaacacactgagagacgaaacccaacttttttcgagtaaattataaaattctatagattttaagaatttgggaaccaagaatgtgggcattgatcaagtaagaaaaaagtatggcataggaaattgactaattgtgagggtggtcattgattggacgcctaaagtgcaaaagaggcaacatttttgaattaaaaaaccaaattaaaaaagcgggccacggcaaaaattggagggattgggcgaatgccccaaagggacgcgccgcaaaaaaacactcacaaatttcgccgacacagactttgctgcccgactttgtgctcaggtcgaaatcagccgacgcacagaaagggagggcaaattggaagagcaaaaaagcggagcaaactgaggaagaaaaggatggaagaaaagcgacgcttttggagggcaatggcattggaatttgagataattaaactaaaaaagaattccaacatgtgaaaagggcaattggggcaattaaccatcaagttaattgttaattaacggcaattaattaaagaaattggcaatatgaaaattagcgctagtcaaatactaaactttttgagaattattgacaataagggacacatatccttttggctatgattttttaagatatatcatatctagccatgaaagcgggtagctagctgttcatgaatcttgtactcctttcgaatccccaacccgggtcaaacaaaaaatcaatttcgaaaaccgtattttgactttttttgagttcggggtagagattagaattggtaccctttgaatttaacaattttcaataaatttctttttgattaacgccaaaaaattgttcaaaataataagtgcaaatacgtacatatatattattacactacagctgggagtgtgctctttttgtggtctttttggcccattttcattatggccggccgccctccgtccaaaaaatagcaccgattttggccaaaaaagcttcaccttacgccccccccccgtccccgcctccgtctgtttaatgcttctgctgccaccaaaatgcgttttatctgtcgtcgttttctccccaccccttcctttctctctcgctcctcctctttttctcattccacctcattatttccccaatgcttttcgtgtgctatgacgaagtacgaaaagtgcaagtgatcaaattaaaagcaagataattattaatttaataaataaaaatttatattttaaaagcaaaaaaatatatatttgacttcgagttttcttttattgcttatgctttgttaacattgcgcaatttggcctatgaagacttccttaaaaatcaagaagaagcatctaataaactttgggtataaaaatcacttttcgtattttgactcagcacggcttttccgtaaatcctgactggtgggggcttaagagttaagtcagggtttcgatatctgaggatttttcctcattttgtggtctttagaagggtcaaaagaggacttttttggaaaatgaggatttgcggatttttgtggtcttttgataaaaaaagtgacaaaaaacggatgattttttgaaaaaatagggtatattaatgttcgaactttttcttcaaatcttaaacattttttcgaaaaatcctcatttcgcactcaaaatcccaatttttttccggcagcgcctatcggcactgccggaccccttcccccccaatgttcccaaaaagttttttggaaaaaccgcgccacgaataaagcaatttaaaagcaaaaatattaagtgaaagaattgaaattcaattattttattttatttttttggaggttttaaataagattagttatagatttttaccaaattattaattttgcgattttaggcctattttttaagaaaaaataggaattattggagtccggcggcgctgataggcgccgtgattgtttcaaacgaaaaatatgacagttaacttattttgttcgaaattttatgatcttttaaaaaatgaggatttttcatgccaaatgaggattttcaaaattttgagatcgaaaccctgagttaagtctgtcaaggtcaaataaatgcgcacaaaaatgggaatctgtgaattcgagtgcacggaatgatgagagattgacgcacaaaatgtttaggcaatttttgaaaagattcaaaaatgtcataaaaatttgaaagaaaaaaagaataaaactaattgaagaaaaaaaataaagtaaataaaaacggaatgaaaaaacaaacaaaaaaagaaaagaaatgggagaagaaaaaaggaaaaatgagagaaggagaaaagggtaaaaagagggagagaaaaggggcaaaaagagaatactcaaaacggcgggagaggtcgtcgcaaaatgttgtcttcgatcaacgacaagaatttgtaaggcaaaatgaaagaagcgaaagtgaatggaaaaggaagggggaaagtggaaactgagggagagggg

SEQ ID NO: 5600 - DNA, 1915 bp, Heterodera glycines
attatcccccccccccccccgccattcactaaaagcgggcctttgaggaaatggcaaacacttttgcaaacatatgaccaaactgatcaaaaaaatgccaaagtttctttgtctattaataaatccgataaattattgtctagcgaaaaactgtttaattaaaagaaaggtaaagacgcaaaataaactcttattttgagatatgaagttgaattttttgtccgatattcagtaattagcagtggtaagttatcggaaaatgaattttaattttaagacaattaaatgaaattatggcccatgaaacgcgacggaaaatttcgactctcgcacagtacatctctattagaacgagagagagagagaggggcagagagattgagagagagagagggagagaaaaacagagagagaaagaggagagagaggaggggggggggggagagattgagaaagagacagagcaacggctattaggtcgctcattttttcttaatttaattgtttcatttttgaactttctgttaatcaccctgcttaataaatttaatccattcaaaaataagtttcggaaaagcaacggacccccaaccccaaagagatcggcggaaacccaaactcacaatcactttgctcggctgatcagcccaatctccgcctaaactcaatcccacatcccagctgaagatattagcagccatcgcactttttctcaggaaatccaatttaaattcgggtcgcattttaacaattttcgcgcagcgcctttctcacgccttttgttggactttgtttaacttttcaattttttacataattcacattaaaacaattaattgtatgtacttaattggttttttggcttgggaatgatcagcagcagaaggtgatctctgttcagaaaaaactagggttgcgtccccgaccccgcccccgaccccgaaccccgacatttttggcctttttcggggaaaactccgaccccgaaccccgacgcttcataccccgacaaccccgaaccccgacccttaaccccgatcggggtcggggttaaatatacacccctaagaatggcattttcgtgggagaaaatgcaaaaaagttagacaaaatttgaatttttttaaccatttgccaaatttttattaaataaagaaaatttgctcgattttagacatttcgaatgtggtgtagaagttagtgcatcacattgacattactttctgtcgtgagttcgataccgtttgacgttttcttctttaattattttctttgttacaaattgttttttttaaattaaatactcatagaaatcgaccaatcttggcatattttgacaaaatacatatcgaagaaaaacaaaaatttaccaaaattcataaatttttttggtgaaaaatcttagaaaatagagcttaattccaaaatttagcgctgcctatcggcatcacagggcccaaaaagtcataaaccttattaaaaaaattggctcaaaatcgcaaaaatttagcatattttggacaaaatctgttaacagatctaaccaaattttcaaaattttcccggcggcgcctatcggcaccgccggacgccgtaccctttctcattaagtctttagaaaagagcgacgtgaaaaaagatgttttggaaaacaaaaaagtaataaaaaattttaaaatttcaagaaaaaaaaattaattctatacaaaatttctgataaaaaagaaataaaaaaatataaaaacaatacaaatattattatggaaattaataaatattatttccgaaaaaatatttaaaaaattttgactattaggcataaggtaaaaattgaaaaccccgaaccccgaacgatttggcaaccccgaccccgaaccccgaattttccaaccccgacgtcggggacgcaacccta

SEQ ID NO: 5601 - DNA, 2780 bp, Heterodera glycines
gccgattggcagactggcgatgatgctgctgagaaagcagcccaagcagcagcagatcattgtgtggtgttgagttaacaagttctgtagctgtacatcgcgcacactttcagaaaggcggagaaagtgccctcaggggaaattggggggggggggaggggggcacatagggacggagcgtaagggtgtcacgaccgaaattatatttatttgcaacgcgtaattaattattgtttttagaaaaatgcggaaatttcggcagcaaattttgtcacttttccattttgtggtgctgcatattttaatcgcaattaatagcagaataataaatggtaattaattagcgttttatcaaaattttcctctgttttgggccaatttgcctccgatgcgccggtgtccgtccgcggcaacccaaattacgacggacgcgcgctgaacattccgctggacttggatggcacgttggagctgtaccaacactggatggaccaggcataattaacgaactaattaattaataatcaatcttacggtgattaaattgtgggttaaaatttttatctaaaaagtttgcttaatttcgtaggcattcagcggaatgttcgctgccgtggccaatcaaaagtaaattaattcacaaataattggaataaaatttattttaaaaattaaatgtaataataaaaaatattaggatgtcaaaaacgagcgaaaacgttcgggaagagatgggacgatgctcaaaacaagttggaaaatggaaaatatttaaattaataacaataaaataataataataattaatatttattaaatatttatttaatgaattgtctgtcattaactaattagggcaaaattataggtcaaagatgttatatcgcatgcgaattgcttgtcaagattattgaaaggcgaatttgaggacaaaaagcccatttttcagaatagcaacagcccaatggtgaaaaatattgaaatttcaataaataaattaaattaaattaaaatccgccaaaaatgattcaacagaaaaggaagtcgcggttggaattgtacaaatcaaaaggccaacaaaattacggcatcaaaaacatggacctaatgtcgtcaaaagtgccaaaaaaattattggcgcaaaattacggcacaaaatttgccgaggaagacatgcaaaagcacaagcgaatgcggcggcaaagcagcggaaaaagtgggcgaaaaccgacaaaaaaaaatataaacaaattttagacgagaaattcttcgtgaaaacagcgcccaaatattttctgcgcgaacgaaccgcccaaatgagcccattgggagcggtggcacaactgctgacaaagtcgctaatggcagccaaaaataaaacggaaatggccgagtaaaacgaattaaaatataaaaaatttaaatttaatatttgggattgactcggcgctttgggaagcgttaaattggctaaaattctctttcaaaaaatattttaaattaattttggtattcaaaaaaagccattttaaagtgttgttctgaatttaaaagacaaaactcagttcagctttacagtgttttaaatgttttcagatggcaaaatacgatagagaaaatccgacaaacttcgaaacggagaaaaacgatgagaaaacagaaaatggaaccagaaaaaggcaaataatttaaaaaaaaaaaataatataaataccgtttcagctttattgaaattgcagcagcaaattgcgggaaatggacaaaataataatgcgggggaacaaattccatttggagaggtaaaaagggggggggggaattgaaatgggcaattaaaatggagggggaataataaaataaattaaaagtgaatttatttttaaatggggaaaattaaaaaataaaaagaaggtgctaatggcataaaatctaaataaacccagcaaaattggtcccgaaatctgaataaggaatgcttcagctttcttttctttcctatctctgccgctgtactgctccaactttgtgcacaaagttggagcagtacaaaaaagcgtagaatgagtgataggcaaaaataaaagcaaaatgaaatactcaccttttttcagggtaacttttataaaaaatatactcttgagtattttaaaccatttaaagaaaagaaatttcttaattaaaagatggacgaaatattggagcgcggaaatcggacggaaattcgtcaaatcattcggatggcacagcgccaaaaatcggcacgacgcaacggcaaaaaggacaaaaaaatggacccggacaaactcgtccaggcaaattgagggggggggggagcaattagcgaagcaattaattaattaactaattaattttccaattggcttcagttggttcgccagggcgtcactttgggctttgcgctggcgggccaaaacacgacgggttgggacgagaagacaatgcgattggtgtcaccacgcttcctgagtgtggtggcagaggaggaaatggcatcggacaatgaaacggtggaaaaaatggaaaataatcgaatgaaaaaagttggcacaatgccaacggagtgaaattggaaaaaatgacaaaaataattcgttttatttttagtagagacccgcacgatcggtttttgattcgatctttttcggtttttcggtcttttttccgataaaaaactgatcgaaccccctaaaccggtctgtaatttttagctatcaaaaaagggcaaattattattatttttaaattgagttttctaattt

SEQ ID NO: 5602 - DNA, 2298 bp, Heterodera glycines
tttttgggtttttttcgttttttttttcgaaaaaaaaaactggatcgaacccccctaaaccgggtttggtatttttttagctattcaaaaaaggggcaaattattatttatttttaaattgagttttttaattttgaatatttaaaaaaaaattgaacattgcaaatgctcattgttttcgttgttctttttcaatttaaattgccatttttcgacttgattttttttttgaattttcactcctttttttattttccatttaattttatttaaatttaaattttttatcccccttttttcgttttctttttttattttccatttttattttccaatttctcatttctcagctgtcccttctgtccccctcccttctgtcaatgcacgacgatggccaaggcattgaaaagttcgcctctttgccctccctttttcgcgcgctcaatttgcgcgatcagcagcaatggctcaatttgataatggttgacccctaattaatttggccaattaattacaaaacaaatttttcgtcgcttttaggaagccgcgggaattaacgaagaagcgaagaaaatagcggacgaaacggagaaagaggaaaagggtgggaaaagaaaaggaaattggaatttaaaaaacaaaaattggcaattgttgcagaagttaaaactgtgccaacaattggtacggcggcggacaatggcacgagactaaatttgaccgaaatttggaaaaagtcgcgcggaatgtacgaaaaagaggtgcccaaattggcattcaattagacaattctcaattttgaatgtgaaagatccgtggcgaagatggccaacctttgtatttcacgcgcgaaaatgtgacggagcgatacggagaatacgaaacgcgcaaaattgacttgtgggaaaaatttatgagcacattttccgagaagcaggtgctaattgggggggggggaggaaaatgaattaaaataaaataatttaataaagaaattcgaattgaatcggactggatttgtgccgatgcggccggaacagatgcgaatgatttacggggcccagtcgccgttcaatgacacggaagtgcgcctgagggggggggggaattaaatggcacaaaatagcactgatcagcagagtgatcacacgcactaattggctaagtgatcaaagaatattttgaatatacaacacaaaaaatgattttccattttggcccgaaattttcatggattttccaaatgttgtgatccttaatttacgcaaattaccaaatgatgcttttttatcagaatttcgaacttttcggctaaatttttagtaaattaattatattttattcatttcatttttaggctttgcaccgtttgtcttctctgaatgagacgcaaattcacgagggaatggagagagacgtaggcacaattagtccacctaattatcaactaattaattaattactttttttaaatttttaaaacgttctaacatttatccgtctcagatccacaacatcgcgcgtctgaagcagtggcgccttcaataccatccccgcgctgagtttcactcgcgtcggcgccgtgccgtcgttttgtaagcgtcaacaactaattagttgactaatggtgagttgactaattgcgttgcgtttttatgtcgccaattgtctcctcgccttttgttctcgccgcccctgggcttagccaagcggtgattctgtcgcccgttgtgttgtcgccggtaaattccattcaatgcgtcctattttcattggtgctatgccattagtcaaaaacggtgccaggtcgtttcgtaaaaactgccaattttacagatttttcgagaaaaatctgtaaaattggcaatttttcacggtcaaaagcatcaaaatgggcgttagtttagtcaaaaaaccatcaaatcaaaatgtttttgatccaatttcaaaagcttgatattatcgatagccctaaatgttttatattctcctgcaaaattttaaaaattcgctgagtttcaaaaaaattaaaccaaaaatgttaaaaaatttggttttttttccccagggcataacttttttttaaatctattgaatttttagaaaattctgcaggataatagaaaacacttggtgctatcgaatgatgtcatagttttaaaatttggttcattttgggcgaaatttttgaataattttctttcaaaattttttccatttgatgggtttgactagggataagccccgagccctcgggtggcaaaaagtcgggggccggggacctcggggggcgacatg

SEQ ID NO: 5603 - DNA, 2874 bp, Heterodera glycines
tttctccgcttcttctgctcaccaaatgcggaatcgtcgaaggcgaatccgtgaaaatgagtgagtgcgtctcgttggcttatcgcattgtccggatcagcagacgcgcggatgagaataaggcgagggggggggaagcggatgaccaattgaggaaagggcgggggacgggagggatcatggatcatctccacggatgatcacctcatccatcgacccacgcccctgattcatcttcagcctcagccactcactcatccgtcgatccgtagagaagaggagtctctgaagagcggtgggacgtgatctctcccctcttgggcccggaagatgctcatgcagatgcttaaaacatttcttctccttttttcacatgatcacacaatcaatgttttacctgacaaatagtgctcgagatgggtagcacatcgtatccccctgttatatcacgcatcaatatttttctgaactgcacaattgccttcagaagaatctccgtatcattttggcaatatgattgaagctcgtccggcaaatagaagggtgttgttgttttattttcctcatacctatgggaaatggggaacccccaccactgaaataaccctatagttttgcttaccaactgacaaatttatcgtatttttctcgtttcattgagccagcacagtagtcttctattggcggcaaatgcggaagcctcacgtcatagttttcccttaaaagcattattttttgacaaatgtcacagctttcggaaaaaccttcggttgaaagcatagggaaaaaaaggtttctctgcacagtccaaattgaaagtttttggcagttgatcgagacgaacgggcatcagaaggcaagaatctctccagatgagcagagaattttgacggctatgctgcagtcgaaactcataaattttaagcccgttcatgaccacatctggacgtcgactggtctcgcccaaatactttaaaacgaaatgtccgtcaaaacgagaagagttgtgtgcctgaatttgagctgatcaattcgaggctaaaatagtcagcgaagcaaaaaaaaaacaaacaacaaacccataaatacgtcttgtgtttattgctccaagcacggagaacccattcgacaaaatccctgagcggttcatcaccattcgcttcactcctgtcggcaaaaatgtgagcaagcatgtattaagaaaggaagaagaaccgaccagtccttctttctgcacaaaattccctcctcggttgtgcatatcgcacattctacgcattcgcctgtcacagaatcgcagcattccgtgcacgtgatgttgaccgacaaatggttaactttgtgccgctgatgacccgcttcttgtaggtgttcgagccgcgtttccgtgtcccagcacaaaatgcggtagttttgcttttgtttcgggacaggaatttttttgatgaaacaagcagcatctttttcgtggtatacctgcgcatttttgtgaaaaatttgttgtccttatccaccgcttaacaaaaaaaacgtacattacagcgcccacaaaaactggtgtaacactggtgcgggtttttggcatcattttggaatgttcgactgcattttgtgcatcgtttcagcagtctgcacgcttgtccgctccgatgagcatcaaaacaaatgcgtgaaaaaaagaagcgattgcattgagagcaatgtatgctgacgcctggttccctcgcacatggttgctgtggtcctactgtacaacaacaacaacaatgaacaaaattttgcgcacacggcccacaaaataacctcttgtacactgagcacaccggcttttgcatgatatggtgtgtttggcatcagtggtgtagacgcattcgcagtcaatacaatatttacggccaagcttgaaaaaacagttgacttttttgattgcgtcgaaatgtccgccggacatgaacaaagcgaccacaaagcagcgccccatcggccccttccagataggcctcggtagttcctcagggcggtcctcaaacagcacaatgcggtacattcccggatagagccgatcctgttaaaaaaaaaaatttgccaaattatgcggcagaaagcattttcaaaaatggcactgacccaatggttttggacatgcgggacatgctccaccccgtatgcttgcccatcagggtcaatgccggcatgcagcatcaacccccggaccgcttcttgcattcgacccgggctggacagaagacgattcagtacttcatgatttgcgcaaaaatccggcctcctcatcactgctgttgcagcagcggacggcacgttaataagatgatcactgctgctgctgctgcttacgtccccttgatggcattgttgttgctgtggtgcaatcatttttgtcaagtcatgatcagtgtaagaacgggcggcaatcaacgcgtggaacaggcagaaatggtcaccgacattccgtattcggatcaactgcctttcgttgtaaccccagtgctgataatggtggaagcgcggagctgctccaaccggcggtgcaatgcaggtgatgacaatttgaaccggttcactgagcaacagggatcgcttgctcattcctccgccatgcacgtcttcgtctccgtccgactgtcccagcttttccagttcgcccatcagagtgtcggctgtgttctgctcaggtggccgtatcggtagcacaatagggtcagttaggcctatatgatgatggatgttcgatgggggcatttgccaacaaacaaaacaaaaaaaaatgagtaccgtttccatccagaaaaattccaatctttgtcactcgtcgtcttgggctttgttgagcggcgccgccaccgtcttgtggct

SEQ ID NO: 5604 - DNA, 3250 bp, Heterodera glycines
agtgctgcttctcttcatacaattggtcagcagtagcgccccctttttcatcatcatcatcatcattagcttccggattgctggcgttgttttctgcttcccggcggtcattatcactgccgccgccgccgccgccgccgctgtcaacattgttgttgttgttgttgttccgctgtgattacctgctgctgctgctgctgctggcgctctaccgtagcctatttgcatacaatggtcgtcgacattggcgccactgttattgttgtcctgctcatcatcatcatcatcatcatcaaactctgatgatgaggaggaggagcgctgctcaaagaaggcgactgtgcgaaagtcccatctgcggcgccgccgcttctgtcttttcgctttacgtttttcatgcaaattctcgagaagaggaggagcagtggtagcagaagcttcgtgatgatgaatgtctgttgcgttaacatccgcttcaaccgccggctcaggagctctcctcttcatatgctgattagcaaaaaaacacatgtgtgtgggaaacatgagcaaataaaatttgtgcttcatgaacagtgtggggtaggatattagtgtatagtatacagaagatatttatcatttaataactattttatgatagggcttctactacaaacgccattaatagctaattgggaacctttggctcatctaaaaaacactgatatttccgatcgctgtgtgtgtgtcgggtgcgacacagattcattcggtttttcttggacgcttcggtggcggcattcgcgtgcactcagcatcgtcgatcgtgtagatgtcatcatcatcatcaccgtcattgccgtttccatctttgctcccgcctttttgcgcatccacactatcatcaaccgccgttacctgctcaggcacccggattgaactgatgacccagtccagcgtctcaccttttgccttgaaaattgggcaaaatttgtgaaaatgtcatgtgcgcaaaatatttaccttgacaatcaatttgagcgcgatagtttcttcaatttttgattgaagcagggaggccagcttctttggacgctgctccgctaaacgtgaaaactcgtcaatctttaggccaagatatttgacggccgtggatgaaaatgcggtaatctgcttgctcgtctcaatgtcttcacagtcacgcaaatcgatgcgcaagtaaaggttgttcaaaggcgagaccgcatggtgatcgcaggactcacaataaagcgcttccgtaagctttttcttacagggcatgcccacggttttaaggggacatgcctagattccataaagcaaattgaattgttttagagagtgagtgtatgagtaaatgaccttgtaaagacagtactgaacattatcgacgactgcgcgcacaaaaaatgtgccaggtgaattgaactgaatcacttcacttaaatttttaagctgcgcaggaaattcgtcggcagcagctttttgatttgaggaaggcacaaattgaaaacgcataagtttgtcgctcattttgtcaatgttttggcgggaaaaacggctccaaaagtaaaatagaattaaaatggctaaaaaggtttaaagtactgagtagggattaaaacatatattgtgaattactaaaatttgtgaccccttgatctatctccctgcctaaaatggtctcctgacattttttggacaaattataaaaatgttcgacttttcgaccttttgttcgaacttgctattttggtctgagaatgtctcgaaatcattttgaaatttgttgtgaagaatttttttggtcttctggctactctagggctcgaaatgatggccaaaaatttttcgaactgtgaaaagtgggtctaacatcatttttggacaaaaatacgagcatttttacccctttggggtaaactctagtctgtaatggtctcctgaacattttgagagaagttcgaacaaagttcgacttttagaccttttgttcgaactcgctattttggtctgagaatggctcgaaatcatttttttattagttgcgaaaattttttggttttctggctgctctagagccccgaaataattaccgaaaatttttcgaactgcaaaaagtgggtctaaacgtcatttttggacgaaaatacaagcttttttaccccttatggggtaaacccatgcctaaaatggtctcctgaacattttggaacctattctaaaaatgttcgacttttagaccttttgttcgaactcgttatttttgtctgagaattgctctaaatcattttgtaatttgttgcgaagatttttttggtcttcttgctgctctagagcgccggaataattaccgaaaattttacgaactgcgaaaagtgggtcgaaaagtcatttttggataaaacaatatgcgttttgaacccttgaaactattccttggctaaaatgatcttctgaacattttgagagcagttcgaacaaaaatctaaaagtcgaacaatgttcgaactcgttattatattttagagaaggggtcgaaataacagagaaacatttttaaaaaaaaattaagtaattgacattatgacctatttttttttggcattaaacaacaataagctcttttgaaacggtgataattaaatggccgggagggtactgaaatggacgggttcaacaatgatcaaatttgaccgatggggtaaaataacgcgcattaagaggggtgggactgaaataggcaggcccaggtggggctttatcgatgagaaacaatttgaagacaatgagccagagagctttggaggccatttatataccgctgttttcggtccattaagacttaatggacaggccgttaatggactggtccattagtgggtcctgctggcccttttggccgttaatggaccgaccgctaatggactggtccattagtgggctaatggactggtccattagtgggctaatggactggtccattagtgggctaatggactggtccattagtgggctaatggactggtccattagtggggtccggctggcacttttgccgtaatggaccgaccgctaatggactggtccattagtggggtccggctggcacttttccgttaatggaccgaccgttaatggactggtccattagtggggcccggctggcactttgccgttaatggaccgaccgctaatggactggtccattagtggggtccggctggcacttttgccgctaatggac

SEQ ID NO: 5605 - DNA, 2164 bp, Heterodera glycines
  unsure (1)..(2164): unsure at all n locations
tgtttttggtttagtaggcgaaatgaatagtaggcgaactgtccaattttggcttagtaggcgtaatgtcgagtaggtgaaaaaatgtcatatagcctaatttaatttttgaaattcccttatcccctttctacttattatttatccattcttttccgatattttttccccgaattctccctcttcccatgactgcagggttttgaaccaattttaaatttttttattttatccgtcggtgtacaaatgtattcagatgcttctttcaaaaaattcctttctgtattcgacgactttttcacatttcagtccatcttcctcaaaaattttgcatcttttcctttcgacttccttcgtaaaatgccaacaagcacaagatgaagaagcaaagagtgaagaaaaatttgaagaaaaagaaacaaacaaacggcagcgaaaagggtcaattctgaaggagaaaccgaactatctaaagcccgtggaaagcgcgtggcaccgcttccttcggtctattggcatgagcagtatccggcaaaggccgaggtcaagtgctggctttgctgacaagcggtcggggtttgacaattgggatttggatgtgccaatggaaattctgctgaaggaagcacccaaatggtacagaaaacagccaaaggcaagtgcttactttagcaatcaaaaacatttcataaaacggatcaaattaatttcagctccttgcttctgaaatgtggcaacgaatcaaagaccgagttcttatttatgatcgaatgggcaggggaacggtgcacggcgagacatcaatcaaatatgagtttaaaacggacgaagtaaataataaaatcgtgttttggttaaactgaaaattgtcaggattttgggaaatggctgaccggatccgactcggaatggagcgagggcttttccaagtgcaaattgtacagaagcgaccgtggctcggcaatctttgagggcacactcagcacacgactggtcaaagtaacgtcacaattttaaaataaacttttcaaaattatcatgaaaaaattctctgtcaaacggtaaaaagtaataaatttttgagtgggaactaattatggcttcgtgcaaaatttaatttggtttttgttcgaatttggggttcagattgtcggcatggatttctatgtataatcaccgaccctgaaaaattcctgacttttgttattttatttttttatccaaaaaatactattttaaaaccatttctggcgattttggccatcaaattggaaatcttggtatccttcgaaagctctttccatagtttaaaatttcaggatggtaaaactcaaagagcaggatggtgttcgatgcgttcgctgaacgacaaaaaagccttcgataggaaaaattttttttcggactggtcccactacacccatcttctgatcaaggtctaagcaacaaatccttgcaatttcaatattttttcttttaagtgccgtggcgatggtcgcacttacaaagtgatgttgcacattccgcagtttatggacatcacttggggcaattcctacacgtatttgctgcacacccacggcggcccccattggcaattcgaaatgattcccttttcacgcttcgttttcacagtcgaagggcgtgcaattgatgttcaatatccgttggaccctcgggcggcgaggtaacgaatcggtctgaatttacttccctgtgagcctaaaacttttgagctcgattggaatcactctcatggacagaattgaggggccatttcgtctggaaatcgactttattggtgccacacatgacataagtcacctcgaaaagcatgcttatgagaaatacaatattcccctaggcaatccgatgttgtaattgtttccccccgccctcttttccgccgtttattctttattcgtttaaataaaacaacgtctgtagcacatgtgcttctcgcttggtaatccgttattaattttcaatttaaatgtttcgtttattcggtcccactaattcgtcttccgtcggatttcgggcggcgtgtggtaagtgaccgccaactgaaatctcatagaaataaaaacagtgngtacaataaatttgtgaatttttgtaccaattgtgtcaatatatgcggtttgtgttgatgggctgagct

SEQ ID NO: 5606 - DNA, 4516 bp, Heterodera glycines
ttatagatcggagtagagctcggcctgtacttggatccaggcctgtatttttcctggatccaggtacaggcaaattttcggcaacatgtatttttcctgattttcctgtacttttgtccagaaaatacaggtacaggccaattgggaaatacaggtacaggtacatgtaggcttttttcaaaatataccgagctctagatcagagttttgaaaaattccgcagtattttcaaatatgtaaatatataacgccaaaacttaatgaggaaaattatatttgaaaaattctgcgtttttcgtaaatttatcgggatttttataaatgtaattcctgtcctagttaggtttttgatttttttataaatacagctgggaatgggacctcaggcccccataagtttttttatttttcgctttagggccgtaaaattaaaaattcacaaatgtttaatctgtaatttcgattttaactttgaaagagcgagagagagagagagagaggaaaaggcgagagaaagaggaaaaagagaaaaagagagagagtgtagagggacagagaaaggaaaaaaggaaaatttgaagagagacgggaagaggaggagagaaagagagagtggaaggaacatttaatcgattacttttgctgcatgaaatgaatgttttgtgagttccgttagttcagttcatgtgactaaatttatccgaattatttgggctaaaccacaatggtaaatcactgaagaatggatgagaaagccctaattaggattgtttttactaattatgcacaaataaactaacaaactcagagagtttgctttgtttaattattctttttagaagttatatttaaacaaagaaacggttaagctaccagcagtaataatacctactaagtcagttgttttctgtcaccaatgctggttagtgcgcctctcatccaacaacagcaacagcagcaagtgttccaacaacaacgcccttccacttccgcttcttccgccgatggtcccttttgaaaaccctttaaaattggctttattagtgtttctttatccaattttagctgttttgcttccgcatgccacggaagcttctgcaccaactccctatcagcagcaacaaacggaggatcagctcgaattgccgacctccgtaccctccgctgccgactcccagcgccaacaccgcgccacccaacaaccgcagagattcttcaaatccggatcggttggttacatttactaaaaaatcattaaatactgggggtactttgtgcagtttacggggcaaatttcacatacattttcaaaaaaactgaattttagaaatcaaagaaaatgttttatggggttttcgaggtcgctgatcacgaaaccgggctcagaccagcggcaagaagcccatgagaattcgaatttcacatacatatatactcttaatgagtttaaataatcttttattgcggtttagatgactttaagctcattttcatgtattttaatcttgttcggtccaaaaacttcaaattcgaacatttttaattttcgactttttgttcgagttctggtcaggggttcgaaattggccgaaacggatgcctcgtcatcaccgacctcaaaaagccccttgaaacttattttcattaatttttaaacataaccatgtaaaataagtacatttataggcatttgaaaatgtttgttaaatctgccccgtaaactgcacaagtaccaatacatgtgcaagtggtgccccaaatgaacaacacgaccataaaatatttgacaattttaatgcattgtacaagcatcaaaattaaacattattggtattactaggtcgttgcataaaaaagggcgctttttcaaaatgactttttttaagacttgattaacgtttgttatgtcttttttgtgtgtaattcttttatctgaatgttctcgtcatgtttttgccaaaaattttgattttgtccttttatatctaaagttacagtccaaaaaattgggtaaggtcaacaaaatttggctaccattttacaccaatgtccataacttgagttaaaattgtcaaaacgacttaaaacttggtcagattatgaaatttgatgagcttaacaagaaaaagcctgaaagaaatttttctgaaaaagaaaaaacaaaattttttggccatgtttattttggccaagtttccaaatctattggccaaaccgaaagtcaaaaacaaaatccaaaataattccatcggggttttgaggctttttatgcccttaaataatataaaaaattacagaatcgcacaagtttccaaaattgtgttatgggcgattattcgaatttctgaaaacgaaggccaaggagaaaacacttgtctttggacaaaggatttttcttatattttttgaacacatgcaaaattattccagcatagtttatccgtaggaaatccttgttttaaatccttttttaaaattttaaacaacttccctaaagccttttttggccatttttcaaaaagtgggaaaatttgggattttttggccataacttttttaaaaattgtttgagtgcattaaaattgacgccattcaattcatctcgttattctgcatcagatgatattaaatttattagaatttgttacacttttaataaagttacactcaattttctggttatagccaagtccctaattttggcaccaaatttcattggcccatggctgacaggagaacaacttataggacatgctacgtcacccgtcttattccctggaccctatagacttaatttatggctaaattatttctctcaaaaattccttatagggtaggctctttaaagaatatggcaaggtcgtggatccagtgaaaattacctaggttcaaagaatggcacagaattttacaaaaagggcattgttaaactcccatctcggcggcaaaaggttgtagacagtcagggcaattactttgttaagtagctttttgatcggctttgttatgattgttatttttcattttttgttcataaatttttttccttcaaaaagcgcccttttttatgcaacgacctagtatatttcaatttggctcgttaaaaaagttaaattaaaaaataataataatagtcaaatttggcccaaaatttttaaaatttctccggttaaaacgtctagaagcaatactcaatcccaattatccatttttttttatctccgaaattggctatggtgcctgacttcgataaattttcactgaaaaaaattattataaaaatttatatttcgctctttttccattcacagaggctggcaatgagaaggcgccaatggtccaatttcagtcctcagcactaaagcctcgttcgggtcccatttggtatcaactcgtcacattccgattgcaatctacaaaattctactcaatgtaattgaaaaaaattttcacagcgcacaaattgaatttagggcccttatatgcttgctcatcactttgggcatgtctattgacggtttgattttaataatatgttaaaaaaataattgacaacagtgccgtaactttaggtgtgggcattcccatcccttcccatggtcattttaacatgttatttttcgcccatatggcctaaaattagtcagaaaaaaaaatttacaggccgaaaccaaaaaaaaacaaaaaacaaattttcatcgggtattttattatttcatttatcaattgtttttgtaaaatgctacataaaagaaaatttgagcagagttctctctctccttcacaaaaaaaaaaattctgatttttttaatttactaaaaaacgcttaaaattaaatattgtcgggaggaaggtgggggtggagaaatatagtagtttttttcttgaaagaattcaaagtttgaaaattttttaaagtttttggcggcaaaattttgggtgcatccgttttccatctgtccaaattagtaaattgtttttttttttactttttcagatccgtctctttcatatgcccaaattccgcggcttcctcaagagtgcgctgcgctgcccgaacggaccaacgaaattgtgtggctgcagcacatgaaattcatcgtcttcgacgacactgttctcataaggttcgtttttctccatttttccccgatttaatgggtccgtatgtcataaatttgtccgaccgactcagactcttggtaatttttttttaaattttctattcaaaattggataactatcaaaggaattattcccccaaaaaaccgctgggctgtcgcccatttgtcccttaccaccgaaaaactgggaatgtgttggcaccgaattttttttttaaataataaagctgtaaattatgcttacttggtataccatgtgagcaaaaaaaaattttcaaaacgtttattaaattgtgattttttgagtgatagaattggtgttcccggtgataatttttttgccgtcgacatttttccctatcacgtttttagaaaaatattgaaaaatctat

SEQ ID NO: 5607 - DNA, 2076 bp, Heterodera glycines
  unsure (1)..(2076): unsure at all n locations
aatttttgaaaattgtcggccatttgtttaatttcataaattgtttcaaaatacctacattttctattttatatatacatataataaaaaataagtgtgtgtgtgtttagatcattcttaaattgttcaaacaccaaatggacgcaattcttgcaaccgattggctccacaatgcgttcccagagcgaaagacaacaacaacaacaacaacaacaacaatttctagtgtggaagaagaattagacgatgccgtcaaagcagtgagttttacacaaaaataaatttaaaaaataaaataaaaaaataaatgaataaataaaatcaaggaagagcaaatcagttggcttaaaattatcgaagaggaggaggagcgaggaaatgaattgcaaactggtgaaatggaagtggaacgagcgaaaggtttggttgtttacaagaaaaaaatgaaaaaaaatttagagattgagccgccaaagcgacaacacttacagtccaagtgtagctgtaacgaaaagcaaaagagtgtcccgctgattgactttctctgccaacactacaaatgttctgttaaagagcttcacgttctgcttcagacgctgaacaaacgtcgcgaaatttcggaaatgttgcgctctcagcttcagttacgcaccaaccatctgcgtcctgcctggaaaaattttcgcgtccattgcaacgaactgacaattcatcctgctcaaactgcatatgccatgcgcggttatcttggcattacggttttttaaatttaaatttatcagctcctcaattgtatagatgatatacattgtttttaggtccgtatttactactatgtgaaacatggcgtaaagctcgtttatcctcagcttccctgtgttcttcaatttggcggtggtgaccattgttctctgtttccgcttgagtgtctgagcgtcataaaagatgcctgattaatacgcatcgggtgttttatgtgtgattaagtttgctgtgttattgttgttgttgttgtttttttttttaaatttctcctagataaaaaatgttaattattcaaaattgtaccgcggtgtttaaattacagctgttgcctttcacaaaagagcagtttttgaaaattgcaaaaaatggcttcaattccgagtacgacccccaacgatttcatgcaatcatcatacgactacgtctccccaaaaaacgcactcttgcatgtcttttatttcgatcagcccgtgctgtgttgactggtgtgccttgtccagacagagcggtgcgcgaggcacaaaaaatcagacggagggtgcagcatgcgttgggctcccagctaggaatccacgagttacgtgttacaaatgttgttggttcttgcactttatcacatcgattgtccatgctgaactttttaccaacactggacccacacaggttccgcaacatcaaatatgatcctacaatttttcccgccatgcgttgtaaaatagtcattgacgacgacgatcacactttggtcacttgtctagcctatcattctggaaaaatcattttaacgggatctaaaaggcaggacaatttgaaccacgctttgcattcattcttagctgtcttaaataattgatttgttcatccaattgtaataaacacttttttgtttttgcaactgatttttttttattgattccaagttgagcacccaggacggttagaaattaaaaaggcatcatcatcatcatcaccaccatcatcggcattaaattgctgtaattcttgcccctgctgatgctgaactgtttgcgcttctcggaatccaaacggggttgtcttcatgccgggtcgaatgcgccccttcacataatggggctgatagtctttgtgagcttcgtgggtgtacaggtccgaacacggagttcgaccaatttgaggaaatttgattgttattgacgcactgcttcccggaacaacatgaacatcttccatgttaagcacatcgtcactgtggcatacaatgttaggcggagtgttttgtggaattgtaaaaaaaaaaaattacatttgtccatcaantgttgtaatgtt

SEQ ID NO: 5608 - DNA, 5462 bp, Heterodera glycines
  unsure (1)..(5462): unsure at all n locations
tataactatatcaatgaggattatctcctcgtccgactttcctgtttaatgaagaataaatggttcagtgcgaccaccacgcactgcatcctctcttggatcaagtggtcttggaacaaatgaggcattatacagccgccgaaattctgggtctactcgaaggcgttgcttcacttcacatccccagacaacctccaattcaaacccatgttgattctccagttcaaataatcgcctctttgttcgttcatacaagtcttcagctgtcttaccacccgccaatttttgttgtctgtcgtttacgtaacattttggacagccttcaccgttttatgaaaattaaagaaaaagaataataacatttttttaccgtgataaaagcagcccatatactcaatggcaaggtcccgttcaggtggatctcgtgtaactaatccatcaaggcgataaccagtgtcctcaacgttagcttcaccaatggaccactgtgcagattgaacatgcacccccggatgggtcatttcatagtaacgaatgtaacgtgccgattcagcagatgctctcctcccccttagatagccaccctctggcgcgttaaccagcttattcattggaagaaagcagcgacgcagagttgccaaagcaaggccagctgctgtggatgcgactttgaacggatcgagcccattcgtattctcagcaataattttgcgaaattggagcacactttcgcgtagaattgccacgtcattcatacagtataggatgagttgttcacgtaattgaaagcgtgaagcgcgattctcggactctcaccaatgaaaaaaggcatctcttttttgtgctttcatgtgatcaggttgataaaattctttgggcggtaaaccacgcaatctttgatgcaaattttcacgccgaatgaacagataaggaaaaaacggttttgttgtcgcaacttcggtgttcaatccaaatgtgcgtggcagtgcatccaactcacagaaaaaaaagttcagcgaatctttgaacaccacatcccgttggtggttccccttcaaagtcatcgaaaaaattttcagccctattgtgcaaatacgcttttgtggtaaattgcgccggtgaagtgtctccagtatcaagtgaatgtcgtattttccaccattatgcgacaaacaaattgttttgacaccatgcgggccagttcccgtgagaaaattgataaagtcgtccactgggtcattgttggcattgtcaaaactatggaaaaacagtcttcgtgggttgtaattgacacaggctggtagagcactgtcatctccaggcacatttaaaaatggcggggaacaccaacgacgtccccttggtcccacagggggactgcacacacatccatttgcgtattgtccaacaccagagtgaaccgaaattccttcatttatgcacgcttcgcagattatttcagcaataatgagcagcgggacatgcttctgtacaaccttggtgcgaagttgaagtggtaaatcctgggacgtttcagcatcaaaaaaacaaagcctgactgccttttttggactgtttgcgtcatcatcatcttcctcctcctcctcctccacttcattaccatcatcatcatggcctctatcgttaccactatcatcatcattattattattaccattatgatgatttggttgtcgcattcttctctctcttcttcttcttccgctagtaggtttatctttcagaggttgtataaaacatgggtatccaatcggatgtggcccagaacagcgtggacaacgcatccatcccgtttgactaattagtgctggacacttatgcggatagttcgcataagtaatggctccacattgtctgcatgcccttctccattcacatattggacgaaaagttcgtcctcctcttcctcccccttcctggctatgcatagctgaaggtgctcgattgctcaggtgataggcgtagcagtcgtcattgggaaaaacgaatagacattcactgcaaagacgattgctagctgttccatctgctcgtgaatgttgtttgcacgggtacccgacaccaaagcgtaaacacagacggcaaacgactttgcattcctgggggtggtaccaacgtgtcacgcgacgttcacaatcaatgcaatatccttgcacacgaaatagttgctcaattcgtccaacgtaattgaaatgttgattttccaacaaaagacataaattgaacttggccgcctcgcctgatgctgccttgaacacaattcggtactcacgttccttctcaaaaaccgcaattcgaatttctccatggccataacgctgatcaatccaagcttgtaatttttgaacatcgtcaattgtgtacatatgcttgtttcttggtattccggcgcgacgcaataagttacgtgcctcaggcccgtgggtatgctggcgattcgcgtagcttttgaaagcgggaattccaccgccacctggtgttcgtgcccgccaatcatgcaagccaagcaacacagctctggccaaacaaagacgatcattcggatttttaatgcgaatcaacgagcgaacagtgttcaccaatcgatgttcatcctcaagactgcatgcacctatttaaaaaattttgcaaaaaaaaaaaaagaaaaaagatttaaacctgatcttccagcgtcgctctgatctgcttgcattggccataccgcaagtacttttgtcacagttgtgccagctgttagatctatgccagcggcagattgatcgttaagtctttgaattaaatcagcaattgcggcgggattgttctgctcgggaggacgaagcggaattgtaaatggattttcaaaggtcggtgggtgtaattgaagcccgattagcataggtgccgaacgcccatcaagcactcgatcaaacaaccgtcgcacaagacgctcaagcacgcggtcgggccgttctacttcttcaagtggcgcaaaactcacttccgcaatttctccaattgtgttccgagggcgattgcgcatttgatgaacagaagttatagtgaaatcattttggtcaaaacgattcatttttttaataaaatctaaactaaataataaataataaataaaaacgagcttttgtaaatttaatgacaatgattagtactaaaatgaagtagtgataccaaaatgttggttgttataacaaaaactttataaaaaaaatgtgtgatgtaatgtaatgtaatgtaatgtaatgtaatgtaatgtaatgatgttaattcctacctaattatgggagcgccgtgcagactagaacctcaaagcatttaatcaaaagcgttaaccactatgctacggcgctcccattcgctaattattatttctaatatttatattcaaaaattaatttaaatatatatatttttttaattacaaattaaaataaagcgtcaaaaatacttacgcaatggattagagccctattcagaccaaaataacgagttcgaacaaaatgtcgaaaagtcgaacattgttcgaactctacaaaaatgatcaggaagacatttccagacagggggtttctccaaggggggtcgaaatgttgttatttttgctccaaaacgacgtttagacccactttttggagttcgaacaaatttcatttgttattttcgctcacagagcacttgtaagacctcaaaagagactttaaatgtttgtacagtgactgggagccctgggttattgaaaataaaaagttcgaacaaaatgtcgaaaagtcgaacattgttcgaactctacaaaaatgatcaggaagacatttccagacaggggttactccaaggggggtcgaaatgttgttatttttgctccaaaacgacgtttagacccactttttggagttcgaacaaatttcatttgttattttcgctcacagagcacttgtaagacctcaaaagagactttaaatgtttgtacagtgactgggagccctgggttattgaaaataaaagttcgaacaaaaggtctaaaagtcgaacattgttcgaactctacaaaaatgatcaggattaggtctaatatctgaattaaataaaaatgaatattaaagtagcgtaataaagtgatttaatacatttaacttaaagtaattttaaaatgcattttttcatttgaaaatatgctttttcatattagaaaattaatatataaaaacgaatataattaaggaattaatatttattataaaatgagaaggatgtttgttgctgatgaaaattttaacaaaactgaaaaaatgagaaaaggcaaatgttcaggagcttaaatatccttaaacaacggtaaagggatgagcatataatcaattaattgaaaaatcgaaacagaggcgtccaccatactctctcaccgccacacgcccgcctccgcagcgcttgtggtgaagcaaaggggaaaatttttcaccatttagtcaacaattatcccattcctttcaactcaccctgtggccaagtggttaagctcctcgcttccactctcaacggttcgagtccactaccatgtttttgatttttcacaatttttcggaattttcatcataaagtcaacaattatcccatacctttcaactgcccctgtggccaagtggttaagctcctcgcttccactctcaacggttcgagaccgcgaccatgtttttgattttccacaatttatcggaaaaagtcgcgcagctctcgctcatttaaattaattaatttaaatttaaattaatttaaattaattaaattctcgcgcacaagtccatccaataggtttcggttgaagggatcaaagatcatccaataggtatggggcggggggggggtccgaaaatatggattgaaaaaaatcgataatcaaagtactcgtacattgtagtaaagtggaacagaaaatggaagagaaagtggaagaggaacagaaagtggaagataaagtggaagagaaagttgaagagaaactggaagaggaacagaaagtggaagaagaagtggaagaggaacagaaagtggaagagaaagtggaagagaaagtggaagaggaatagaaagtggaagaagaagtggaagaggaacagatgtggaagagaaagtggaagaagaacagaaagtggaagagaaagtggaagagaaacagaaagtggaagagaaagtggaagagaaactggaagaggaacagaaagtggaagaagaagtggaagaggaacagaaagtggaagagaaagtggaacagaaaatggaagagaaagtggaagaggaagagaaaaagcaacaaagggaaagaggaaaggacaaaaaaagaagagagcaagagaaagcgagagtgatgaagtgaaataggaaggtagaaagggaggnagaaaggggatgagaaaagagaaaagtaagagattttaagtgatcatattaaa

SEQ ID NO: 5609 - DNA, 10040 bp, Heterodera glycines
  unsure (1)..(10040): unsure at all n locations
tcggattttttgtaatccgaggcgtctttttccttgctcatttggcccctcgggtttttcgtaacccgaggcgtgttcctttctccagtgaccgacccctcgggttttttgtaacccaaggcgtcccccattgtgagcaggtcgctcctagggtttttcgtgacccaaggcgccacccgcttacacggtcggacccatcgagtttttcgtaactcgtagcgtccttcttcatacactgtaagactcttggtgggtctgaagtcaaactcactttgtccactgtttgttcaacttactgctattttgtgaccccgaaccccacacaatttgttcggaagtcgggtagcagaacctaaaagtgagcaaaaatgtcgggatttttgcggacaaaaatcgcaatagagctaaaggctcttgaaaaggcgaaaactgcaacagaattgcatgttgagccggaccaaactctgaccacattggaaaatgcgattctcctggaaagcgcggcagagagaataaagtcagaggtggaagcagtgaatgccaaaattgaacaaatttggacatcagcaagcaaatggcatgacctcatacaaaaaatggacaaggacgaacgaaaaagtgaacagacagtgtatgatcaatttcaaacaacggagaaactgaacacaaaaatggaaacagccaacacaaagctaaccgaactgaaggacctggcgatgaaggtggaagctggagcaaagctgcaacgctcaaaagcagatagagacgcgcgagtggagcaaagagaacatgcaaaagcaatgtcgaagtcgaatgcagaagcagacaaagggaataaccgtgcgagaggcaatgaaatgactgccgcattgtaccaattgccaacactaagaattaagccgtttgggggagacaaacgggaatggcccatgtttgaagaagcatttaaagtggctgtggaccaaaagccaggaagtaaaacggagaagctgaatttgttgaaatcgctggttgagcgagaggccgcattgcttatcggaggcctacgcctggaagagaaaaattacgaaattgccatgaagctgttaaaggacacctatggcgacaaaggcgaatatgtaaggaggttgcacacggagttgtcgaacctcaagagatgcttttcggtggaagacacaaagcatttttgcatggaattggaacgcctggcaagagaattggaagcagcggaagaagacattgaagggccgccaatttatttaatgcttgagaagaagctatacaagcctttcctgcgtgaaattctggaagagaaagcaaaaaatccagacttttgggacacgtcatccctccgaaaggccttaggaagtgcattgagcaaagagctagcaatcaaagaagtcatgagggagtatggcttcgaaggcaaagaggcaaatccagagcatggattcaaacgacaattaaggcggaacagattcggaggctcagtcaatgtagccacaacacatttcggaaaacccaacggagagcgaagaaaaattccggaacaaaaaatgccaaatccgaggcaaggccagcgaagttttcagcagacgccacgaaattccgcattccgagaccgtaagggacaaggaagaagcccaaaaattcaacggaatccaacggcagttaacactcaaggggaactgcttctgtgtgttttctgtggagggaaacacagacacgacagttgcgaaaaggcaaggacggtgcaacaacgatttgcagtcctccaggagaagggcttatgctacaaatgcctgaagtcaaatcatatcggaagaaattgcccatgcccgatgaaatgtttcaagtgccagcaagcacacccaacggcattatgccatcaggcaaacccacaaagggtaacagaatggaaaaacatggcaaaccgagtcatgaacgtccgggaagaagagaaaccggacaaaagagacgaattcaaagaagtctcattcacgccctcgcaatgcaattcagtgcaaggaaattcgcgagtcctgctgagaacagcagaggtgaccatcttcaatccatccaatccaaaaagaagcatggtcgcatcagtttttgtggatgacggaagtgaacgctcattcatccgtgccaatgtggcaaaacaattaggccttccggtgattgaaacggaagagtgccatttgactggttttggcgagaaagaagccaaacgctacgtgagcaatgttgtccgcgtaggatttctgggagtcaacggagacccatatatatgcgcactcaatgaaatggaattcattgtgaaagcgatgcccatcgtaacgctgaattcgatggatgaagcggaattaaacaagaaaaaactttcccttccatcgcggccaagacagccagacattctgttgggaatggatgtcagacatgacctgaaaataagagacgaaacagaaaagttgccaagtggattcacattgtcaacgtctcgagtcgggcggatgataagtggttatggccaagtccagggcccaatggacatgagtgtgcaagtgacgtacactggagcactcataagtgccttacaatgtgccagtagcagaagagatgctgacgaagaaattgaagaacagataaagacatttttcgggctgaacataatcggaatgagtgacaatccagaagaaaacgacaaagaagaagtgatgagaacgttcagaaaaagcttgacattcaaagaaggaagatatgaatgtggcctaccatggaacgaaagagtaaaggatttgccgacaaattttcaacaagcgagggcaagactttgtggcacagtgaaaaaattgcgagaattaaatttggtggacgaataccaaaaaattttcaatgagtgggagaggaacgggataatcgaaagagtgccggatccaacacaaacaactggaccggtacattatctcccacatcggcccgtgataaaaatggacaaggccacgacaaaaataagaattgtgatggatgcatccgcgaagccagcaaaccgcaaaggagccccatcgttgaacgaatgcttgcacacagggccgttgttgttaaacgaattgaccgggatccttctaagatggagaagaatgaaggatctaatcctggcggacatcgaaaaagccttcctccaattatcagtgagagaggaggacagagacgcgaccagatttctgtggctggaggatccacaaaagacagaaatttcaagcccaacatatgtgaaaaccgttgtgtttcggttctgtcgggtctcatttggattgacaacttcaccatttcttttaaatgcaaccatccgtgaacatctctcattctacgacacggttctaccgcaaaccataatggagaatttgtacgtggacaacatactgatcaatgtgaagaagaatgaagacatggcgcaaatttgccatgaatcgatcgagctgttccgtcaagggggaatgaagctgcaggaatttttctgcagtaagccgatcgccatacgaagccttcctgtggaattattggccaaaaaccaaaaggagataaaagttctcggaattccgtggacgaatgaggatgatgaaatttgcttccgatttaaaaaatttgccggaaagcacacgaagaggaacatcttggcacacattgcaaaaatttatgaccctttggggttagtggcgcctgcagtgctcccagcaaagcattttttgcaaaaacgttttgaagccaaaaacggctgggatgaaggattggaagaagaattgattcatgaatggaatcaaatcatggagacttggcaaacgaaagaggggacagaggtccaaattcgattcgcacgaagagtcgacaacgaagacgaagtggacaaggaaatgcattgcttcgcagatgcgagcggaaaaggcttaggcgttgccatttacatccgggaatcgacagaaaaaatgagcgccaatttggtgtttgcaaagagcctggtgaagccctccaacatatcagatgttgcggcaacaattccaaaaatggaattacaatccataacgctgggagtgaagttgttaaagtacgtgctccaacatctcaaactcaaaccaacacagacaacaatttggactgacagcttgtgttccgttgaacgaattaaggagcataagaaatgcgatcgatttgtttcaaatcgattagcaaaaatacgtggacagtttgaagtcaaacatttggtcagtgcagataatcccgcggacgtggcatcacgcggcacaacaccaagagagttgagcagaaatttgttatggaagcatggccccaaatggttatcagaagaaaaggccctgtggccaaaaccagcaaaggtttatcacccagatgaagagaagctcagggcaagtgcggaagatgaagaagtgaaaacagccgcagtcatgaatgaggtgcctttccaaccaaccattgatgtgaaccggtactccagctggaaaaaggccaaaaccgtgggtgcctatgtcttacgctggatacattcggtggcaaaaaacggatacaatggaaatttgttgccaattctgagcaaaatgggcccaaaaaagcacgggaaccaagacaagggcgtactgtcagtgcccgaattatgtgcatccgaacatttgctgatatgggaagcacaacaacaatttccaacggaggaaaaaacaaaggaaaatcttcgtctgttcaaagacaaagaaatctggagatgccgaggacgcattggagaagcaacagtaaaggaggaaacgaaattcccgattttcttgcctcctgaagcatggaccacaaaactcattgtgctggaagcacactggaaaatgaagcatccaactcacagtactctgttggggtacatgagggaaaagtactggatacccaaaggaagaaggttcatcagaaacacgatattgtctgatcgacacggatgtttgaattgccgcaaagagaggcttaaaccatatgcctatccacaaatgccaaacttgcccagtgaacgagttgcgatgataaggccatttgagaagacgggcgttgactattttggcccattaacaataaaaggcggagttaaagtctacatcgcactttatacctgtctcgtaatacgagcggttcatttggaagtggccgatgattgtacggcaacagaatttttgaggacctttcgaaggttcagctcacgccgcggcctcccaagcctaatgtggtcagataatggcaccaattttattgctggagcagagtgcataaaagaggaatggagaagagaaatactggtggaaaccagccactcaggagtgagttggaaattcaacgtaccacgagcaccctggcaaggtggcgcatgggaaagactggtgggcatcaccagaagtgcgttacaaagaacagtgggaaaaagcctaatggaaaggcaagaattcgatacgcttgtttgcgaaatcgaagccgtggtgaacacaaggcctcttacattccaatcagaagaagaattcacacaaccgctcagacccgtcgattttttattgccatataaacgtgtggaaacaagccttccattgtcggacgaagacccaagggatcccgactatgcataccaaccccgaaaaaagggagaattgcatcaattgatgagagttgcaataaaaagaatcgatcgattctggaaacagtggaaaacggagtacttactttcactcagagaaagagatcgaaccaaccgagcagaaggaagtctcccaagagagggggatattgtcctgattgaagaagaggaagacccacggtccatttggacgatgggaaaagtcgaaaagcttttgaaggggagggatggactcgtgcgcacggcacgagtacacacaaaaggaaaaactctggttcgagcgattaaccttttgtaccctctagaaattaacacttctgcggaggacgaagtcagtcaaattcaagtgactgccattatggattcaccaagtgctgtgatggaaggcggggacccgcaaactgtcacaacggagtcaagtctgcctccagggacagtgatgcaggattcacaaatcgtcacgacagaatcgtctcctgtcagaggaaggaatgagcggcaagctgtgaaagagagaattcgaaagagacagccaacggaggaagtcagaggcaaaggcaaattgaagaagaatgggccatatgatccactgcgaccgggcaactacagaattcctcgccgaaacccgttctttccgtcacaagtagcgtacaatgagcaaacacgcacgtatcgacgacgacgggggaggacgattgatctttcgggattgaggaagttgttcgctggattgggcggcactgaattcgtgagacgagagctgcaagagaaggctaacccggctctaagagaagaaaggctgcgaaaagataaagtcaaattcatggaagatgacgccaggcgcgtcgctgagcgtgaaagaaaggcagcagaggagaaattggaaaaatcaatgaaggattctcaacggcaaacgaatgtcgaatcatcgtcgggcggaacgacacgtaatcctttcgaatcgatggaagtgcttcccggagaccccgagccagaagttcctttggaggaattggcacgccaggagaaatttgatagggaaatggcacttgaacagaggaagatgtatgaaaaacgaagagcagagagaaatgctgagaaggatcggatgcgttggggactaccacgcggagtggttcggagaaaggggcattatgcaccgcatcgagggatcaacaaaaggcggaaatggcaccgtggacggcaccttaatgagatccaaactgggcggaagtaccgacgtccacgtggccatgacatttctccgctacggcaaccaaatggcgccacaaccgaattgctggccccaagtttggagatggaaaggcaaattcggaatgacaagcgagcacgggacgagagccagtcaaaggagcccgtgcggtcccagcgacgactcaaaggcagagatccgttggacgaacagttgaaaagagggcaaaaaggacaacaagctgaagagaaccccgacagaataaagctggcaccagcaagtcccggctaccgacgtaccatcaattattcgctgtttacgcgatgtgagcctggtgtaaagggacacgaaggttgtctaaggaattgcaccatgggaagtctgtcccacggccggctaaccaaaatcccgcaagccgaatcgaagcggtctgcctggcccaagccttcgcattcgattggctaggacgtatgcacgccaagaaattcaatgaaaattggtgcgccttgctgggatgcggaagcgagattgaggattcattgaagaattggtggacgaaagtgctccaaaacaatgagaagacgataccacagaagcaactcgagtgtgtgctgacggcatgggacaattcgtgccaagtttttggacaagagtggaaaggaaaaatctatggaccagttggtttggaggatgtactagtgaaaacaaatgtgataagtgcagaggcgcaatttgagagttggctcaggaatctcacggagagattcggccagaccttgaccaaactgagagccaaggagtactggaaggactgccatctccaaagcaagagggtattggttgtgagtaaccaagaagccgcagagctggtggccaaggaatttgaggaagaaggctcgagctggttcgtccattttggtgacaaaccgttgcgggaaaagatgttcccggccaattggaatatcaaaattatcttcaatttggagctgaggagggaagaaagagaagaattggaagtgttcaaagaagacataaaagatatggcaagggcaggactggaagttcatttggcgactcggaaaaatgcacgtttgccgcgagagtttgaggaattcgccgagatgcaaggctgtggaatttaccaatacgaaaaaattggagaactcgcagcggcgatcagaggaacatcgaccaacacgggaacaaatcccgagtcaggagagtcagcccagaagagtacaaccggatggaggcgagccgtaaccaaaagtctgacaggattgaccatgctggtcatgttattgatcacactgttgcaaccaatgatgatcaatggacaagtcattcggccggaacgaaacggcagatggattcctgtaaatcccttcggaagaccactacgaatggaggaactcgttggatttacggagccgacggtacctcggctgagcctcgacaagagagggcaaatcacgcccactttgccgacaacagcggcggatatgtctattgcgcatatccgggaatggtacaaaaaggcgcggatgcaaacgagtggtacgactcaaactttggcagcaacgacgacagtgcgtacgagtaccagtaccagtacagtaatgactactctacgaactcccgaaacgacggtaaccacgagaacgacgacgaaaacgaaaggagtcaccacgcaaccacagtggaagactaccaatcaagaaccaaggacggactcaagacggaggcagtggactcaaactccaagccgtcactggactgatcgaatccgagcaaccacggaaggcccatctcaagccagtgccatgccaacaacgacaaagccgaacccaaccgagggcacggtgaccgatgaaacgaaaccggcggtacgacgactcaatcgagaattggaggaagttcaccgtggagccgaccccatttattggtgtgcccacaaaggatcatccttgtggagaataccggacgcggataaatcaccattctgcaaaccaccgccagggctcacctctcagtggaaaagattgaccatctcactctacatgccgtatcggaagccacaaaaagtgaagaaggcctacagatgtgccatcaaacgaacgaaggagtatttttatactaaccttctgggggatcagttcgttcgtacggagaaagaattcttgccagtacaaaagagaatctgcatggccatgattgaacagcacaaatgcccgtacgaagataagccaatgactccgattgaaggaggcggatggatcagcaacaacccagtgaacgaggaatttccgggaagattctcaagtctaatgtcgggggagcgagagaccgtaacgctgaattgttttgtcgagaaggcgacgctgttttaccgccctcacaattttgagttgatcagcccgctctactcacacttggaggattgcaactatttgaccggaaactgcaacatggcagacaacacaaccctaaattgggaaacggagtgcaaagagagctgcaagccatgcgactaccatttcgtcgaaagtatggacggagagcacacgggatcaacagattgggcaggcggaacctggatatccaaaagcaaggaacaggcgctaacgtttagcaaagaggcgaaaatggaaacagcatgcaatgggaaaccgattcgcttgtcggaccaatcgtttggaatcctggaggatgagtacctgaagatcgtcaacgatcgtggattgggaaaaagagccatccaggaggaacaactcgcagcacaattaaccgcaggacaactcgccacaagccgataaatcgcgcagcttttttccaaggaatgccgaagaagttccagaggaggaaatccgaccattcaggccagacgacttttacgacgcaaggatgttatggccaggtggttaaacgaggacacgatgcaaatcttctcgtgcgctgagttttcaatgcaaaatgtggaatatcaagcagtcaacaactgctaccgctacattccggtccaaatccgncattgacagaagacgctncacgcattcctggatacagcgcttcacatcctcacagcgtctcaccattcgcagacctgtggaaattaccgctaccatatctgcagctgagccagagcattggatcaaa

SEQ ID NO: 5610 - DNA, 2327 bp, Heterodera glycines
acaaaatagtaacaactttctattcctgtacggcttttttaattacactttttttgccaacgaacggagaaaaaagtcggattcacttagttgataataattgattggacgcataaaaatttgattggacgcataaactggacttgagccaaaataagtttcaagtgctttttacgtcgctgatcacgaatacggcaggcaattcgttgtccctatatatcctctgtggtgtatgatagcactgatctgagcccggattcgcgatcagcgacttcaaaaatcccttgaaacttattttcattaattttttaaatataaaaagaaaatttattaaaatcatatgaaatctgtcacctaaactacataagtaccaaaatatcttggacttttaaaaagctacaatcggcaatacccaaaactattaaaatcacatagaaacataaaatcttttaaatacaaattccctacattttttccaattgcgtttcagcgtaatcataaatatgcttgggcaagcattgacacccgcacactttgcacgagacgcgcccattcggtgtgtgggcagcaccttaacagagataaaacgtaaaaatgattatttccattaaattaaggcctaataaaaagtttttaaaattgttttatcgtgtttctcttacatttacaacgatcacaatgcttatgaaagcaaggaaaaagactgatgcttggcgtaaattcatcattgtttgcgctgttgttgatttcggcacgacaaacatcgcagatcaaaaccatgatgtgtaatttggaaatgaaatgctagtctttggcataaatctttctattattcaaagtgaaccgaaagtatctgtaggtttttaattcttcttaatgagtgcgatcctcggtttacaacattttctcgaccacgaaacgtgcccaagccctaatagctagaataccaatgtagcgtttttggtaattgtaattggcaatgaaaatatttttaatataatgccaacaaaagcgaataatttgattttaaaatcatccacatgaatttttttttaattcaacatgtggacgacatgcatatacatacccaaaaaataatagtgtcgcctgattgtaaatcgaaatccaaacccgaacacaaagataattctattttaagctaccgtttagcaaatcaaagattcatatgaagaaaaaaattgctaaaatcattaaaagcaacaactctgttcgagttgctgtgaggtttgtacaaaagacatggctataattttttttaattttaaaaattaggatcagacctcaaagtggcaaagaaaaggaagagcccatttgtctgagcgtaactcctggtgaaccacaacttacaatttcgcgcgataaaacttttacatatggttccaaagattaagtttaatttttaaaaatcggctggttttttagatttcgtcttcgaccaaatgactttacaaaagactgtttatgacaaatgcgtgagggaactcgttgatggtgctttcgaaggatacaatgccactgtttttgcatatggacaggttttttgtttaaatttgaataagtttttcaaagtttaccgtcatagactggcagcggtaaaacattcaccatgggcaccagcttggagggcgacccggccaagaggggcatcataccaaatgcggcacagcaaatcttcgatgaaattgaggaaaggcgtgaacaagcccgcagatctggcaaagtgatcccctcatttgaagtttcagctcagtttattgaggttggttggtggttgtgaccagcaaaaatcggtaatattgtagctgccccacccccatgttttgaaaaaaaaattttgttttcaaaaaacatgaaaatatgtttcctggggttttcggggtcgctaatcacgaatccggcattcaattcgatcaattccgggtatttttacttggaatgaaataaataaatgcctttgcgcttttataaatattaaatgccaaataagcatttttatttgaaatatatataatattgatgatcatgcattactagagcttggatttttatgtgctaaattcctgaaatataataaaattttgctaaaaatgctgaaatttgtgctaaaaaccaaaaaaaatgccaaattatgtgcgaaaatatgattgaataaaatcgtctgccaatttttcggatgaaaatgttctgagtgtacagacattttattaattaaaaaacttgggttttactgggtgcttatttctttaaattgccatttggctctcggatggggccccctccccggggggaaaatcgaaaacattttt

SEQ ID NO: 5611 - DNA, 837 bp, Heterodera glycines
tgccactgttttggcatatggacaggttttttgttaaatttgaaataagtttttcaaagtttaccgtcatagactggcagcggtaaaacattcaccatgggcaccagcttggagggcgacccggccaagaggggcatcataccaaatgcggcacagcaaatcttcgatgaaattgaggaaaggcgtgaacaagcccgcagatctggcaaagtgatcccctcatttgaagtttcagctcagtttattgaggttggttggtggttgtgaccagcaaaaatcggtaatattgtagctgccccacccccatgttttgaaaaaaaatttgttttcaaaaaacatgaaaacatgtttcctggggttttcggggtcgctaatcacgaatccggcattcaattcgatcaattccgaaccttggactcgagttcggataaaaagtcgtgaattcaaatttttcgaatttccatttatattgtatatttgtgcgtcaacttttgtagctgtacaacgaagaactcattgatcttttgtcaccggaccgggactcatcctccatcaagatcaaggaggacccgaaaaaccacgaaattttgctgatgggcgcatcatcgcgaaatgtcacttcgcaggaggccattctgtccgcgctggccattggtgcccaaaaccgaacaactgcagcgactaacatgaacaaacagtcgtcacgctcacatgccattttcaccttgaacatcaagcagactcgagtggtgccggttgatgtactggatttttttgggagggggcggcactggtaaagaaacattggttcacgaaattttttttaattttagaaaa

SEQ ID NO: 5612 - DNA, 1432 bp, Heterodera glycines
atttttcgggaccaatgttctttactattaacccccccgcgggtggtgtgacattttattatacttacaattagtattgtataatttaggacgattcagacgagaaggacaacacagcggatgaaggtgatgatgtagaggaaagttcggagaagatgggcacaggagctgaagtggaaacgttgcacgccaagttccatttcattgatttggccggctctgagcgtttgagcagaacgggcgccaccggtgaccgagcaaaagagagcatcagcatcaattccggactggtaaatgaggggagatgtgtctgggcataccaaatccagggctatatataatcatttgggctcaaaactgacaatgagaccaaaatgattttctttggttcactatttagttttttcacgttttacatttttttaaaaaagccatggtttgattgagcagattagccatccatcacacccctttacaatgacttaaacttggatttttgaaaattcaaagttttcatattgaaatattgggaaaattattaatgcacagcaatttggtaagcttttacaatccacagcttgcacttggtaatgtcatttcggctttgggcggtgcaaaaggtcgaattggtagtgtccatgttccgtatcgcgactcgaagctcactcgtctcctccaggactcacttggcggaaacaggttggaattgcaatttcttttctgacaaagtaatcactgtttagtcgaacatttatgcttacgtgtgtcagtcctaatgaagtggatgccaatgagacgctcagctcgttgaattatgccaaccgagccaaaaatataaagaacaaggtcaaaagtatttcaccgttactcaattgtcttattttttaggtggttgccaatcagaataaatctagcaccctgattacggatcttcgcatcaaaattcaactgctagaagctgaactccatgaatggaagacggtatttagattgatttcaatattgttggttcatgatcaatcaccacttttaggggaagagacgtaggtctgggcacattgcagttactgagcctgaggacaaaaacagtaccgaacaagtttttggttgcttggcgagattggatgaggaggaggaagcggaggatgctgacaatgaggaagaacctggagagatggaacacgaacgaatctgtacggacttggacaaactgcaggagaatatcagcagcaaagagcgacttatggccaactacgagaaggaactcgagaagattaagcaggaaatcaaccgcttggaagagacgaagaaggaaaacaaacaggaaatcaaccgcttggaagagacgaagaaggaaaacagcggatgaaggacactttcgatcgtcagatggaggagaaggcgcgcttagtcagagaagtggagtcgatga

SEQ ID NO: 5613 - DNA, 2858 bp, Heterodera glycines
  unsure (1)..(2858): unsure at all n locations
ataagttaaattttgtaaattttagtaaatattaaattatagtaataaaagaacttccctcccgtctttgtacaacacaattaattgcaggtggatttgatcaaacggcagcgggaagagaacaaacgcatccgcgacctgatgctgacaaataccaagaaattggcaggtcgtgatagactgataaggtgagaatttatgccttttgttttaatttaattccccccacccccttaaggcagcaggagatcaaaatacagagactggaaagggcgaatacgcaaaaatcggacagccttaaacgcaaaatggaggaaatgcaaaaattgaagaagaaggtgggttactactttctttgataaaggactcacaacctgaatttcaaaattaattttgtgctaccggtagtaataagttcattgccgtaatttttttcaataacataggttttcaaaaaaaagccatagaattttctaaaaaaaattttgcggcgacgtttatttctcggcgcgcttttggccggcgatgtttgggtgtaccgtgcgcatgcttttatgttgtgcagcatttttttacttttaaaatattttgaaattgtggcccagaacaaaaaagtaccccaaaaaaatgttaaattttatttagaaacctttatctgctaactaaactcatattcaggaaaggcgtaagacaatgttcgaaacgaacaatccacgaaagcctctaacgccaataaacgagcaactgactccagagagtaaacatctcgagcgcctgaacacgacatacattgttgatacgccatctgaggaacagaagaaagggcgtttattgggagaattaccggaggaaaaggattccaattatcaaattcccccccttttgagtggttgttgtccgaaaggaccttctgtttaaacatatgattatatggtacaaaataaagaacatttttatcaattgttttactggtgagataaatatccatcttactaatgcagttgctcatcgatatgcgcttattctacgtctaaacatatttttgtatatgtatacgtcttacattttttgtttcccgcagtggctcaaaaaatgaaattctgtcattacattaaaaagggggtgcaagggatttaaatagatttgaagcattccatgacattttgtgcttatcatttaaaaaatatttaaaaccctattcataattttttttaaacaggatcattgcattgattaatttttttaattttgtaaggaaattaagtcgggtacgtaaaaacaaactagaaaagcctgacatactaaatttgtagaagagttttgtggcgaaagcattttcaagggcctgatgctttatttttatttttttgtctcaagttgcacctatttacgaaggttaatgtccgggagacatcatttgaatatgtgtggcattatgtttttgttattttccccctccactcattcattgttgacccctcatatttttgcataaatacccctccttccttcctccctcgttcacttttcttcactttgttatttatgaaaatttttaactctccatttgtccgttaagcacaggggaatttactttgggttacaaagcttcaacaacatgcaaagtgtccaatcgtcggccaccggggcagtgaccgccgcttccaccgttccgttgagcattcagaatgaagtttgttttcgctggaagtatttaaataaacaaacaagccaataaaactgattttaatttcagattttgtggatcaaacaggacgctctccaagttcgcaacgccgtcattctcttggagcaggagaaggacagtcttcgcaaagcaattcgcaaactcaaggtttgcggatagaaagaaacaaatttaacggtgaaatttgcgttgggttggtttaagcttttttaattttcatgatttttttacaaaaaaatccctttttagttggagaatggccgcctgaagacaaaggtgaaaactttgaacgaaaaggtggcaaagattagcaacgaggaaatggacgatgaagagggaaaattggcgcctgaatctgaattggactatgacgaactaaaccgaggggatttctacctaatcggaggtgtccatggtaagtttcgaacttttttgtgaagtggtaaacatatataaaatcttgaaagttgtgaaagactgaattactaaaaacctataaattcaattttagacccgatcagtcttcgttttgaagctgcgatccgtgaccaaaatgccgtcgaacataaaagtgccgaacgctactactggtacaaaatggcggaattctttggtgacgaggaagccatgaagagcattctgcacgcgcagaatgtccaacaggccgaagaggccatgaaaaacatcaaaggcttcgacgttgccgaatgggacaaagtcagttggaatgagaaacattggtggaaaggaaaagggttttcaggtcaaacttaaacattgggaggacggacagcgtctgaagcttgagcaagtccgttggatcgaaaatttgctggtgctgaccaaaaccacctacttggccattgcctctgaagacaaagtcccccccccatcggtccactttttactgtccatttttgcagtttttcggcactggatggcgcaagaatcgcgacgaggccaacaaaccgatcttttgggatgggaagaatgagggcgggaaagtgatgatgcacattcgccatgagctgaagtccaaacactcatggactggtccacaggaggaagaggtccagcaaatgcacttctgcccgtcttatactcaacaccattntccaggagtccaatacgaagttgcgcgagatgatgc

SEQ ID NO: 5614 - DNA, 2453 bp, Heterodera glycines
attctgctgaacatttccattgctcctatccctcggctttccgttgtgccgtcatttgttctctccgtcgttgccattttcatcgcttttgtgcaaaagccgtgcttttgcgattttaaactatttgctcataaaaaaaaattacaattttatttaaagcatgcgccaaattgaaatgtgtggggcgttcgaatgataccaagttcgttagatttggttgaaaaacaaaaaagatagcacagtgcggaacgggccaactgcgtctcaggcaactttaagaagtcataacttttttcacagttgaccaaatcgaataaacttggtatcattcgaaagctcttaacaagctctatcaattttccaataatcacaaagacaaaccgacatgtaaaaaaagttataaataaaaacataaaaattttgacttttttgcagtgttcatgttgcaacgttttaataatttttcaatcgcttagaaataaaaatactgaaaaagggatgaaaaaggcaccaaaggtcaaaaaaggcaccaaaattacatgccctggcataaggcaccaaaatcgcaaaaaaagaaagctcaagctagaagcttcaaaccaagttaaaaacgtgtttttcgtgtttattaggccgtagcaagttagcaacaaaaaaaaggcatttgcctcaaaatctggtccctactgatcaaaatgatatttttttgaatttttccatctttttttcatgcatttcgccaaaaataataattaaaaattaatacaggaaatcggaacgggccaactccgtctgagccaactttgagtcaatataactcttgaagttattgaccgaatcaaacaatcttgatatcattcaaaagctcttcacaggctctattagcctactaaaaattacagaaaatttcgaactataaaaaaagatagaaataaaaaacttcgaaaattctgccttttttgcggttttcaactgacaacttttttgagagctgattaatcactgagaaatagcttataaatatcttctaaacatctagggctttcgaatgataccatgattgtgaagtttggccaacaaagaaaaaagttatagctttttgaacattgctgagacggagttggccagacggagttgacccctaccgcaggaaatacaagtttttgtggcctgtacctatacctgtgttccaaagatggcctgtacctgtattttctgtacaaaagtacaggaaaaaagttttacctcccgcccccttgacatttttatctctacttaaagctcacaagtagcaattcttcggcattctaattattgaccctttcctagcgggttaagttccatcgaaggcgcatccaatccaaatcattgtttttgtaatttttgctcgatgcaaaataaaacgccacggaaaatttcgtcatttttaaaggggaaaaaatcaatttgtttttgtttgaagaaaaactcagagattttttccctagattttgacattaattgttgtttttcaacttttgaagctgcacaaaacatgttcgttgctttggaatcgaatccaagaatttttaatatggtattgcaaccgttgatagtgaatttgattgttttaatttagttcctcgatcaatttggctttgaaggggtggaattcaatgagcttttcggatttgatcctgaattgatcagctgcgtgccaggacctcacttggcgctcgttttctgctacccttaccgggagaaggcgtttgaatatcgtaaaggcatctacggacagttggtggcttcggacaaaggcatcgtgccgaagtgggccttctttaccgagcaatttattgctaatgcgtgcgggtaccacgcagtgcttcacgcagttctgaacaatttggacaaaatcgaaatatgtgagttcatttacattcgttcttcaacaattttttttacagctgccaatggttattttgccaaaatgattgagcaattcaaggacaaaaagttgaaaagcgaagaaacagaagagatagaagaatcaacatcttcccaatgcacgagcgaagactttgtgtctcggatgacggattttttcagtaaaatctctctggagggctctgagacggatgtgtctgggaaaattgaacaccatttcatcgttttcatcgtccgcgacggacatctcttcgaatttggtgactttctaattaatgaaatgatgtgagccaaacgaaaggcgaacttttctatgcacttatggggcgttatacgaatctgacattatttcaacaaactccgaacccctaacctaaatttgaacaaaaaccgaaactcgagaaatttgcattcttttttttttgttcggttatgggttaggaattagtctaaattatgtcagattcgtggtctgtggccccgaaaacacccgtaaacagttcacgattaccatctaatatcaatgt

SEQ ID NO: 5615 - DNA, 1283 bp, Heterodera glycines
aatctgacatccatttttgaccaattcgaatccttaactcaaacaacaaaatagaatttcgactttttgatttgtcttcgccatatttaaattaagttataaataaatattatttttggtgttttttggggatttggcgaccccgattttttgttaagataataacattttggggattagttttttggcacttttttccattttttctaaacattgctaatctgggccaggcccaaacattccctcccaaattaatcccacagaaaaatgtatcagcgaaatgacacgaattgttcaatgttttggcccgcgactccttccatctgttgaccaccccacgcttggcccggcccgaattgttcaatgcttttgcccgcgactccttccatctgttgcccgccccgcgcccggcccggcccaccaatcaactctttccgcccaccgcaaatcgcctatatactgtgccccgcccactccgatggacgctgctatttaagaaggatgtgccaatgacttctcactcgctttttttctcactttttctccgctgatcaccaacgacgaattttctcacccaattttgccgaattcatttaaaataaaacaacaacaaaaaaaaacttttctctcatttgttcacattgtcccttgttttcccttgcttacaatttgaccaattttggcgctccgccatttggcccccttgcttttctcctttctcgccttgctttgaccaattttggcatttgccatttggccattcttcgcttttccatttgcgttgaccaattttggcgttcagccatttggccatccctttgctttctcgcctttgcttcgtccaaccctttggcactttcgccctcggcatttgcctgctttttctcacctttacgtcggccgaccgcttggcttttcccttaggtcgcccttttcctatccctttcccctggttagcactcactgcctcgggaaacggaagctttttttggcgcttatttgttttgagtgttctgctgaatttgggccccccccccttctcttgggcgtaccccctccgattcccagctgttgaacacaggggattaagagtctggtgctcttgtcacgaaaatgagctaaccgagcaacttttagtttaccttttttggagactcccgaactcctaattttgcttatttatctcccttttctgcctttttgcttaccccgtgccttttcttctttctctttttgcctgcagtactttttcctttgcttacctaccctcttttttatttttt

SEQ ID NO: 5616 - DNA, 4911 bp, Heterodera glycines
accttcctgcgcttcagctacctgactttgatgggcctccaactgtggccctcattctgggccgctttttcccataccattcacgataatgcctctctgacgggcgcgcaaaaactcacctatttagtgggtcgcctaaggggtaacgcccgcactttggtggatgggttcgcactaaccgaccccaattatctgatcgtcgttgaccttttaaaagggcggtatggcgacgatgataaaagggcggaccgcctaaggagtgagctcttccacttagctaagccaacagggcattcctcatcattaagagccttttctgagaatgttgaccgaatttgccgacaattggaaagtctgggcaataacttagatgacaaccccttcctaactgtggccataaaggaaaaattgcctacggaaataaaggcacagctttttgacaaggaaatggaagagggaggaccttggacatcaaaaacatggagggaacgcttagcacgggtagttaagcttaaggaggccgtccacgccccgtgggacaacaatcctggacccacccaacctcatcccccgagggcaccaccacgttttgttgagcccatccgacgctcttttccggttgttggggaaacccgaaatgggaatggacaccgggaatgttccctttgcctctccgatggacataaaccctcaaattgcgtgttgtaccgaacggtggaccaaagaagggcccgcctcgcagaacaagggcgttgttctctctgcgctcgtgaggggcaccgccacgaccattgctcctctaaatctctctgtttccgctgcggggggaaacatcatctgctcgtctgtccaaacccagaaaagaccccggccaggggagggaattcggtccccttgggccccagatttcaaacggcacccaatttcagtgggtctcaaaaaggcgtgactcccacttccttggtaccgagtacgggcgaaaacccaaacgttgtgtcctcaatttcgcacaatgaaaatccatttattctttcccctgaggcacaaccccgaccaagagcttatttgatgattaaggaaatttttgttttcaacaataatagcccatgtcctacggtagtccccgtcttttttgaccccggttcccagccgggtttcatcgccactgatctcgtttctctgatcagtcccagtctaatcacagaggaaaatatgtctgtggggggatttttgggtaatggtccatctcaaccaatacagttcaaatcgccccgtttttcggttcgcctccggcgaagagacggtgggtgggaaacggtagagctgaatcagaccgacaaaatcatcccaccggtggagtatttaaaagaaatgcattggaaaggccctaaggtattcagattgggggcaacaacaaaggaaccaaaaattcttttgggaatacgggaattttggcgattttttgggggatcccgagaaattttccccggtcttttccgcattgacactgtttttgggccactttttggaggcgaaatggatggttttgccccccgttggccccagtcccccaattaggccctcccatggcctgcggagcagtcgttcaggccgaaaagccggacgaactggtgaagcggctgtggagcctagagtccatcgggattgtcgatcctctggacccaaatgatgaagcattggctaccgccctttttcgggactcaattaaatttgaagatggccgttatgaagtgggatggccatggcgtcctgggggcaaggaccggttgggcagcaatttctctctcgccttttcgagactatcggccttatcccaaaaattacgaaataatcaagaatttcgggagaaataccaggccattattactgagcaattggaaaggggcataattgagccagcaattcgcactgggggccaagagcatttcattccccaccatgcagtggtaaacccgaaaaagttgcgcgttgtttacgacgcttccgcgcatgaacggggaaaggcttccttgaatgaactgctgctccctgggccaaatttggtcccggaattggctggggttttacttcgtttccgggccacggttcaccctgtcctgggggacattgaaaaggcgttcttggccgttggccttaagaacgaggaccgagaagtggccaaatttctctggcttaaggacccctcccaacccccgaacaatgacaatttagtgatctaccgcttcaaaaggatcgcttttggagtgaattcttcaccgtttcttctggcctcggtcttgcgctaccatttggcctctttggggaaccccttgggcctggaacacaatttttacgtcgataatttgctcctttgtagcgaatcggtcgaagaagcagcccaagccgttcaaactgcccgagaagtgatgagcaaggccggcatgcgtctacacgaatttgtagccgctgttccatccgtttttcatggcatccctcctgacgaagtgttggtgggcgaagaacaaagggttttgggcattttgtggaatttggccaaggaccaaaataaatttcgaattcccccggaccagcgacttccccccaacccgccgagggatccttagcgcaatcgcatcattgttcgacccattgggcctgtgcagtccctgcctcgttaaagcaaaaattttcttccaatcactttgggacctaggcaaaggatgggacgaaccgattggggagcaatttttaaaagcatgggacgcaatcatttctgagtggagcggcccctccctaacatttgcacggcaaacccccagcagccaggccacccttcagctgcatgtgttttcggacgccgggccaaattcttttgccgcagcggtttacttaagggcacaaaggggagaccaggtccacatttccttagtctttgccaagtcgcgtcttcgtcccaaaaagttcaaaaatgatggcctaaccatccccaaacttgaactgcttgggctgatcacagcgattcgggccaaaaatttcgtgaccactaattttgaacgggtttttgaccaggtatttttttgggcagactctcaaattgttttgtcctggctctccggcaacagcccccaacccgtttttattgccaaccgtttggccgaaataagaaaagaaaaaagtgctatttttcggtatgttcggtcctctgataaccccgctgacttggggacgaggggggcatcacccaaggagctctgtaacaacggattgtggcactttggccccgactggctcaaattaccggaaaataaatggcccaatgagtttagggacgttgttttcccgccggatgagctccaaacccaaggaccggagcaccccccgatttaatcattgcctccgtttttgaacccccccgccgatcccatcctcttaaatccgcggcgctttagcagctggtctaagctgctggccacgacctcttttgtcctttattttttgtttaaatttttggggaacagtgaaaaatctagaaataagtggccgttcttcggggagcttgaaggggccgagccgtcgtcttgggcgtctaagaatgtggcccgaaaatggctcctaaaaagggaacagatggaaatgtccacggggggcgaagctctcatggggcctgacggcttaattcgtctaaaaacccgcctcgttcacggcactcaatcagctgattttaaaaacccagtcgttctttcccgggagtcatggatcacccgtttgctcattttgtccgcccacagttccctggcacacgcgggcgtggactatacattggccagttttttaagccaattttggtgcccccgggcacgtcgcttaattaagagctttaagggaatgcctaatttgtaaaaaggacaaggctattaaattcgctctcccagcaatgccaccccttcccccgtcaagaacaattccaagttcgccattttcctttgttgggctcgactatttaggtcccactctttttaaatccgaggaagggcaaaaaaaggcttggattttgcttttcacctgcctaagctgtagggcggtccatttggaaatggtggaatcattaagtgccgctgattttctttcggcatttcgacggttcgtcgcccggagggggattccaaagcggatttggtcagataatgggacccaattggtactggggagacaacttttgaggctttattatgactttcccgtggaatggaaactgatcccaccacacagcccatgggcaggaggggtttatgaaaggatggtggggttagtaaaaaccgcttttcgtcggagtttgggaagggcaactcccacccgggtccatctccatacccttacctgcgagattgaggcaattttaaacagccgaccaatcacatttgtttctgacctggaagatggtcctttgcctctccgcccgttggactttttggcccccctttcccaaaatgaggtggtcgaacccgaggaaccggacccagctttccaaccctcctcgtctgaaaaattggcgcacttgtggcacgtgacgaatgagtcacttcgtcgtttttggaaaatttggagtcgggaataccttttaatcttgaggggcaggacccaagacacccatgctggtccccgactttttgcccccggcccgcctaaaattggggacattgtgctaattcaacaggaggaaattccccgaaatcattggcctctcgggcgaattgtggctctaattcctcccgataagccaagaagcgcaaaagtggcaatgggaaggggaagagaattggagagatctgtcatcccaaatttcaccccggggaacacttaaggccaaccgcttaactcgcttaggttacgctttagcgccacactttttct

SEQ ID NO: 5617 - DNA, 1015 bp, Heterodera glycines
aaaaatgaattttatttgtcttacaatggatcgaaaaaagatttaaattcttcaaaaatgtcgtgaacacaaacgatacaatgacagcgaaaacgaagggaattctgagcaccacgaataaaacgccgaaaatgatggatgcgacgataattttgaagaagaatgcgccatcatcaacttcgaactcggaaaaacaaaagcgaggcatttgtctttggtctgaaggtgggaaatttgatagagaattatgaaaagttgtcaaaggttttcggtacacgcacgaaaaaaacgtccgatggaggtgcactgtgtgtgctgccatgcccgcgtgacaattgcggacaaaagtgacagcacatgtccggttttctcggacaaaaagaacaatcatttgcctaagcccccgaaacaaaatgtttgggaggcatttaattcattagacaaagaagaatttggcggaaattcgacggcaaaaaactcgagcgcgtgaaagccgaaccccgaatcaggacaaattgcggctggatggcgaggacatcgtgctctacgacagtcgcactgtcagaattggagcaaagaacgttgtgctcgtttttgggtgcgaacgggttgtctcattaggggccaaagacagaatttatatttaattttttagagtttggacatttgagcaaaaacagtgcaacatggcatttggacgggacaattatgccgaaattcacgatgttattacggatcttggtctgcaggtcgaaggatacgcagaaaaattgaaggactattcgacgcggcgacattatgacgggcagcgcattaggcagagcaactttcaatagcatacatatttaaagattaaacattcgtcataatttgtcttctcttttttatcggttcatttcatcttccggccctcccctccccttttttcggccgatctctccccccccccccccattctctccctcttttctcccatcagtcgttcattttcaattatttctttctcattttgtgt

SEQ ID NO: 5618 - DNA, 2984 bp, Heterodera glycines
tttggcagacggtcattcttttgcctttccaatgtccttacgtgccttttccgtttagctcctcgagatcatccggtgcataaatattgggaggtgtcttcttccgttttcttccccctccgttcattccccctaattacccccttaggctggtttgaccggtgaggcggcattgacccccgactgtctggtgaacattgagcagtccggcaccaacgattactggggcatccttcacgcgttcccaattaatgaagttcttcgagcacgcatttacgacttggaggccatgctaagagcagtgatggccaaggaggaggagacaggtgggggagggcgaaaagcattggaaaatgccggggaacactcatttgtcagggaggaagcacgccgtcctttacgtgatggacttgacggggctgaagtatgaccgcaatctgatcactctcttggcaatataaaattggccaatttggggccaattagcatcattcccttcagagaggggctctcagtgccatttccgcctttataaccgaacattacgttgagatgatccacgaatttgtgctcgtcaatgctccgagttttattagcacaatttggtaagaatgcccactaatcgacccatcgatcgatcggatatttatggccaaattaaggaccatcgcaaagccattgctgcccgagagaacacgcaacaaagtgcaaatattgggcaagtcgacttggcgaagcgaaattttgcaaatggcatgtgccgaagcactgccatcgttctggaatactgaaggggaagagaaggtgaacaaagaaaaagaaatgccgaaaaaggggaaaagtgatttggaaaaggcggcgattggcattttgggagggagaaaagactgatttggcattcattacttagtaccattttacagcacttcttggccaatctgaagcgatctccaccgattgacgtgtcaaattaccacaaaaatggtcagcttccgcccggcttttacacttcgcttacaattggcgctggcaaatgcggcacaatcgaagtggaagcgacaaaagggcaaacgcttcgttggcaaatcgaatcggacggccatttttcctttgcggttcacttcaaaagtgacgaaacttcgccccgtctcgtctacccacgactgaatgttggtggaagaacaaaaactgatcggacagaacgaattgtgtgccatttcagcaaattcccggcccaacttttgtgcctgtcgacgaccatttgcaatgcgacgcgaccggcgtttatcagatttggatttccaacgaacacgcgtggatacactcgctcaaaatgcgttaccgaatcagcaaagaatgagagaataaacgaagggggggggggagggagacgaaaaagcattgaccgaaggataagcattgacccgagggagacgaaaagcattgacccgagggagggggagtgttggcaatgtgtcattacaaaatcattgtttgttgcacactttctcacatggatttactgcatattggacagtttattattatatttatttctgctgaattaaatgcgacagcaaatgatttcttggactattaataattatgaataatgctgaaaatgttttctttcgtttagttttttgcttttcgaatgtttccgctcagaaatttggcaattggtatcaaaaagaattgaatgattgagatcaaagagatgcccaggaagaagttgagttgaccgccgatctgagagatgaacccttaaaatggaattcatttggcactgatcggaagaccaaccgggggcagttgtggtcagctgttcctcgtaatattcaacctgaacggcgggcattcaaaaaaacccccgctgatcacctgcaaattctcatacgaagcctccaaatggaaaacgaagggatttttcgtttcgaacttttcctgttggtgctgaaacttgtggaaatacagctgagtgtcgacgatgtctctttggcaggagggcaaacactgaaattgttcaggaaaagctcaaaaagaccaaagggtccgtccgaatttcccacctttgacaaattctgatactccgatcggttgctgactacgttaagcaccgatcggtaattcaggaagatcactttcgggtcgcacacttccaattcggggtttttgtgggtcaaatagaaaattgtgcatttgaatggtttggtgacgcgctctctgagcaaattgaagtgaaatggaaggaaaagcagtgaatgaccagtcgaccgacctcaaccacgaatcgacgtaacaattgcctctttccatggtccgttcggaggaacagtgggggttgggctggggagggaatggtgaaggggttaaggattttctgtttttacaaaataaaaaacattggctgtgttcaacgaatgcaacggaattctcagactttttttgtggccgtaattcaaaatgcaaaattgatttgaaatcttcattttggttggtgcttattaaatggtaaaaaccaacccaagaatccacaaacctaaaactacagtatttttttgtacacttttgtaagctctgatttcccccccccctcaaaaaacaaccgaaagcattgaaatgcgtcgcttcttcagtctgattctgtaccacgtgtggttgttcaaataaaagcgtggaaaggtggcgaagtcttcactgttttgcgatatgtaagccacgacttgtctctgaactaagcattttatgcacacggaaaaataaccaaaaattaaaaaaatattaaaaaacgaatccgcccgaagggattgaagacacaaagaaacatcgtcaacaaagtttgaaatctcttttagttcaaaaggttttttacttgaattccttcagcatccaaaaacggagaatgcatttgattgaagtaaaaggtgagttttgcccgctcatcgggcgccgtttgaggaaagtcccgcaagacaaagcagcga

SEQ ID NO: 5619 - DNA, 963 bp, Heterodera glycines
tttcgatagtaagttttttatttgtttcttatttttatgttccaaatggcgagaaaaagcttatattggtgtcactcggaagcttaaagtctctggaatttatcaaactcactaaaataataaatagtctttaggcttagaaaatccaaagagataaaaaaaagaataggagcttctttattcaaaattttctgaattttcatagatttatatttttttgcaaaaaaactattttcaaattaggcggtcacagtcactaaattttaaaacttgcaaatttttgctgagtaaaaatatttgagttttgagcgaagatagcactttaaattttttaatatttaaatttaataaattcatttataatctatttaagaattcgtgggggggggggtcgcttggacggggtcagctcattgtcaatctccgcacttacaatttggcttgaacaaatcgcagcatgggatttcgcgtttgccgtagtagcaagattggaataactgctcggatttgatggcattttgcgaatagaattccgctgcttttttgacctgttcgcattcgtatccattttcctcgaaaaagaacttgaagaattgcaaattgctccgcgttttgcgccactgtctgaaaagcgtgtccaattcctccacctccgagcggtccgtcagctgagtgtacgcgtcgaaatgttggaaacccgcgccagccattgcgaacatcatcagctgattgactttgtgacgggacagatggggcaggtggagacgcaaatcttcaccaataaaagtcaagtttcagtggcaaatggccaacggtacaaacagagaaagtacagtacccttttcaatggctgcgaaattcactgtgtcgacgtgtttaggacagaaagaaatatttgggaagtgaaggctttggacctgacggattgtgttgagagtgacctgaagagagggcattttgagt

SEQ ID NO: 5620 - DNA, 1279 bp, Heterodera glycines
gttcatcttcaagttgttgtccatctccagtccattccatttccattcatctctatttgcttcccttcgcactaccatcgatttcatcacaagttcataaatactcctcacatctgtcccccccccccacattttcagcatttattcattttccgcctttcttttgcaattgctttggttcgtacattttgtcaactttgctttgtcgatgttccattccaactcttcttcttcttcaacgttcaactccttctccaaaatggatgagttgtgctgctttctctgcaacaacactttcactgaggtggtctttcgtccgttcattagtttatttctgctgatcactctgatcggctttaccttggccaccattcagcctctaatgctcagctgcggccactccttctgccgtctctgtgtccagccttggctccgccgtgccaccgtttgccctttctgtcgttgtccgactttgcagcccatccccaacacaacaatcactcaggcgcattcttttctcaaatttctcagattcatttattttagagagtgtccgaatttaagagaattaatgccgaaaaaagcaattttattcgaagtgccattcgacgcactttccattcatcgaaagaagtgaataattaaataaataaaaagcaataaatattaattaggaaattaaggcaaaaacacttcaaagggaggcattgagggcaagtcaaaggcgcccgagaaatgttgtgttgccgaaagggacagaggagaaaaagggggaggaaaatgccgaaaaaggagtgggaggacaaaagcagcagaaaaacacaggggaaacaggaaatttgcggaagggaattggccaaattggaaacaaattagccattgtgcagcagcagcagcaaatgaatggtgcccatttttgagggggtgctgtgtcgaagtgacaaaagtgcgaatgagtggtgatcagaagagggggtccacctcgtttcggcgctcacgtttcggcgccagcatgtttttccactatagctttctctaacttttttcattgtcatccaaatccaacatttttgatatcgttcgaaagcttaatatgtttagaagctttttctaagctattgcttcacgattagacaaataccaaaaaagttatacatgaaaattgagaaaaagtcgaaattttaaagttttttctcaataaaattttttccaggcttgaaaaacttttcgtttttgataaggctaatagagcatgttaagagctttcgaatgataccaa

SEQ ID NO: 5621 - DNA, 1725 bp, Heterodera glycines
  unsure (1)..(1725): unsure at all n locations
ttttaaaagaactataagatattttttcaggtttgagtcaagattttttggggcactgtatttctttcataaaaatataatttgtttgggaaaataaaaataaatcgaaattataaatatggtcaataaatctaattaatagattaaaataattatattattattagttaaataaactaattattccgtactgaaatgacacgcctcttctgatcaccactcattcgcacttttgtcactttgactcaccacgtttgaggggatgatgatgaaagtgccaacagtgagtgttgggtggtcatttgtggggttcgtttcatttcctctggtgaccatgctttatcagctgtggatgatagtgccagcgaagggtgcggcagtgcgcactctttccgttccgcgaccacttcctccgccacttctctcttccgtcgctcgccttccccggcccaaaatgaattcactgttttggtaatttcctccgtcgattctctacaaatggaacttcgaagtgccttttctgtccatttaaataatgcgcaacacatcgaattgtcagagagaaacgaagtgagaattatggcaattagcgtgggtaattaattagttcttttataagtattattaatgattccttttcatttaccccccaccctttttattccatcgcttttaagtcaccagccgaagtgaccgacgcaattggaaatgcccaaagagtggtggcgatttatcgaattgacaaaagcgaatcattcgaacgaattcgaaaagtgttcgaatattgttcagcaaagacaattaacacaatgaaagaaaaggtcaaaaagaaattaacataagaatgaattgagcggaaaaattcagggaaagttttcgagtgattggactgataattaaccaaagggcgagggaagtcggacgaaagagtggccaaaagttggccgattcattggggacgaaattcagtgaaattggactgacaatgctggagaagacggtgggcattgggcttttgccaatttagtcagtcattgtgccaatgattcagttcccaatttggttccattgccctcgaccaaatttggcatccgtcgaattgtctctgtgttcccacggcggcggattgactggcgtatcgcctctgtcccttcaacttccaacaatggcacgaccccaacggaacggcactgaaccgatcgcttataaagagtcagccaaagacgagttgcgaccggcaatgggactatcgggaagtgcgataagagaacagcaacagaagaagaagaagacgaatatcgaaggaagagagaaaatggaagaaataggaggagaagggaaggaaggaaagaaggaagagggcggaggaggaggaggaggagcaacgggacgagaaggaagcggatgcacactgatgtgacacaacaccggtcaatactgactctggttattaaagaggaaagagctgctttttaaaaaagattcatttatgctcggtcatatgttcatccatcaatttaattgttttgtttaattgtaaattataaaattaaattaagttttaaataatttatgttatttggaagcagaaatctgaaaaaaattcttgttatcttttcgatagctcataattttgaaataataatttaaatgttattcttcttgttataacaatttaaaagtggtgaaatttttaaaaattacatagccanaatagagaattag

SEQ ID NO: 5622 - DNA, 1172 bp, Heterodera glycines
taattagcaactataaattaaagtgacaaataatataccccacactgggttaaaagatacaatataacatatatatttttacccttttcatcggctcaaattaattaaaaaataaatattttttaattaagttggcaaatatttattataataacattttgaataaaacaaaataaatttaatgaactcaaaagattttttaacgatattcgcaaaataaaatttcaaaatttattaaaaataaaaaaatgaaaagctttatttataaagaatttgaaactaaataaataaaaatctttgacctctaaggatttttttttacaattcttcttaataaattaatttataataatcattgtgaaatttgttatttcacttttaaattaacaaattattttataaaattaaaatttaatttaaaagaaacaaataattgtactataaaaagtaataataatgtactaaaccaaaaattgaaacatttaagaatatttaaataaaaattgtgaagcatttttgatcaatttacaaaaaattccaaatgtaaccatttttaaattaattaattatatttattttttactttgaaaaaaaaagatctaaaaacaacttttcaaaaatgataaatttcaacgataggaaatcaaataattattttgttcttttctaaaattgaaccctaaataattttttttaatattataataaaaaatggaacataataacgaactaattaacgcacttaattgacaacacaaaaaagattaatttattaagattgagtattaaataaattttaaataaatgaaaaaattcatgaccatgactaacaaagttactcagagaaaatgcatggaaaaattaaatctttttattaatagtgaatgaatgaacaaattaaataaaattaaattatttttaatactaaagcaagttttatattatcaaattccttaaaaaacttacaaataaaagaaaaaaaacatggatcagaaataaattatttaccaaagaaaattcataaaatcaaaaaaaacataataaattattactatagcatactccgctgaacgcacataaacaaccactactggacatgattaaaaacaaaaatattaagcataaataataaaggacaaaaattttgcaaaagaaatttaattctttatttt

SEQ ID NO: 5623 - DNA, 3478 bp, Heterodera glycines
  unsure (1)..(3478): unsure at all n locations
gacattttatttatttatttattaattgataattttattgttaatatttttatttttccaaatacaatggagttatgaatctatttttcaaaaaacaaaaaataaataaaaaggataactggttaatagtaaattttgatgtgaaaacagagaaaatcggtaagatttcaatgattttttggtcttttgaagtcattgatgttttttagtcaattgaaatgatttgactagtttatgacaaaaatttaggagttttgcttttttcatgttgaggttcatacttgctatatcctcgtcaaatggcaatcattctaagcaagtttttaaattttaatatttcaatttttgcttaaaaatttccttgccaaaaaagtacaattatttcaaatttttttattttatttaagaatatttaaataaaaattgtgaagcatttttgatcaatttacaaaaaattccaaatgtaaccatttttaaatgaattaattatatttattttttactttgaaaaaaagaagatctaaaaaaacttttcaaaaatgataaatttcaacgataggaaatcaaataattattttgttcttttctaaaattgaaccctaaataattttttttaatattataataaaaaatggaacataataacgacctaattaacgcacttaattgacaaaacaaaaaacattaatttattaagattgagtattaaataaattttaaataaatgaaaaaattcatgaccatgactaacaaagttactcagagaaaatgcatggaaaaattaaatctttttattaatagtgaatgaatgaacaaattaaataaaattaaattatttttaatactaaagcaagttttatattatcaaattccttaaaaaacttacaaataaaagaaaaaaacatggatcagaaataaattatttaccaaagaaaattcataaaatcaaaaaaacaataataatttattactatagcatactcgctgaacgcacataaacaacgactactggacatgattaaaaacaaaaatattaagcataaataataaagtacaaaaattttgcaaaagaaatttaattctttattttgtataatgtggcgatcggacaacgacaaaaaaatgatttacttcgttatgttcatgtgaataaataaaataataaataaaaattacaacagataaaagaatttacgcgataaacacataggacttttcttcaaaattttccctatttttaaacaaacggtaaaaatttaatgttttaaataaaaaaaaattttataataattgaacatggaattatttaaaaaaaactacaaacaacaaataataataatataataaaaacctattttctccttggggtcaatttattttcttcgcatttcgtgcgatcatttagagttacacgggtccgggtatttggacaaaaaccgggtccgggtattgccggtctagaaaagctgggcccgggtcttggtgtaaatgaataattaaaatgtttctcatacaaagaaactctttgtatttatttgtttacagcaaaaataaatttgagtttggattaccaaatttaatatttgctaaaattaatttgatataatttatgtaagaaatgactacggcttgaattcaaccttattctcgatccccacattattatccatttttaatacccctaacaatggcatttttaagagggaaagcaataaattgcattaatttacaattaaaatataatttttattgttggttaattttaggtgaaataatttgaaatttttataaaattgaacaaaaaagtacgaaactcggccaataatggaataacaattataataacaaaaaataaaaaatttatcaaaaattaaaaacatttatttaattcagatgcccgatcatgagagtttaaacaacaaaaaacttttaaataagcgaccgatccaaaaaaacccataattattatgtttagatctaagctttaccttaacctaaactgaaattttaaaattttccgagccaaaaggtaagaaattcagaaaaagcccctttactctagaacctctctgggctaattcaagaaacattgtccattaaaatatgaaagtgattatttatatgaatttatttttgctctaattattcttttatctcgtctatttaaaaaatatttgttttagacaaattgaaattggggctgattaaaaaaatcacatcaccaccctgggactacaacatatcaacagctaatgacaagttaattaataaataaaatttttaattaattttgcaaatattataaataatttactaatagcaatatagctaatattttatttttatgttaatagaataacaaagttaaaatacaaaaattaataaaaaataatttacgcaaagcaacattaaacaataattaaatggtgctgggacgtttcttaaaaaccgccagggcgtttcttaaaaccgccaactcatatgattatgtatataaatatatatatattagaagtttacataacaataaaaaatttaaaatacatatgcatatctattgacggtaaaataaaataattatttttatccttctttaaaacgttctccaaaaatatgaactgaccagcataatatattctaaaaaataaaatatttaagatatgagttggagaacagacttttgttagaaagcaattaggatattcattaaggcaattgcaaaatttaatatcacaatcgtaacgtttctgatatttttttatgtagcacacatcgtggttatagcaacaattatcaactgcaaaattttcgaatataaaattgctaattcgtaatttgttacttttttgaaagttgcaaaaccagattacaggagctattagacaagagtctaatagagaggtgccacaataagtcccacagaatttctttgcaaataaaactgccagcctcatatttcctgctgacacctattggtacaaccaaataaaaattaagtaaataattgtaaattaatttaataaagatttttagtctgtcactgctagactaataatatttccggctgacacttacttgcacaacaaataaaaattaatagatattattgaatatttaatttaacggatatacatacataatcatatgagttggcggttttaagaaacgccctggcggttttaagaaacgcccaatgtggcggtttttaagaaacgtcccagcaccctgcactgtcaacattgtgcgaatttccatgtatgccaagcttccaaaaattccttatttatatttactcttaaagctaaaaataattaaaattcattaattttctttaaaaaattccctcgaattaaaattattttgggcaaaatctattgacaaatcccaacaaacttgaaaaaattttcctcggcggcgccttacccaaaaattcttttatttcataaaaaaattggctaanattacatggtcatttttt

SEQ ID NO: 5624 - DNA, 2937 bp, Heterodera glycines
aaaattcatctttatgttagaatctcaacagaattcaggtccgggtttcggaattggtcgaatgggtatcaaattcgtgatcaactaccccgaaaactcccttagaaatgtttatatgtatgatttataaaaactatttttttatggtctgtaaacgacataccggtaagtactagagcccggaaatttcaaatttgcggatcctgttgcaggattggaattcaaaaatttttgcaggaccggatccggccggattaatcctgcattcgcccactgacatttagcctaatgtacatctcgcctatcgcattcataccagggttgttctgggacgagaaaaatatcggtcgggattcgggtcagccaaaaatcatcgggtcaggtttcgggacgaggaaattttcaagtttcgggtcaattgacaattttattatatgtttaaaaatcaataagaagaattgggcttcaattatcgaatttaacattttatggaggaaataagaaaatgtaaatttcagtgcattcgagatcgaaaaatcagatttttttaacggaaacgatgcgggggggggggggaactgagccgttggtggaactgatatgaaggggaaacggcggggggggggacgagctgctccccgcaaatgtccaggaaatgacatagtaaatatgtttgattttacacaatttttgcaagcgttttatgttttttttcaaagaataaatattagataataaatgtttgagcaggtatttttaaaatcttgaaatgatttgacgagaagggaaaacaaaacgaaaaaaaatgggcggggcaaaagaaagaggaaaaatggtaaaagacaaaaaaaaaagaaatccaaaattcatcgtttcccacaaatccatgggcaaaagcattctccgccttctccatttgatcaatcaatggtcgctgttgtgccgcgtcgtctccgtttcttccccaaatttggctgccgtctgccattctttcatctgccgttcagtgccccgcgcggagaccgtcggtacgcatccgatgccgacattcgacgcggtcagccgcacgtgccgttcaaattgctgcacgcactgcaatttcatgcgttcacgccgctgcaccatgtgacaaaggttgcgcatctgtggaggaaaagccgcgaattttttaaaattgaatttctgccgtttttcaatattttacatccatatttcggcattttcaaaaaccccaaaaaatgcaccccctaaagatggaaaattgtgactttttttcatgagcaaaatacgcgaaaaattttcaagggtctcaattatggagtataattcggcaattgtgaagatcattggtcccgaaatttaaaattttatgggtttacgaatttttttaaaccaattttcagaaattttttgtccatatttcgtcaatcaatttataatccatattttggactttcctgcaatgttatcctacaaattttcggagacggggagaaaaatgaggaagttgtagccgttttcttcgccaagaaattatggtcaaattttcaaaaattatagtaaaatggggaatgatgccgctgccggaaaaaattggaaatttactctaatttgttatgcaaatacaaaaattttttcaaaaaatttgcccatttaacgaatggcattgaactattttagggtggcacccttccgctaaaaaattcatttttatttttcgaggttgaaggctattaaccattttttgaaaaattttagtgtttttcgtttgctttttgcgcgttcgcttgttttgccaacccgttcgaagaagaggcgaaggtgccacactttgtccggcttttcgtttgtcatccgtcgaatttgggccccgacgcagtcgccgtcggcgtcgcctccgtccgccgtcaccaattcggaaggtctgaaaatttttttccatttaattttttgctcttcggcataaaaatttgggtgaaaaaatgttcaaaaataaggctttttgacttttttaggcttaatttcttgaaagtcgatcaaatttttgaaaatttttttaatagaaatttgtttgaaaattttgtaaattcgcagaaaaatgtcccatagtgccacaaaaagagtcattatttttagtagatttattaggcaaaaaaaaaatatataacgaacagttcaaaaatgtcgttggcggccaacaacgacaggtgagggaacagttcggtgcgctcgaaattgttggcactctgtgcgccgccgccaccgatgccccacggaatttgcacgccgtggctccattcctcacgccatctgtccgtcacgcggagcagcaccggcggttgctcaccgtggcggcactcctcggcattggcaccggtgccaccaccgtccaactgctgaagagcaaacgacgacttcgactgccacggcacggcaccacccgcggggagaccaacggcattgtgctgcctgacgcgctgcagcaaatccgtacggtacagctccgtcggcattccgtctgaatgtgtttgccgatggggtgatcaccaaattaattttcaaaaaaaaaatttttttcatggattttctacaaaataaaggaaaattactttttaaaagtttacgcgttctaccgttgaccatgctcactttcttaagccatattaatcgtagccagaaaaaatttcggagggaatccaaaatttttttgctcatcggacaaacattttttactcgtattattttaaaaaaattttcagcgcaaaagcgaaaaagcaggaatttatagcggttttgcactaaaaaatgaaatttttgtcaaaaaaacggaatttcggcttttcaaattgtccggtacttgtgtggtttacctgacagatttcacatacattttcaaatgcctataaatgtattaattttacattgtttttttaagca

SEQ ID NO: 5625 - DNA, 3672 bp, Heterodera glycines
cttgcagtgcgctcaactaagtctcttggagttagagcattcttcatggtatcatcaagaaaatcgtgcaatgtgggaggcccggaacattctagacagtttccaaaccaaacactcatagtaaaaaattatttcgttagaatacgagaaataatttgaaacgaaacactggttactaatcaacatatctctccgcgaaaactccagatccaaataaatccgatctctcatcagatacgtctcggcgagcacttgcaggacacagtaacggagcacaaaatgaacacaacggcgcacacagagagaaacgtcgacggaggaatcgctgaggaaaaaaccaaaaccaaaatcatgataatgaataactaaactattaaaacactgactacgtatgagcagaaaccacggattgcttggcatttgggggatcggtggcgcatttggcgaccaattccaacaaatgtttggaccaaaacggaatgttcttcttcagccaccgtggtcccagctcgtgtgccatcgccacatatgcctgcaccgagagggagacgttttccaattagacaggcagctaattcggtgccctatcccacttcggcgatgccaatgcgcgtctcgcgctgtccccgtgggttgtagccggtcgccgtcttcgccgccgtcttcagaaagcctccaactccgccccgctgcattccgttggcaagacagcgaagaatgtcctccaaagtgccggcagtttgcttggagccgcaagggccgagagaggggccgcccgcaggggacgaaacggacgtggccaattggccgagtgatttcgacccaactgaagaaatgggaagttttattaaaagttataaaatttaaagtgctccgatctaaaaagacccaaagagatgagttaacaataagagaatatgccctatttggcgcactttgtttcgtttgcgctgcgacgcgtgccgccattttagcaaatacttgggcaatggcctggcgaacttcgaagttggcacaattgagcgatttgatgcacaaagtgcacatcgattccaagtcgaactgggcaaacagcggcgaatcgggttcggccacaagagaaaccaaacactgaagccattgaagaagtaagggtcatacactcttttatggttttttatatttaaaaaagcgaaagtattaattaatttagggcatttgcaacatttttctgcaaaaatgagaatttgtgctaaattttactttcgctgctgccgcacggacagaaagcacctgcaaaataaattaattttctattttttcatttcgtttgttccgccgttttatgacggcaaattttttttatagcactcacccgatccgctaatgacttggccaaacttttgtaaatttctttgtaaatcggaaatgccccggcgccaaggcccttcaccattttggccattgtgtgccaaatttctacccgagcagacgactgtaaaataagcagaaaatgaaggtaaagaagggggtcacccgaaacaaacctcggcacttttcatccatttggcgagtgattggaacgtttcctcgtaactccgtccgaccattcggcccaacttttcgtacatttctcccaacacacaaagtgccgtcctttccaattaaaggatttggtaattttcactgatttgcatttgtccccttttctgtccttacaatttgacttgactctgtcccgatgggtttttcagcacgtcgttgcacgtgtttatagtcaagaaaaggttgtaagtgtccgcaattgcgaagatccgcgcgatgcatcggccgaggagagtccgcgaaggcggcggacagccgccggcgatgcgacccgtcagctgctccaacagcttctgctggcagtccttcaggtcggcctgtacaaatttgaaatgcaaataaaaaataaggaagtaaaaaatttaaaaaatgcaataaaaattggcatttaaatttttggggattaaaaagtgccgtgcttttcaatttgaaatgaccttttttgtcaaaggcaatattctgtccagaaagcgcagccattcgtagagaaacatcgccttttgcgggtccgggcacatgcgaaaggcgtattcgttgagcagcaaagagtgggactcctccattttgtagtgggaaaacaacggagaggaggacgacggaggagcagaaaaatcagtggcagacgaaagggaagaggaagggatcatccaaagggatgccgaaaatggaagcgaatcggtaaacggaaaagctgataaaacaatgggaaagacaaaaaaacaatcaacagcaaacgaaacgccaaacaaaataatttaaattatgggtcaactttattttagtttgtcaaacgaaaacttcccaaataaaaacgagatgtcaaaacaaagcatattaacgaaaaaatgaaataatttattacaaaaatttagatgcaaatatcttacagaaaatggtcatagaaaaataggcaaaagaaacaagaaaatgcattaaaacccgcaaagagatacacaatcatatgaaaataccaccattactcctccatggatttttgcctcgtcaaattcgacgcatttgaggcggtcgaactgcgtcgcttgtcctgttttttcggttcgcccatgtacaaattgacctgaaaagccgccaaataattgggcccctttcattgttttctcacccgttccactgctcccgggttccttttgtaatctatcaaaaactgacgccctttcgacgctacgcttatgtagccgatcacagtttggtgtgccgtggtgaccaaccgttcgtccaaatacccattgatcacaagcttacggatgaaacgttggcagtccttcaaaggcatttgaatattttttttgattgtggcggtaagaaaacgaattttccacctgttcactcaaccctctgcccattgcgaaaattggcagtcgtccgtgtccattgtcatccacctaaagacatggtcatttattgtcggtggattgcttgcgcttccgtacttttcgcttcactgcctttttgcccaattgccctctgaacaattcggccaagtatgcgacgccggaattgttgatgaaccgaatggactccaacacggcgaccgcttctttggtgaaatcgaaaagttttgccggaagttggccatgggtcgcggcgtatgcgcaaattgtgcaaggggctggcgttaaaatgcaattttcccggtcataagtctgaaaaaagggaaggcatgcaatgttttgatgagaagaaagctttacaataattcttaaaaaatgatggagaatatataatattttttggatatttaatttttaaattatcggttttgcctctccaaaatgtgaaatgatcagtttccgacgacactcggaaatgttctcgccgtatgcaattacattccacaaactctgctctttcatctgctttatttcaggctttggttcgtcatctgtttgtaggaaaaatggtggaaatcattaaatggaaatattataatatgctattgaaatggttttgaataaatcactttcgattagccttttgatccgcaaatggtcgttgaaattgtacatgacaatacaatgcgcaacttggctgtctcgttcagctcggccagtctccctggtagtaaca

SEQ ID NO: 5626 - DNA, 2301 bp, Heterodera glycines
gcatttgaggcgatcgaactgcgtcgcttgtcctgctttttcggttcgcccatgtataaattgacctgaaaagccgccaaataattgggcccctttcattgttttctcacccgttccactgcttccgggttccttttgtaatctatcaaaaactgacgccctttcgacgctacgcttatgtagccgatcacagtttggtgtgccgtggtgaccaaccgttcgtccaaatacccattgatcacaagcttacggatgaaacgttggcagtccttcaagggcatttgaatatttttttgattgtggtggtaagaaaacgaattttccacctgttcactcaaccctctgcccattgcgaaaattggcagtcgtccgtgtccattgtcatccacctaaagacatggtcatttattgtcggtggattgcttgcgcttccgtacttttcgcttcactgcctttttgcccaattgccctctgaacaattcggccaagtatgcgacgccggaattgttgatgaaccgaatggactccaacacggcgaccgcttctttggtgaaatcgaaaagttttgccggaagttggccatgggtcgcggcgtatgcgcaaattgtgcaaggtgctggcgttaaaatgcaattttcccggtcataagtctgaaaaaagggaaggcatgcaatgttttgatgagaagaaagctttacaataattctaaaaaaatgatggagaatatatacaataatattatttttggatatttaatttttaaattatcggttttgcctctccaaaatgtgaaatgatcagtttccgacgacactcggaaatgttctcgccgtatgcaattacattccacaaactctgctctttcatctgctttatttcaggctttggttcgtcatctgtttgtaggaaaaatggtggaaatcattaaatggaaatattataatatgctattgaaatggttttgaataaatcactttcgattagccttttgatccgcaaatggtcgttgaaattgtacatgagaatacaatgcgcaacttggttgtctcgtccagctcggccagtctcctggtagtaacactccaatgtctgtgggattgtgtgatggatgatgaagcgcacgtccggcttgtcgatacccatgccaaacgctaaatattaaccgaatttaaattcattataaattttacgattagcaaaatacatttattgtattactccatttttgattcaactaaaaaaggattattcgaatggaatgtgcagttgtaactatcaaaaatcccaattaaattttaagccgattgaaaaaaaaacagcaacaaaattcaaatatgcatgatattagtaacaattttgcccaccaacagttgcgcatagtatctgaatactgttggacatccattttcgctgtgtgtccactcttcgctgttccgccaaatcggcatggtatggctgcgcaccaccgccgaccattttcgccacatcctcgcagtcttttctgtggaagcgcaaagagattttaatttaaaagatgcaaagttttcacttggaaagacagtagatgatcccggagccattcgggtacatcttgcgaatgtgatccaccacctttttgaagttggcctgggatttgtccaccacgtcgtagacgaggttggggcgcacaaaactggaggtgaacctgtaacgcaatttctgtaacatcgcagtccaatggcaaaaaaaacaccaaacattttgcaattggcgatgtttagctgctgcttcacgtcgtcaatgatgcgttgagtcgcggtggctgtcaatgccatcaccggcactttgtctttgccggaacggtacggctcgagaacggtgctcaaccgggtgtagtcgagcctaaagtcgtggccccactgggacacacagtgcgcctcgtccaccttaaaggaaaaagcaaatttgaaaattggggcaagaaacaaacacaacggaagactacacctaatcaggcataaaataatgactcaccacaaatcgtgccaataaattgcgccgaaaaagggaaatgaatgcgtcgtttaatcgtcttgatgcactaatctgcaaaaaatgaataaataaatcgagatttactttacttcataccatttcgggtgtgacatatagcaatttgatggtcggttcaacggacgacaaatctgaataaatggactccacttcaacagaatccattgaccctcggagaagggcacaggaaatctaaaagaaactatataatgcaaaatttaacccaaattttgcccattttaagataat

SEQ ID NO: 5627 - DNA, 1688 bp, Heterodera glycines
catacgtgtacaaggggtggtcacttccaagggtcatacgacgtacgatcgggccaggggggtggtcatatgcgattttccttacgacggggtccaaaatttttgacgaccttttttttttttttgctcatcgctggtttttttcgcatgtgcatataatttttctttgaaataaatgttgatcgcaattttacaggattttatttttttacgattgacggaatgtttaaaggaatcagatgaaaaattcactactaattatttcaaagcaatacaaagttcaccccccccctttcagtttcctcataagaacgaagtcagggggaggtcgacccgcccctatttaatgcatgctaacacactaattgtaagtgaaactggaccctgcaattctgcaatttaataatttgatcctgcatcagggaaagaagcggagaaatgacgattgtaacgccgggatggagcacagctggcagttggtagcacaaactcttcccagaccctaaaagtggtggtaaaacattcaaattccaatactgtctccacccgttggcatcacaataaaacaatcgtgccccaaaagagcggcgaccaccgccggcttttgcttgaagcggaaataggaaaagccaaacacgtcctgaaaatgcaaaggccaataaaatgaacgaacggggtcactaattttatgttgaaatttttttccatttcgggaagagggaattcccgcccctagctacgggcctgaaaataactatttgttctcttattgtgttataatattggaataaatttattccagaaaaggtgtcttaatcttaaacttccgcgaaaaatgagaaataaataatggaagaccaccttcaattttctgaacacatccttttgtcctccaactccgagcaggtttactaaaactcagcaaaaagtccaagaataggctattaattcaaatgaattaccatcattgtgaaattctgccgaagaatcgcgtattttgaatgggccattcggtgctgatgggttggcaacgacaattggtgggtgttgctccgccttctcgaatagaaaatctagaaaaaatcttaaattggcatatcttaatgggtacaggttatatttgtgggttggtttaaatttaaaaaatccaatccgaaactgaaaaaagagatttattcatcggactcaatgttttaccgtcatcgataaactcgtggaaaggcccttgatgagactgtcctccaactccgagcagctttactaaaactcagcaaaaagtccaagaataggctattaattcaaatgaattaccatcattgtgaaattctgccgaagaatcgcgtattttgaaaaatgaattattgtcattgagaagttctacagaagaatcgcgtttttttaatggctcattcggcgctttttgaccaaacgattggtggaaagattcctgatgagatccattgcagcaatgaaagacgggaaattttatagtttcatcaattggaacaaaattgtaacgagtaacttgcggaagagttcctggcatcatctaagaaggtaaaaggttttaagagataaagagaaagtttaattgatgacttaaagggaagataaattaacaacggataaagcaaaagtgaatcgaaatgtgcgatttcgaaaaatgaatattcattttgtattttaag

SEQ ID NO: 5628 - DNA, 3278 bp, Heterodera glycines
ccccccccttttgtgttcttccgccgaatttggcttccccacaagctcccccccccagcagaagaaggagaaagatcccttaatcattaagtgcgtgtcgccatgtttatttacaaagggaaaagcggctaatgaatgaatggcctttgaagtgccttttgacattgcgccattcattcgccgcttcaccgccccgggcgaaagcggaaaattcccgggggcaatgaaaagcatctctttccgtgttagcatttcacacccgtggtcagttcatgttgttgtctcccttatgctgttgccctaaaaccttttcatttcaatggcacaaatcggcaacccatcggaagggcttttgcccttgcgcgaacggcggaatggaaacgaattactgaatgtttttaatagatcagttttggcacttttctcttctgtaattgtcatggatttacattgttccatttatttttttttcaaaaaagtggaattggcatggaaaaatcagaaaaaaagtttaattagtaccaaaaggtattttttaataaaaaaatatatttttttaaatttttcttaattaatttttttagtttttccttttttttgcccccccccccctaaaaaagtgtcgtattttcttattattttttaatttcttttttttcgtcgatccgttccatttgccaatgcctttctcgtccccccgcttttcccttctgttgcccccactgtttcttctccttctctccctccgcttctgtcgttgtccctcctccaattcttcttccccccgtccttttctgatgagtcggtcccttctccgtgtccatccgccacttttctccccctccaatggtcggcgtcataaagccgtgccaacgttcgcttcgtccctttcgcccccggcgccgcccatcggacggatgaagccgaacctcgcggtgtataattatgcagctggtagtgcaactgctgttcccagtgatcagtggaccaacaacgagactggcgaagaactgcttgggaagggccaaatgctggcaactttgccggatttgagtgagtgtggggaaggcaccgaaaaatatgctatatgtcgaaaacggcatttgccggtcgtcattcgtggaacaataagcagttggccaaaggagcggcacacccggacattttgataggggacaaatgcccaaaaaggaagaattggcacccatggccatggccattgatggaagatacaaaaatcgaaatccctttgaatttgtttttcccatgctcaggtgatccgtgctttcgacgctatgctaacaggtgcctgcccttttatctgccgtggctttactaattcagtgccattcattaatcccccgtccccgaccatttagtattattgtcaatgcgcaaccgttcgagcgtcggtcgagcatttcgttgatcaactgtaaggtaattttctggttgaccccaactcgacctcgagagggaaattgccagaaagctcgacagtcccggaaaatttattccatacgcttattcccaaaggtgcaatgccttcgctctccggtgggcctttactcgtgccgctccttcgtctacgacaatttgaaccaagtgtgcgacttgtttgcccacgtcggtgaccaatcgccggcaaagtgagcgtggaaatcgtgccaaataactcaaattatcagtgccataatttaaatgtcaattattggtgggacattcgaaattgggcattaaaaaaactttatttttgcctcggtacttattctacgctattcaactgctccctttccttgtaaaggcttctccgtttcaaaacgcgtgactatttcgagccgacctccgccattcattgtgccatcgacgaaaatggcaacccccggggcaccgttgttgttccgctctctgccgcaatggcaccgacacccgtgccactgactacggacatttccatcagcaaagcatcgctatcattcactgacagtggggccatagaccatggggaattggaagaggaatctgagaaaagtgcaataataatcctaagaaagtccgggataagatacctcttcgggatgccgaattcttaaaacagaattcatgttttgtgcccatgccaagtttcttccaacaatttcggcatttttatcaggtcccccctccattgtgccgcctcgtcagccgacttcggtggcacccgcaactgcaactggagagcagtcggaggaggccgaggaagaggaggaggaggaaaatagtcaacaattggccacaatgagcagcaccagcaaaagggaggaggacgagcaggggaagaagcggaacggagcagggacgggagagcagcagaaggagagagagtgcacggagaagcaaagtgagggggagggaggagaaaaagaggaagacgaatagggggagggggagggggacggaatggcacatgccaaagggaaggctaacggattggaaaagttgatcctgactggctttgttctggacccgccgaaccgggcggcgatggctctcacccaaagccattgctctccgactgagataatagtggcattagccatctcccctatggatctttcagcttgtatttatccttaaacattcaaattttaaatttgctgaacagtgccccgtttcttgcgaactgccgactttgaggtgagcacacatttgaatgttctcatttgaaaatttatatgcttttatcagtttcatttttaactgatgaacatttttgatcaaatcaaaatttaaatttaaaaattaataattaaaatctgtgtatttttgcagcttttcggcttcgatgaatttcgcattggaaatgtgcgcggggtggaggagtgcgcgaacagttgcaacaacaaacgcgcctcaaacggcatgcccatcaaatgccactcctttgagttcactgccgcgcgctccgagtgtatttttgccgccgaattggccgtccccttgggcactttttggaattttttgaaaattaaatccattgataattaaattataacatatttatttccttaggaaatggacagctcagacaaaaggcgggcacagattattttgaacgcatttgcgtggacaaacagttggccaagtgagtgccaatttgaattttgttttgatatatacggtatgagtattaaccagaggaacggtgggtatttgatacaggagatacggtatatgccagtagagccgggtaaaaaaatgaagatgcccattttcgtattattcccttcagccaatgc

SEQ ID NO: 5629 - DNA, 2007 bp, Heterodera glycines
cgattttaattgttaaatttgtattgaatttccgttgaaaaaaggaataattttaaaaaattagaagaaaaacaactacttggggaattgatctaaaggaagaatactgaaaagaaccaagataccccttgaccatgtatgtgaataaggaacagaaagcaaaaagttaataaacatatattaactttaagtttatcaaaagccaattactaggggtgcattttcacattgaaaactcaatctttaggggtgtgtttttccagaaacttcgggtaaaatagccgaagcacgaagttcgaagccgaagtttcgcccagccctggtgcggatctgttctgatttatcagaaatgtcctgatttggagggagtgatccaattttgttgatttcttaaaattcttcagaaatttgtaattttgtggtgcaatgtcacacagattttaaaaatttaccacggcagtgcctaacggcaccgccggaccctaaaaatcatttgttttcgtaaaaattagctcaaaatctcaaaaattggacaattttttctccattctccgcccgatttcatatggcatttaggcagaaaatctgcgggggtgcgcgcctttgtggcacggaggagagacagtgcaatttggcaaggacgcggaagcgccagcgcgaggaaatgggagtgccgaggggaggtcagtcagaagtgccgtgggttggggtggggcttttgtgggtttgggcatgccttaggaaaagaagtcattcagttcaatgcccaaagcaactgaatgcgatagaatgctgatattatacaaagcaaagcaaaagtaaaaaatactaataattataacattaactaataatgcatttcattctccgcccatttgcccttttttggctcattttcagaatcgaggcgaaggaatttggacgcagcaaaacattcccagcgtggcaaaagtgcgacgacaacgacgcctttccactggcgacaattataaagcggcagaaggaaggcaaaggtggcataaatgccgttcttttgctgccccccccccaaaaaacatagcgaattgattatttatatgcattttaaatggctaattttttattttttgataaattaatcttcttgtgcctgtacaagttgtggtttcattatatcccggtaagtggtggaattactttgattgtcgaaggaaaccaactactaagtttttgaaaatcacggatctctgtaactgaaaagtgcctgccgccttggtccctaccccaattttactttgtttccaattttttattggctgtcaatccggcacaacccattattgttccatttattttttgacagtattcaccgaacagagaaccacgtttcattgattgtctgttatttggttgcgttttcaaaatttatttggaataatcaattgccataattagggggtgacaaattatcaaaataataattaaacaaaaaacccaaaaacggaggtctaaacaaatttagaaggagcccgtgtgcgatgcgcacgaccaaatccgcccatgtcatcattgtcggcatcaccaccatccggcaccacttcatcttctggcacagcagcttaaatcaataatacgaaagactcatggacccaaatttaaccaaccgcctttttcttccaccagacggcccattcgttggtcccccctcttttgactgacaagttcactggatgactttggagcaaatttataaggagcccgtgtgtgatgcgcacgaccaaatccgcacatgtcccctctctgtccctgtgtctcttcgttgtcctcttcttccccctttggctgacgaatgtcctggccataacgcgtaaactgaaacatcacatgttccatttttaatatggttttgactgacaagttccctggatgactttggcgcttgttctcgctctctgaacatgtcatgcttccaaccttaatcaattttaatttcctggcttatgatcccttccctttggttttctccaa

SEQ ID NO: 5630 - DNA, 1304 bp, Heterodera glycines
tcatacatgaaaaagggggggtcgaccccccccccccccttcgcccgcaaagtgccccaaaatgggggaccccttcgcatcgacgggggtgtaagaggtggggggggggggtcgtagcgaaggggaaaagaggaaatttctgaaaaattggctattttcttaacaaaattcattaaaaattcttacaatttttccccggtggcgcctatcggcaccccgaacccccctgtcctccaaaaagttttttaaaaccatgcaaaaaaaggctttttaaaaacaaaaaaagtcgtcgtcgacttggtaaaatgctttgaaaagcaaaaaagaaaaaaaaaggtcgtcgatttacatggccgggaccccttcgcaaaattggccgctgacccccccccccccttttttcatgtatgttacaaatggttgtgaatgtgaatatttcctacttaagtcattttaatgtaatttaaaaaatagatgtggtcgataattcggtgcagaacaccaaattgtataataaaactatttcagctcaaatagttaatgttaaaaaaattatgtaaaaaacgaaaaatcaacgatttgagcaatttttgaaatcacatgacattcgggaatagcaccttcggttttccttaagtctggtttatgtttgaaatgtactttagtcaatcccttgttttcaatgcagaaaacccaaaaaaaaagcaatttgattttaacgtgcaaatggggtgaggggtgtaaaaagtggatttttcacacaatcaatagcccgtgtcccgtacattatgcaaatttatcaaaaccttgtttcgggatgtacgccgggctgtccttgcactcgtcttcgtccagctcctcctcatcctcttgttcctcctcctcctgttcatcttcgtcctcatcctgttcatcttcgtcctcatcctgtccatcttcctcctcctccccctcgtcatcttccgctcctttccttcttctcggctcttcctcttcctcctccgcttcttcgtttctatctatgtccgcctcttggacatgagactcatccgtcggctgctgatggtcctataaaaattaacaatactttccgcgttttaaacccatatggcctgtttttccatcatatattatctcccaaaacaacacttacctcgatcaaacattggaggcgcaatttccgttccaatgcctcaattttttgccctgcctccgaataagcggcgaccaatttctctttgtgcttaaaagaaaatagtagaaaatagctgggctttgctattccattgacaaaccttcaaaaa

SEQ ID NO: 5631 - DNA, 4344 bp, Heterodera glycines
  unsure (1)..(4344): unsure at all n locations
tttaatatatttttagtaaaataaataatttttttgcattcatctaaaaaaatttatggtttanacgatttttcaaaaatttgagctcgatttaatttgtttcaattagcctttgcaaattgccctgttgttgtggaaatccctgacgttgaagcagcagcgttcaaagtgatattgagcttcatttacgcggacgatttaagcgaattgaatggagacaatgcaatgggagtgctttgcgccggtgaatttttttttctaaaataaatgctttaattattggatttactaattagccgataaatacaatatccctgatttggtccttccatctttgcaaattcccttctccgaattgcgcaatgttttccttgcttatgcccaggctcgtcttttcgactttgaggtgggagagaaataattaaaaatgaattaaagagaattttaaatgcaattattattcaaaacatttttaattttaggaatattgcaatgattgtttggattatattgacaaaaatgcggacgctttgcttaaaacggaggaatttttgcaaattgaccaaaaattgttgtgtgaaattttgggacgtgaccaattgcaaatcagtggagaaatttcaatttggaatgcggtaattctacttaaaaataaattaatttcatttttttaaatattccattaattttaattgttttttttcggcactccgttggacggaggaaaaatgccgtgaaaatggcattgaatgttcagcagagaatcgccgtcaattgcttggcccggcactgttcaaaattcggctcccgcttttctcacatgtggaatttactgttcaaattggtaaaaagtggatttaatattaaaacaaagtaaataatgggatatcaattttaacataaattacctatattaactatacagaaaagcaattagaatatcgtttaaaatttatactttattagttagtaaaaatttataaaattagacatttttaagggttgcttaaaattaattgcttagaatgccatttccggcctgtctaactcttatttttacagttccgtccggcattttaattgcagaagaagtggtcggcattgaacaataccgtagccaatcgaaaatgtgtggcacttccgaaggattactgtacggcccattgcaattcccgagccattggcgaaatttgacatttgggaaaattattttggacattgaaaaagtgtcggaatttgtgggagaaaaagtggggagtcgccgattcagtgaaactgttcaaatcagaggacttccttggaatattttggcaaaaataaacggaaaaactgatgaaaaatgtctgggcttttatcttaaatgtgcagcagcagaagaaggtaaagtaaatcaaatgctaattattttacattaaaagttgtcttaatttaaattaagatgagaattggtgctgtgaatgttccgcaacttttcgaattgtttcgcaaaagttcgacgtggagaattctactggcaaatttttcggacaaatttttgatcacacagcggatcaagcaggattccatggattcatttcatttgcggtgagtggttgtttattaattgatccattatggttaattaaggaattgctggaccctaacaatgaattttacagcaacaatgaggacaaagtgacattgacagttgactttatcttaaaagatgctaaaatgggccaattttctgctccaaaaacagcagacaaaacaatttttatggaaattgaaaaagcttccgaatttttttgcgaaatcattggaagtgagcgaaaaagcgaaactgtgctcatcaaaggacttccgtggaaaattgtggccaaaataaaccgaagcgctgatgatgagaaatgtttgggcttttaccttttatgtgccgtcccgaaagaaagtgagtggaattaattaaaaataatttaaaacaataaaaaccagcagggctttattaaattatgctattatatggtggcaaaatctgttaataaatatcacaaaaaatcaacattttcgggcggggcaccaccggaacctctctaagttttttttttgaaaattggtacaaaaacacaccagaaaaaacgggatgcaataaaaggggctgatgggtcgactaagatttttcgaatggatcggacggtaaaagttgatcggaattcaaattattaacggtccataaatttgactagtttgttgcttttcaaagcttttttgcggcgtaatttttcaaaaaaaaaaccaggaacacgaggggtccggtggtgccgtcggcaccgtcggagaatttttgaaaatttacggcgatttgttaacagattttgtctaaaattgaccaaatgtcgcactttttgactcaatttctacaggattattaagtaaaagccgatccggcggtgccaaaaggcgccgccgggaaattcacaaattttgaatgaaattttcgatgaaaatgagttaattttaattaaatttattatttaattaattcaaaaatatttggcattttgtccataaaatttttcaaaaaaatcaataaaatcccgcagaatcccgcacaaaaaatcaaatttgccgctacgggaccggaactcaaaattctttgcggactgggatcccgcgggattaatcccgcattttccaaaaaatgcgggattgcggactgggatcctgcaaaatcccgcgcgggatcccgtcccgagccggtctctgggaatactgaaaataatcagcggaagcaaaaaattattgtttattgtttattgtcagtaaagaaaaaagagtccacaaaagggaaaatccgcttacattgaggacaaaacattaattaaaaatgtcctcaagaaagcgcaaaacaattaaaacgagatcaccgccaaaataaaatataatatgaaatcaataaaataaataaatagcgaccaaatcacttttagttttaatggattaaaaattcgactttaatttttccggtctattttacaggaatgaaatagttttagttttatttttaaattgatttaatgagtttatttcaataagctttttatcgagttggttccaaattttagttacccgccctgcaaaaggtataaattttttgaataaattttgaccaattttctacataatgtccttgattccgttatgtccttgtaaatcagtatatacgtccttggaaagagagagtttaaacgatacgagcactgaataatataatattaatttgctttaagcaccgaattggagtcgcaagtgttcggcaacttttcgaattgtttcgggtgtacctagggaatggttcgaacgccgcattgttatcaatgaaacacctattcacggatttgattatttcgttacattttcgtatttggtaagaaaatattttctttttgggaatacaaaaaatatttaattaggacatatatttttaggtatttaccttttcccgagctccctatattatgaaacgaacgaaaaatatttttttatttgtgcttgttaagctattttttattattagtgcatattttctgattttattgttagggtggccgaacgtttcgtcactgaacctttcgtcactaaacttttcgtcactgaacctttcgtcactgaaataaaataaagaattatttattagtgaaaactatttttttttaaataaagttatgtatttgaaattttggagtgtctgatcagtgatcaccgtaaaaaatttttaatggacgtcaaaatttctcgtttcccaaacatgagtgcctaaatgtaattccccaaatgctatttccaatagcggtaaaaaattcttaactatctacttttacatatttctgtaatttagctatggaatctgactcatcgcctcgaaattgctctttcaagaatctacaattcgttagaagcgtggcatatcatttgtcgggaccttcttgatttgttgcctattttcacaatgcaccggaaaatcgtataatgaaagaggtgcttaacatagaagttatttatctactgctttacaacaatttgctgcatctcatcgttacataactccagcgagcataacaagatgcattgcaatattttagaaagttttcatatctattgtttcaaactgattgatatgttacacaaattatgcatgcggtacttgttgcatggtgacgtcggttagacgtattctgtacatccgccagggctatggacgtgcaggccgaatgtgggacatgcaaattccgatgccaaattcggatgtagaaccattgatcatcatgcagagactgtacaaagctatcaccgacatttattatg

SEQ ID NO: 5632 - DNA, 2092 bp, Heterodera glycines
atttctgccaataggttcgagtgccgagttatgacgtgccaaactttttttatcccaataaattaaataattaattgaatcgttcgtgctgtttggtggcacagatgttgtgtgctcgcttccactttttgcacccataagttcgaatcccttatatgtaaattcatttttttattttacccttgaacacccattttgaaacgtaattattttcatttataatatgcatttatatcagagttttgtcacccggccaaatttttgttttgaagtcccaaaagataatgatacttgccaaaaaataaattgcgaaaatactatttacttcgttgcggattttgtgagattttcttatgtttgcacatttttttcacgattaccactgggctgggaatttaagtcactaaaaatcttcaaagtattttgtgattttgagctaatttataagaaaataatgggtgtctggcggtgccgataggcatcgaagaaaaatacgtagacatcaattttattatgattttttggacagaattcttagaaatcgttgtgccatgactacctaatataaaaaaaaattttataattcttttttgaaagaaaaaagtcacaaaatggtcaacttttgcgtcaaattttgaaaattttaatggaattttggagaactgtgaaaatttttttgggatttttaagaaaaattagcaaatgacaatattttttaattgaaaattcaagatcttaattaaaaaatggagatttttcgaaaaattatcgtgacttcaatcacgcgggaccccgcgggattggtaaaatggtcgggagggatcccgatgaaatcccgatcccgatcaatcccgatgaatttaaatatcgctcgggacggatcccgaggtcgggatcccgaatttaatcccgcgggaccccgatcccgtccggtctctaatagaaagtgttctgtctctgctgatcaaagttctaatgggcagcagctcaccgaggacgtctcgaaattctcgtttaatcacacccaaatagcttaaaatggggaagattttcgtaaaaaacctaggggttttggtgaaggaaaagggccgataggccgagggataattttgatcaaataaatacagactccgcccttggtaaaatacgatcgaactgataatgtttttgttccagagcagaacaaaagagaagaaagcggacgagtgaaaagggaggagagaatcgaacagtcggaggaggaggaagaaaaagcggaaggaagaggaggagggaaagaattggaaaaggacaaaacacacgccaatcccttgaaaacgcactccctttttggccaaatttcaattttatttttttttaaatttcttcgtcggcaatttgctggtctttttttctcttactctgatgatcggtctgcgtctgctgcgctctctctatacaccttactcactgatttatgtgtcattttttaacaaattggttttgatgcgttttttcaagttttatgtgttatgtattaataaatggcgtgaacataatttacttttaataaaacaaagaaaatgaagcaaaaattgaatataacttcttcaaaaatttgattgaaatgcgatttaaagaatctttaagtgaaacggttaacaaattaagtgagagccgctgctgattaaaatgaatagtttccaaacgatggcaataattaaaaatggtaaatgtgattaataaaacagtaaaatgagacaattaccataaaagtggcaagtggcagaacgaattcagaggttcaaaaagaaaacgacaaatgcaacattaatttgccccaatttttgcgggattttgatgaaagacaagaaaattgataaattttgaaaattatttcgttcaatttcaaaaaagttatgaccaaaaatgtctgaaaaactggttctttgactacttttacccataactttgctcaaacttgaccaaattttttaaaattaaagtgagctaatagagaacccataggctatcgaatgtttccaagaatgtttaatttggttgactttgacaaaagttatgagtagttttttaaaaatttgtactggaattg

SEQ ID NO: 5633 - DNA, 2451 bp, Heterodera glycines
  unsure (1)..(2451): unsure at all n locations
aggaaaaggacaaataaatgtagcaaaaaaggcaattcttctaaaaaaaagaaaatggacaacaacaattcttgttaagtgaaggagtgtgacgcgtatttgatggactctaatcaattaggcataattgtgtttaaggtttattaattagccgattaattaagcataatagacgggactgcgctcgcggattgcccggcacagaatgcaggagaaaaccatggcgaagaactgggcgaccaacagcataagggcactggccagcactgcgttgctgtccattttgtacttcagcacggagaagcagtcctcctgagaagagggtggcacaatttgcaaataatgccatttgtgcgctaatgtgaaaatttgtaataatttatctttaaaaaataagcaatttttagccattttcgtcaattttgccattttggatcagatttcaaaaaaatggaacaattgggaccagcgatctcattaggcaccgtaagtgaacatttaaattttggacaaattgattaagaatattgaatttaccgccttggccaattcctgggggcacagctgctcgtccaggtacagcttctgcgtctcgatggtggccccgcagcagtgcagcgccgtctggatgggcttcaaattgcgccggccgtccgccgttttggcactcgcaatgaacgcgttgtgcaccgagtcgaccagctcggcacggttcgtgtacagtgccaacaccgtgacgaactcgatcattgccaggatgagcaggaggacaaagtactgtgaataaactacgtacatttttagtgcaatctagagaaacagggcctggaattttgaaatgaatgaaatcgggtcatatggatggggggatttctgtcataaaaaaagttttgttttttattttaaatagtacaaacattaataaacattgtgataggtggtgctttcggccaaaaaattcattcatacaattagagaatttttgaaaaacaaacaccaattatataaataaaccgattgaaactttgttactttgaaaatatgttgttttcgtactttgttgcggtttagtggaagaaaaaatataaaatttaaactaggttaggtgtcaaggaaattttgaattaaaaatctttggcacaaaaattggaaagtgccgaaaagcaggggaaaccgtaccaaggtaagcagcacattgttctcgcacgcggcgccgcaacagcccaaaaaaccgaccacgagaagcagggcaccgaccgcgaccaaaatctgagcacaaacatgacaattcatggaaaaaatgtgccatgaaagacaacatacccaaagcgacgcctcatactgaaaaatgggggaaaatttgttagtggttcaatgaaagtgaaaaataataaataaagcggaaaatttagttagccttgctaggcaaaattcaatttcgaaacgaaagatgtcatcaatatttcatttttgcacggtttttgggaaatttcacccaaaagttttagcaccatttaatacctgggccaattcatccacaaaatgtgcgtcaatgtgcgctttgcgggcgaaatcgggcaaattagttgagaaatctttgtccaaattggcctgaaaagttaattaatgcgctaataattacaatagagcgaaacgaaacattagttttttttagcttttgcataaacaattctgaatgtgttgagccgaggatctcaaaattccatcaaaaaatttgcaagtctctgaactccaaattatatgccctactaattgccaattagtaaagaaattctgtaattatttgtgttcacccaaagggaaaaggagaagacgagcacgccgaggaagaaaatggcaaaattggtgacaaacatcaacaatttgaccactttattgccataaccgtagaccattttattggatggtgtttttttaatacctaatctgaaatgttggaaataaactcaaaaatgtaaatctttgcaaaatttagttaatccccttccttcttcaatataattgcacatgcctatgcatggacggtaaaaaagaaaatttgaattttcgattttttgtctgaattcgcatccgctattcggaattggtcgatatggatgccggattcgtgatcagcggcctccgaaaaccattggaaacacgtcttaatgacttaaaaacaatttgtttttcgaaaaatggaaaggggnggggggggaaccaaagtattacgcaaaaaaaaacaatatcattttgcaattctcgcgcagcttttacacatttaaattgtggttggtcgataaacccattgtttcgatgtgtcatatcagaagaaaatctcttaaccaacgggaagacaaaaaaaggntgngcgagncgagagaaaaagaagtgtggtggatcgatcaggacgagggtgacaatgataatgatgatgtttggtgcatcatc

SEQ ID NO: 5634 - DNA, 5007 bp, Heterodera glycines
  unsure (1)..(5007): unsure at all n locations
tttattatttataattttttaaaatgtttattttgtttgttttatttttaataaatttttcttcgagttataatagccctattctttaccctgaacgatccagggacaccgaaatgactgacatttattataaaatagcctcctttgaccattcctacttgaataaaattaatcaatctgaattattctcaatgattgatgaaattgttgaaaagtttcaactttgtaatgttgaagaaacgaggtcattatcgagatgggtatactgtatgctactagttttgctgtggatagcaattgttatgacaggaatttttctctattttaattccttgattcgaaatatgtgtaagcttatgcatatatgtagagacgaaaatgacacaacgacgataaatcggattctagcgggaaacacaaagaccagagaacactacttgggatgcttcccttgcgacaaactcccaaacaaaatcaaccagtatccttcaacattggtggcgaacaatgacccatccaataaagagggaacgcattggatagcaatgttcatcgttgacgacagaaccgtctactactttgacagttttgggcgtactccgaacagatgtatcagccactttttgcggaattatgaaaaagtgatttcgaataagccaactattcagtcagtgttcagtgagaattgcggctactattgcatttattttgttcattttatgtgctcatttggaggaagaaattatgagagtaattttgaaaaaatgacaaaaaagtagaagataatccagatttgtttgtcgtgaattttgttaagaaactgataaaaagtatttaaggaatttttcattaactcatttataaaaatggatcgattagacacagtaattgcttctcttctgaactgtcccgcacgtaacttgtgcgactgcttaaatcacctggatgagattcaaaaagtagaaaaatacctcaaaggaaaaactctacaaacaacatacaaaaatcaactaggtgagtacaaaggttttgagtacggtggaattaccaaagaatgtgcccgtaagcaaatggcttacaatggtttcaagaatgtgaccgtcgaccagcatttttatgtacggcaccgcatttgtcttcgctacgctaataatccttgcgtgattgagaagcatagaaatggacacgaacgattctacccacttgagcttgtgaaagtgaaacacggagacaaaagcgatatttatttgggacaaaatttcccaaagtctatacctttacttgacgaaaataattcaaaaataatgacaattattatgattcttgtcgtttatggtgaatatttgaaattgcagataatttgataaaattgattaaatacaaaatcaatttcttcttttgatctagagcctgttaagtttaatttaccgcttgaaaatactatgattgatatttttgggttttggtttctatacacgagaccgggaaataactcgggggtgaaggaacaatatttggcgcctagaaagtcggacagaggtcctaagcgtatatgaaaaccaacgtctgctgttgctaccaaattttgtactttaaattcctgaatttgggcatcgtaatacccgcactatcgaattcgttcggtgacttgctccgcagcttgcctacattctttctcattagctgctcctgtgcacacaaattttcccgtaccaaagataatagcagttgcatttgggttgtaaacattcataatgactgcattcattcgtttaggggtatattttgtagaaggagaaataatataaattttttcgagattaagcctagtctttatatcaataactgcaacacaatttttaatcgttggaaaaaacattttaaatgaataatgggagaaaatttttcctatttatacaaaataaattgaatttagttataatttattcctaaattaattttaaacttttaattaatttttatttaatattaatttgaattttatttcaactttaattataataattcatttaattttatttttagctaacaatttatcacaatcgggctctcaaatagcccctgcgggcgctcaagtggtagcatacctacactcaatagaatttgagttacctctgaccaacagctggtgctttccattatcaccagcgggctcttaaatgacacacacgtgcgctcaaatggtccctgcgtgcggtcaaatggcctggcatccctttcctccccaaagggcacgacggctgatgtccgtcccatcgatccctccaataggcttttaattttttttaattttattattttatttaattaattttttttaatcaatcaaaacccttcaataggcttgggttcaccccgcacccgtccaataggctttggtttttaaatttattatttttaatttatttaatttaattttaattaattttattttaatttaatttattttttaatcttttttttatttatttttttttaatttcaattaatttgaactttaacttttatttaattttaatcctattttaatctaatttcatttattaatttaatataattttagttttatcaactttaattctaattcatttaactcgaattttatttttagcgctcaaatttaacaagcgggctcacaaaaggcccctgcgtgcgctcagatggcacgcgcgagcgctcaaatggtccctacgtgcgctcaaatggcatacgcgagcgcttaaatggcacacacgcgggcgctcaggtggcatgcgtcccttcccttccccataaggcatgacagctgacgcccatcctctgcctccctttcccttctctaataggatttggccttgggttttatacttcagatgttttttcaattatttacctcttctgggattggatatatttattataggtgttttttaaaggtttaaatttggtactgaaacgtccctttccactgggactgaaatggcggggctgaaaattaagggcgaaaatctgcaccagtaactactaggaaccccaaaaaaaatattaaattaaaacctttgaactcccgatcccgctcccggaaaattggacactagaaaattggacaccaatggaaatttggacaccggaaaattggacaccgaaaattggacactagaaaattggacaccaatggaaatttggacaccggaaaattggacactgttgtaaataaaaattaaaataaacaaaatatattaataaacaaaaattttggcttggcctaaaagatctttatcttaatctgcacatatgttgtttataagcgtaaataatatggaaatgaatttgttattatttttgtaacatcagaaggagaagaaaaacatcatatcattcataaagaaaaagttttattacccatttttcgtgcattatttggcacattgatcaatcaccccccatttttggtgcattttttggcacattgatcaatcaccccccatttttggtgcattttttggcacattgatcaatcaccccccatttttggtgcattttttggcacattgatcaatcaccccccatttttggtgcattttttggcacattgatcaatcaccccccatttttggtgcattttttggcacattgatcaatcaccccccatttttggtgcattttttggcacattgatcaatcaccccccatttttggtgcattttttggcacattgatcaatcacccccatttttggtgcatttttggcaatgtcatctggagaggaaggcgaattacatggcgatgggtctgaagcaggcgatcaacaagatttggaggaacaacaatcatttcgagaaaagacatcatcaaaaaagaagataattcttgtgcgagatggatatgaatatggatttgacaaaatgagtcgatcggatcccagtattaaattaaataatattttatttcataattaatttgagatttggaattctatcgctgcatttttcgaggcccaactggtaaaatttattgtccagcgaggcttcatgttcgatcagattggcatcgggatgagcaaggcagatataagattgggagaaaaacaaatgcgggacattgccatgggcagacggatgaatcggcacgtttaattggaaaatataccattgaatatttctgaaataaagatcagagaagcacaaatgagacttcggcaacaagccgcttcacaaaatccattgccaacaagacaagcaattgccaatgttcgtgagaatatgccatttgaagccattattgctggaccctcttcttcgagtctggcaaggaactacagaaactatgttgtccaagaacggggcgaaaggggtgatgatcagcttgatttggccgatactgcacaaattcaaattcccgaaaatcttcgggtaaactttgtctttgatggatttgtcgataatctccggatgttggtttttgctaccgaatctggaagaaaccttttggcacggtttgggcagcatgcggcaatcgatgggacttttaaggtgtcaactattcaatgttaaagttacagaaattaattgtttagtgtgctccggcccatttcactcaaatttacacgatttctgttttggtggataaggtcgctgttccttgtatttatgggcttttgcgatcaaaatccgagaatacttattcaactgttagtcaatttgtaaattaattgctttaaattaacacaatcagatgtttcaatcagtgattcagcatgttgttgattggcacccacaaacattcatgatggattttgaattaagcgcatttaatgctgttaatcgggtaaaatatacatatgttaattttgttttataaagaaaatttaaaggtttttccgaatgccgaacggtctgggtgtttgtttcattttgcgcagtgcgtttatcgaggattgcaccgattgccaaatcttanccnccattttaaaggatgagcagcaaagaattaaaattaaaagccttt

SEQ ID NO: 5635 - DNA, 2822 bp, Heterodera glycines
aaagatagaaataaaattatagcttagtaatattgacaaattttatttttccaattcacatggtgatcagctgagtgcaaactaggctaaatttcaaattatagtgtcagcttgtttatattcaaaaatttataagctaaatgaggaactatatttaaagaaataaaaaatatataattaaaatcgtattatttacaaaaatattacgaaggttaaaaatgagttgcttataacgggcaaaattcccagtgcatgagatggaaatgaatttagtgcgataaaaaatttctttgataatgcatacccatttgcaaattaataatcataatatttaaaatatttaatctttaaatgttcagaaaataagcaatcctaatattttaaaattataatttgaaaaaatattatttaatattaaaaaaaatagttcaaatactcaataaagaaaaataaaaaagcaaaatattaattattggaataatgaaagaagaaaaaagtgttatataaaccaatgtagacgaaagagcaatttcgttcagaaaataaaattaagaaatttattttcaaacaaggtatctttttcaagaccaccattgatcagaaaaattgcaagattataaagaaaaaaactcacaaattgttcctcaaaaatatccaacaaaagaataaaataaattttagagattttaataatatataaaaattaattcaatgtatattcaaatgtcaatgattttaaagaacataatttttaatcttattaaagcttttttctaaataaataaaaataataaatttaagtttctgaaattattaataagtgattataaattgtaatcttgtcaaacgattctcacgtggaaaatcccagagatttttttattgtaataattatgcgaaatagaaatgaaaaatttaatttaaaaagttaccccagcattttagcattagatttacaaatttaaaaaaaaaattacattagacttttttatctttataattaaatacgaattaaaaattttattttttacacctgtagcaatcctcattttaagattatttgcttttcttattgatatgtactttttaataagatatcttttcgcaatttttattctcgcaagtcgcaagaatttttcatttttatattgactaacgtgcatttgtggagaaatatcgggcttttggggtcgtttcgtaaaaagtgccactttgggcgtttcgtaaaagtgccaaattgggcatttcgtaaaaagtgccaaaatgtgcgtttcgtaaaagtgccagggcgtttcgtaaaaaggccactttgggcgtttcgtaaaagtgccactatgggcgtttcgtaaaagtgacaaatcgccgatttattttatattaaatacaaacacgcataatgtattagtggaatccactagattttacccctattatttaatctcccgtcttgattctttcattcgttccataattcctatcagtcgaatccccactaattacttctcctcattagttcattcattccataaatcccaatcaatcaaatccccgctaattacttctcctcgttagttcattcattccataaatcccaatcaatcaaatccccgctaattacttttcatcagtgtttccatcttggtaaaagtgtgttcaaattcgcttttctccgttccgagttcgtacatgtcatacgcaatgcgtaaatacatccaaacgtagtcccggtgtaaggaatgccgagatggtcccttgtgctgctgctcaatgagtgattggagccattgggcccaaacgatcagatcatctgattttatatcgcggcgcatccgatcaacggaatcaggcacaatgttggcgttcaacaaaacgctgacataatgatcaatgagtcggtttttgtcgaagaaaactaaatggagaaaaaagtatttaaatggcatgccattttatatgggaatttttacgaggaatttcaaaaggactaaaaatttagtgtatgcgaaaaaaaatttcaagtttctgtacaggattgagtttttaaattttccaacgatagaggagtttttcaagaccaatctggtgatacccaatatcagggcacaaaaaatcccataataaagctgcgaggtcccaccacccagttctaacaggggaatttagtaccaggggacccccttacgcgtccgtaattaggctcctcacgacttgagagggaagggatggtaatggatgtcttgggacgtctcccctgcggggatcgattggccatgtctctcaaacgcttccagactgactccgactgaactctctggctgactccttttaagttccccacgattgatgcggcatttgaggattgacatttgagacccgaccaatttgaggacataccaatttcagaaaaaaataaattaaaatttattttatatcattcgaaaaaagaaaaagcctttttcaagggccaacgggaacgaatataaagctattcgttatttggatcatccaaattttcagaatcttttgcgcataaggagatattgaaaagatctaagattccgggctctgttctatagacaatcttgtctctgtatgttttttccgttctcgaattcttatcccttgagttgggtcaactcaaacagccgcagtttatcggcttcaacccgctctcctttctttaaaacaataataactctgatattcaaaagtattataaattcattcgttgtttgggtttgtggtcctaaccaattccatgtgtaaatggaaaaagggggatcttccagcattaccaaaaacacatgttcggtgtaaattag

SEQ ID NO: 5636 - DNA, 2462 bp, Heterodera glycines
  unsure (1)..(2462): unsure at all n locations
taaaagggaaaataatattatctcttcagggcaaaaagcattaacaaattatgtaaaaaaaattaaatccaaaaaactcaattccttacttaatcgataacagtgggaatatttgctttgatgaaaaggaaaaatgtaagcttttagcagaaacattccaaaaagtatttattaaaaacaatcaaatttttgattattctgaaaataattctccaagagaaaagctttctgatatagaaattaatgtggggattgtatggaatttactcagaaaactgcctgggtgaaattccacgtctccagataatcttccatatattttgcttaaaaactgctcggaaacactagcagtaatattatgcgatatattcagactaacacttgattctggtcaaattcccaaaatttggagaacttccataatcgttccaatatataaaaagggtgaaaaatctaatcctgaaaattacagacctatctcacttacgagtacggtctgtagggtatttgaaagaattttggcaaagaaaataactgaatttttgaataaaaataatttctttgcgaatgagcagtttggctccctaaaaaacagatccacgacaacccaactattacagacattaaacgttttttacgaagccatacagaatcaaaaagaggttgatgtcatttatattgatttttcaaaagcattcgattctgttcctattgatttgttacttgcaaaaattaaaaatgctggaatagttgggaaaattttaatgtttttacgtaacttcttgttacaaagaagttttagggtaaaaattgaagactattattctgaaagctataatacttatacatggggtaccacaagggagcgttttgggtccattattattcttaatatttatcaatgatttaccggctaatatacctaaaaatgtaaaaattaaaatgtatgcggacgatgttaaattgtatattttccatcaaaatgattcaaatacaaatgatctatctgaagccataaaaattcttgaaaaatgggccaaatctaacggcctggaaatatcggtcgaaaagagtcaaacattgcatattggcaaaaataattcaaaaaaagagtattttcttaatgggaaaattattccaagcgtagaaaaagtcaaagatttaggagtaataattgactctaaattatcttttgctgagcatataaataaaatcgtaaaaaatgcttatttaaaggcatatcatattttgagaataatgaagacaagagagctaaaaacgattataagaatgtataagacttacgtcagacctcaattagaatatgctgttgaaatttggaaccctaacctaaaaaaagatatagaacgaatagaaaaagtccagaaatttttcacgagaaaagcctttaaaaatgcggacttttacatagatcatattcagaaagacttgaaatttgtcagcttatagaattagacgagcgaagaaatattgatgacttaactaccgctttcaaaattatgaagggttttacgaatcttgatgctagtaattttacttattctgatcgatctactcgtaggccattacttttgagagtgcggcgcacaaccgcaaaaagtaagaataatttttttaaccgtgtagccaagaatcggaataatttaccaattgttccaattcagccagataaggcaaatcaattcagggcattgctaaaagctatggtatgagttctaagggatttaattgacatttatttattatatcatttatttttattttatactttatattgttgtactatttgacattttttattttttatgcgccacataagagcattaatgtgcccgtggtttgctcaataaaatataaacatgaaaaaaaacagggatattaattgaatgaactaaacaataaaatggaaagttgatgagatgatgaagaaataaaaagcgattcggaaaaaggaagtctttagaaagttagaattatgatagaaaattataaattttgtttgaacatgaaaaaagcaggcatattaattgaatgaacaacaataaattgggagatgatgaagaaataaaaagcgattcggaaaaaaaggaagtgctatccttgtgcanaagtttggtgtttttatagacgagaagcgaaagcgagccatctgattctctggctggtggattctttgttttgaaggcatacattgtggtgttcatccacaggtccttgtcgctgagcaaaccccgggcctgagccgcctcaatgaatgatccgtacacagtgccagcgtgcgtcctcagtgcttcccacccagttgggtcgcaaacaaccaaaagcagcaaccgaattgcctaagaaaattgaataatgctgaaagaaagacattgtcaccaggaggtcgcgattgttaggcgaaacgttcttcagtcggcaaatttcggaaacactcggcc

SEQ ID NO: 5637 - DNA, 1846 bp, Heterodera glycines
tcaggcatggcgctcagttcagcggtgagatgtgcagagacaatggcgcccatgacgaacatcgtttgcccttccacggttcggcaccattccgccattctgtcgacgaaacaaggaagcgagcgatcttcggtcgatgactcacgaggcgcaaccggaccatacccagcctaaaaccaaagcaaaatattagttgaggaacgtaacgagaaaggaagcaaaataccaaggatgagaagagttggttcaaagccgtgccgttttgaagaacaccaacttgaccggtgttaaatgcagccaaacgctcgatgtccaagaaattgcgcgccccagcacgaattcgaagaacagcaccgcggacattgttcggagcaagatgagcaaacacctgtgaatattttcaaattaatattcatcgttccttttctgcacctgttgtggtcgtatggttaaagcgttcgtatcaatattcagattgatccgccgtcgaatgtcgtgcatctgttgggcgagggcattaaagtctgtcacgtagtcaagcagagtgtcctaaacaaaatgttacacttaagtgaacagaacgaatatgacatacgtcaaaatcggccaactccccccctccctcgacttcggtttcgtcttcttcgtcctcctcgccatcgtcgtcatcatccatctcctcgaagtcatcatcagcgaccaagtgcgattgcagaacctgctcattggcgtcggctgcctcggaaatgtggtcgtcctccattgcgccctcgtgcaccgcgggtctttgctgcgtcaattcttcaccggtgtccatgtcttcctcttccgagtcatgaggcgactcctcttcactatcccctccatcctcgttctcttcttgagtggtgtccaacatactgtcgataatatctcctcgcaagtgcccgggttcgcccatcgattcgtccaattgttccacgtctccatgttcgttaggaattgccgcatgattttcttggtgtgcgttttggtcttctcggggagtcgaagcaatgggtgggtcaatgttggttgccggtcgacccatctcctcaaaggtagcacggctgagagtcaggtcatcgtcgtcgtaatattgaaatgagcgcgggtcataagagaaggatggcaacaaataagaacgcgcgcccattgctccgaattctgcgccgtttttcgtcaccattccttcgagcagcttcagcaatgtgttcacagtgtcgatacccggcttctcatgcaactaaaagttgttttgagacttcagatcaacaaaccattaattaaaacgcaccggaattttccaaatgcttctgacaaaaacatttgccaagttcttcttgtgaatgcttttgacaataaacatgccctgctttgcattgtgttgattgttcacctgttcaaaaatattccatcttttttctatatgatttaattacgcgcacctgtaaacactccctcaaatgcattgtcagctttgccaaaatggtcactttgtccgcaaatttcgcataagcaccgctgttgttctcatcggaagttgccatcgcacagtcaaagtcgccacattcgatgagaagtgatttgatgttgctcacgacatgatcggtgatgcgctgacctgacgaatttgagacgagctcgctgaccacggctttggcccagtgggcggtgtcggacaaatcgttgacgggagcggataggaggaaacgttcgatgatccagcgaagaaccgattggtcgccgagggattgctcgatgaaaataggaacagccacctttggataactgcgaagcacttcggcaatcaatttgagcaggtttg

SEQ ID NO: 5638 - DNA, 2234 bp, Heterodera glycines
aaacgcaccgcgaatctctccaaagtgcattctgacaaaaagatttgccaagttctgctcatggaagcttttgacgataaacatgccctgcttcgcattgtgttgattgttcacctgttcaaaaatattccatctcttgtctttaccatttaattacgcgcacctgcaaacactccctcaaatgcattgtcagctttgccaaaatggtcactttgtccgcaaatttcgcatgtgcaccgctgttgctctcatcggaagttgccatcgcattgtccaagtcgccactttcgacgagaagtgatttgatgttgcccacgacatgatcggtgatgcgctgacttgacgaacagccacctttggataactgcgaagcacttcggcaatcaatttgagcaggtttggaggctgcataagacgggtgtttttgtctgcgtccgccaatgtgtcaaattgcgccaagtccgtcacgatttgactcagaagctaaatatgaatagcaacaattacatttgacaataagaatgaaaacaaccgcttgaataaattggtctgaagccgccgctgcacttccattgcctgtgacgtcaccccgctgttctttgaccagaatttcgttttgtttgatggccatgcatttcttcgccgcgtccatgtaaagtgggggcgaccgcgccgccaaaggtaccaacatgcgcagaactctctaaaagtggatgaattactactatacagagactttgaatgaaaatgaacaaaccttaacatccttctgataacgcttcgttcgcattgcatgtctgcgcgaagtgatctcctgcatcgaaattggctggccattgcaagttgcggtgatcatttgttcgaagactgactgcagaagagcggcgtccgagtcgatgcactggcgaagaatgagcgttgccaacgtgttcagtgttggaggcgttgacgtgccatttggcaccatttgtgccgaaatcggattgcgcttcatctccagcagtgccttcactccatcctccttaaaaaggaatgttcaaaatgaaaatgcatttagacagacttacattcagaaactcctgcgccatcccatccaatgaaacgaggcgaagcaacaatgtcagcgcgttgtgtgccaattcgttgtccaacggttgagtgctgctcgactttaccagtttcaggatgcctttgacaagcagtcggtgtcgttcagtgcccttcctgagttcactttccagcttgacaagcttctccatattgaagtctccgcgcaggttggcttttgcgtagattggcactgatgagtgaagcggatggaagccctgctgttgctggtcaggcaacaaacgcttggtcatctcgttcaggtcaatgaagtaaacgcgctgggcaaccgtcagacgaacagaagtcttcttctccctgacagctttgttcagctgcgcaaccgacagcggagtgaattcgcgccactcgcccgcgcccgtgtaatggtcatccgctgtccagtagaaccactaaaacttggtttatgtgctgcactttccacaaacaaaagacgcgacctgaaattgagttccgtccaatgcttcctgtaagagatcctgtcgtatgtctgcactccgctcctgctcgtacatgttgaagaacagcaacatcggcgtcagcaatttgctcgtcaatttttcgcaacaattgccattgatacgcgcttcgaagagattaaacattcgatcatatgtcgaacactccggagaagccataggtaacattgaaatgatctgcaaaaatatgattcactggtcaactgctaatctttagttttttatatctgaatatttcaattccgcaatcctcctgaagaatgggggtccctaattttttttggcgctagttgcaaagaggaaacttttgaaaattttttcaacttttttttggtcaaattttttttttgtttaaaaagtcctgaaaccaagtacccgggtgttttaaaggtcgctgatcacgaatatgacaattatttgggcctattaagcaaatttggcgctagttataaagtgatagattttgaattttatcaaaaaccataggggggacccttttgttttgtaaatttttttttggataaaaatcgtgaatatacattttattcaccataattgtgctgttaatacttaatattcatcattatgtgtaaaaaaaacaaaaaaaaaatttgaccaaaaaaaagt

SEQ ID NO: 5639 - DNA, 7777 bp, Heterodera glycines
tgtatttatatgctcatcatccccatttgaccgatttgtctgtatatgtccaaatatctctgatgtacatatatttgtagtcgtgtataaagtccaatgaattgagaaaaactcggaattttgtaatattttgattttgggctacaatcggttggaaaaatgaacaagaacctttcagtttattgacggtactcagtcagccctttaataatttattttaagattttctttacataagaccttttttaactcccccaattcctcccctccccacgtgcaattcacaataaaacggaagacaaaaaatttggaaaaattacatttatttaatttgatcactctaaattcattcctattcattgattttgtcttttattaagaggtttataacaaaagaaacgtgaaaatcattaaaaacgaaaatgagaaaaataatcaaaattgaaacgtaaaagataattaaatatatatgattaaaacaaaaaattcaagcactggtaagaatgggggtctgagtgaaaaaatagtgatgaaaattggagttaaaggaaaaaataaaaaataaaaattaatattgtttaaaagtagcaggcttttcgtctttattctctacttctttcccatggttcagttcctctagagaaatttaaatattttgaattttctttttgtatactcaggggtttcctatcgagaaaataagatttatttacatattttatcattttttaaatgaaaatccgtacaaattgttgaacctattaatcccaaaaaccagccttttttgttgaaaatctgttaacaaattgcacccaaatttttaaaatttcccccggcggcgcctatcggcaccgccggacccttttcttcccaaaaagttttttggaaaaagcgcgccgaaaaaaagttatgtgaaaagcaaacctgaatttctaataatactcgatcatttagtccaaaatgattaattgtttgaaataattgaagaaaatttgttttgaaaattttcattgatttaatttagctttaacttttggagtttattcaataaaaaacaaagtaaaaatttaattttgtattattttcagttgaaaaaaaaaattaaaatttgaattttttaaaaattttttgaatttttaaaaattccctgttggtcccggttcccggtctcgaaaaaaaatcgaggtcccggtcccggcttcttaggtcccggtcccggttttgcccaaaattcccggtcccgctcaactctagttagaaatattcccattttgtgccgcgctagcgacgacctttttttcttttcgcccgtgcaccggcacttgattaattattttttctaatcaggaaaattttaaaaagtttaaaaaatttatgtttgaaaacttggaaatttttggggttttaaatgcgcgattcccagcaaatttttttgtgcgatccgcgattctcgaccgcggcttccgaggccaagacaattgtaacaatgtgttctttttgcttttagtggcactaattgcatcgggatcttcggaaaaatccttaacaaaaatgcaataaaaagaaaaatacaactctaagaattgaaatttttctcaaaaattgatccgcaaaattagtttttttgtttgttttcattttcccattttccgcttcgatttcgccagcagtacattcgtttccttctgcctcaacttttattggagtcccttctaaaatcatttaatattagaaaatttatttttttttcaaaattaattagcaattcccatttaattttcaaaaaaatgacactttaaataacactcacatttttaagctccagtttggtgattttcaatacgaattccattttgacaaactttttattaagttcctaaaatgaaagttcacaataaaagatgtaaattttaattgatgacctaaaaaagaatgccccaattcagaattttatttaaaaatgcaattgaaaaattggatttaattaatatctgagaatagaacaaatatttgtaaaaattcctttggtatgggcctggggggggggctcggagtcggggagaaaccctagtttaaaaccaagagtcaagaaatgccatccttatttaagagaaattaaattattttgtgaagtttctcgtattaatttttaatattcataggaattttttcgaagaaacttgaaactgagtcacaaaatcgacgttttaataaacgaaattaatagcaaataaaatagtaattagtattataaagccaaaatcaaaattgaaaaaaaaagaatttaaaaaataaacataaataaagtaaaaatgacagcaattagatgaatttctccttcttccattctttttgctttcttcagagagtcgccaaattgaatttgaaatttggcccaaagttcgcctcgattttgtcgcccacccacaaagaaacgcacggaaacagagaattgagagaattggcgggagtttgaatgaaaaaagaggaataatcttaaaaataaaattttaattaatttgttttttcattttaattggcccacccattcgttggccattcttcgtcaagaagatcagtcgagtatccaagaaaatgccacatccgaccacgtcaccagtggaaaactccgatgatttgtatgccatttccacgtccgccgattgcattgccacgggggaaaatgacgaaccaaataatgacattggcattttgcacggccgattgatgccattacagccaaatgagccatcgcttcggtacccgtaactgttcaaaatttgaccaattgacccgtccaatggcacttccaatcgcagcaaaactgttaaaataaattcaaaattataaataaaacgctaagaaatcatcaaaatgaacacctttccaatttgaacactttcatttcgaagtagaaaattccgggacgacaaaagttcgtaattggaaatttcgcaaaaacagagcgccatcctaattaagaaagtaattaattaattacattttttaatttttatattaaataccaaatctgttgcccttgcaattgatcgtcaattgcttttccccaatgatttcgatgtctttgtggcaaactttggcatcccagccattttgttgctgcgaattaggcacttcctgaaattaaatggcatttgtgaaataattaaggtttccttcccacctttgcaactttcgctgagacaaccgccggcggcgaatggtcgcccgatgacgtcactaaagcaactaaattagcaataaatacattttaaaaagaaaaattaattttttaacacctaaatatttataattagggctgtaaaaaatatgtacaaaaagtggtcatatatgtacataaatatgtaaaaaaaaatcccgaaatatgtaagaaatatgtataaaaacccaaaatatgtacgaaaatatgtaaataaaattttttttaattgttattttttggaaaatttttttttcataaagtgttaaataggcacaaaatgccataaaaatgaccaaaatgtttaaaatcaccttttaacatttgaaaaattatttttggaggggtacatttaaaaaaaagattttttaattttttcacaagaaatttctaaaaattttcaaaaattctcagaatagctatgtaaaaaaatgaaaaatttgccgaaatttttggattttttttgagaatttccaaaaatttccgtaaaaaatcctcaaatatgtaaaaaaaatgaaaatatgtaagaaaaatgtccgaaatatgtaccaaatatgtataaaatcccgatataatacgagggttttgtcccctctcaaaaaatgcattttttttataacgccaatttttaattttaaataatttgccaattgtgcccacccaaaacattgtttttgtccaccacggcatattttccatccaatttctgttcggtgtttttgttctgttgaccaacactttccttctgctgcttttcctctgctaaacaaatgtatccaattgaataatagaaaatgaaaattcaaaataattggcattggtcagctaattaaatatgttcatttaaaatttgtaactgatcaaaattgtaaaagcttatggtccgttaaaattttttcgcctttttaaagtatgcaaaatttcggtccgttaattatttattttaaatttattatttaccctttctgccctcctctttgttctgccgattttccaattgtttgattcgctccaccaatgaattgaacacatcgacagaaactgaaataattttgaagcatacagtactgtccgagtacggtaataaaaattatttatttttttaaattgtctctaccgtattttttgtccaattgctgctgcttttcctgctccatcttctcaactttcgccttcaattcactgttttccgacatcagcttttgtttctccaactctgctttaagcgccttctgaattttcttacaaaattcgaaagtttctgttttatgcgcgttcgctctcagttatttcgtcattttttaaattttttttaataattaatttttcttacattctctgcattcaattccccgtttttgcacagcaatttcgtttctctcaattcggcactggcaagtttttctcggcattccttaaataaaaaaagttttttcagtccactaaataatttccaatttccttcactcattaattgcatgatttttggcaaaatgtctcttgattgctctcggaattggtcggccctttgtccgtgactgatccgtccggcctctctcccccccccccatctgtgctcatttgtcctccccccccccactgtgatcatttgtgctcccccctctgtgctcatttgtccgttctgaaatgtcccaccttcaacagctgctgatcactgaccaaaaattgtgctgccaattggtcgctcaaatctccgtgccaactgaacacttcatacttgtccacttcttctgctgctgctgctaatggtgataaatttttattttattttatttaaaaaagataaaataattttccttttttcgtaattctttttttaattatttctcttaccctgatcagctgttggacggaaaaagcaatttggcgaaccgataaaatttgaagacatttttcgaattaataaggtattaattggactggctacaaattaaaatttttaaataaaaaaaatatgaaaattggaaataaaattcatcttcgcatgtaaatgaatgcatgaacatttgatcttttgcgctgaatctcccctctatttatgggctggcatttgacggcaaaaaagtaatttgggcaaaattatgacccatcaattagaatactttttagaaatttataataatctcttcttttttttggcttgggctgttgagcaaaatgatgacctaaaaaatgggagagggaaaatgcttttatgcaaaaattgaaaaaaagtaatatgattggagcttaaagtattaatcagcgaaagatgtgatggacaattaaatgtttctttttggtattaatatgtaaattgttcagcattgttgtgatcagtgttgaaaaaacggtgatcaaaaatataatatttttatgttctaaaacattccatttcattgacatttttagtgacgaaataccgtaaatacaggggtaggtaccgtaaaaagttccaggggatgggaaattttttttttaaattggctcaaaatcgtaaaattttgtcattttttgaacaaaatcgttaagaaatcgcattaaaaattacaaatttttcgccgagccactgtccccaaaattttttggaagcgtgccgcaaaaaaaagcatttttaaaagcaaaaaaagtcgtcgtttggcttttatttgcaaaatttggtaaatttttggacacaatttgttagcaattcgcattaaaaattacaaatttttttccggcggcgcctagcggcaccgccggactctcttccctcacacattctcaaaaagttttttggaaaaagtgcaaaaaaaaaaatcaaaaagttttttacgaaaatttcaagattaaatttttgaaaaaattttcagcgattttttctaaatgttttcgaaaaactattaattcctataaaaaattgaaaatccgtttcaaaattttttcaactttttttttttttacaagtacatattaaaataattttttttggtgtgattaaatctattatttcaactgaccgatgttttttcaagttttcaaaaaatgcttaaatggttttaaaatacattcttattataaattagatatttttagacgttcccaagcaattaattgattttttcaagcatttgtttgttttttaaaacaaatttaaaaaaatccaggtccaggcctggatccaggtctcgaggagcctggatttttcctggacctggattttcctaaattttaggcaattaaaggaaatgcacgacgattttgaaacaaaaattgatgaggtggaaagaatttaaattttataaatgcaattacctatttttattttattttccattggaacagaaactaaatgcgaatgccgaatttgccaattccatccaaacaaaatgcaccaaatttgaagaacagcaaaacaaattgaaaaattgtgttgacattttgaactaccgattcggaaatggtaaaattgcataatttaatatgtgaaaaataaagcatttatttaatgtcattttaaaatttaattatgtatatatatgtgattaaaaattaagttaattcaaaaagattaatagggaatgctgtaaaattactttttttaaaaagaataaaaacaattctaataaatatttgtagtaatatttttaagcactgattgaacaaatcttggaattacaaaatgaacagaaggaaattttgggacgaatgagtgaaatggagaagaaacagcaaaatgacgaggaaaaggaaacggaaaagtacggtaagtgaatgaatgcctaccgtaatgaagcatttttaaatttaaaaataataaaaaattaggcaaactgaatgcaattttgggacggattatcattgtttatgagtcaaaattggatatttgttaatcattttaattgattaggaacaataatttttgcgctgtaatctgctgatcgtcttttgcaaatgcaaaaccagcagacgaagctttgtgccaaaattgatgcggtggaaacgaactcttctgcaaaatggagtagtatgattcttgagttgttgaatagaggggaggcggaaataatgttacatttagttgatttatcagtttttgtgttttcgctcgcaaatagttacaaaggatatttttaaaggatgaattatcttcagtgtcgagaatggttagttctgcttgttgaataaataaagaaaagtttcaataaattttttccagtcatcaattaaaatggatatgcaataatataaaaaaattcaaaggagtgaaaagttttccaaaaaaactgcatatattttctagcttgaaaaattataatcaattaagagtgttttcccttcatgttttttcaaaatttaacctaaaatcaataaattattgatgaatcatgatttcagaatggcaaggaataaagtgatacggacatcaatattctttattcttcattgctcatttaaacttacatatgtcagcggattaataatttgcttctatatcacttcagctcatcgctcgatgtcgaagaaggattaacgcggcacaattgagatcccccaacaaataacatactaaaatga

SEQ ID NO: 5640 - DNA, 2507 bp, Heterodera glycines
tgcctagcgggggatgcgccgaaggcgctgaccccgctagtaacatataaaaatgctaccaaagcgcgctatgggctttcagcatgaaaatcctcccaaatcgtgaattattaataatttttttaattctcatgttcaataaatttatattctgtccatcttttttttaattaaaattatttttaagaattgtcttacaaggaacacccgaactgtgagtcggaaaagcaacaaaaatccaaaaaattgatcattttatggaaaaacaaagcacaattaaattttcataattttccctggtagcgcctatagagacaccgcctgactatataccttaaagtccttaaaatgtcaatctaaaacccccggaaaatgtttattttaactacatatctgttaacaaaccactactaaatttcgaaattctcaactttaagatttaacacacaaaacaaaatgaagtggaaattcactgataccatttcccattctaatcagtcatccatctccatatcagcaatattcttttcattcagtccttcttcacttggattgtccatcataatttttttcgcaacaaaattacacagattttgatggtttaatcccaacaattgttgttttaactaaaataattttcaattaattagatggaaatgactttttacatgttgattttgtatgggataaataatttcgacatcatcgttagtaattatattatgattatcaattctatcagctgtcatcttatctttgcttttgctccaaaaattaaatatttgttcaacataagcagcgcattgacgcacatcaaacttaagaaaaatatataattagatttgctaataaatattaattacattgtttttgccaatgccaaagtcctcaaatttggcaacagtaatccgatgaagaaaagccgtgggaacaaatccacgtttaaccagaccactaaattattattcattttcccttagcaaataaatattttatttatccttttatattataaataataataattttgttaagtaaggtattgtttaatttataactgactctattttgtgcatttctttacacattaattctgccatcgttatgaacattccgataaagcataatgtgcttccatttttatgttcaagcttgaaaacataattaattaattgaattttaaatttcttttcttcgtatttaacttacggcagaaagggcttttaagcgagaatttccatccaattcataaccaatttcattgcaactcattaacaaattataaagaagtgtgcataaattaggtccaatcttcagctgatttgtttctattatctctctgatttcattatttatttgcaaaatttgaaaatcgacgcattgctaaaatatttttctgaatatttttgaaaaatattaaaagcaaactgtgctaaaatcattggaattgagcgatgaactaagttgggaaaacattttcaaaaaagcaataacattttcaattggtatcagtaattttggctcattagcaaattctaaaaaataattaattatattaaaaacaacaaaataaattttaaggtattattacctaatttccttaaaaatgttgatgtgttttgttgaaaatgaggctgaaatcccatttctgtgttcattccatttgcagtgccaaaaatttgagaaatgcatgcaaaaattgcaaaataacaaaaatttgacattttcactgaatgaattgcattaacttttgaatcttttgatctgtttattatataattaaaataatattattaaaataaattcttaaaaattatgaatatttcgaaatccatgaatttgcattttaatattgaatgacatacatatacgccgtatagaaaaaataagcagaaaattcttaatctcacattgatttttagcttgtcatttcgtgacatgccgagttaataaaataatttttgaatgctataaagtgatttaaaaatcaaatgagaaaaacagtaaaaaattttcttctacactttctatttttttttgtataggcttcttttcggcccagtctttatatacatgtggcccaaaatgtaaatattgatatcatagtccccaaactcaaaataataacggtctgaatcggtgtaaaaaggttagaaatgggtaacaaaaaaaaagaattaggggcgcgcttgcccctttcaggctgaaaaagtgcaggaagtggagtgccaaattcagcttgggactcaacttaccatactgttggtctgacggccaaatttaatttattttcactgttcgcaatcactttccatcacgtcgatcaattcggagaaatttaaacattcaaacgtacgagtgatttctgctcaagtggaacgaagccgtactagaaagagttgcgccatagttgtatcaaaatcatggacggcaataaattgagcagctttttacggaatgaatgtaatcgctttgcggaaagctcagcgggccgtatgataaacttg

SEQ ID NO: 5641 - DNA, 1109 bp, Heterodera glycines
  unsure (1)..(1109): unsure at all n locations
ctcatcgtccgaatattatccngttcctaattaaaaaaaaggaaaatatttaatattatttaagtttttaccgggtctttgtcgtctaagagaaaactgttgctgtcataaaaaataattgttgtgcgcattcgcattattggaaaagtaattagcattggtacaatcaacaaaaacaccatcagatgcctaaagtgttttttccatagctaaaaatttttaaaaaacggaaattaattaatttaatttaaatattaattaccattttgtgacgcaatggaaatgcaattgcagtgaaacgattcaacaaaatgaaaactgtcacaatgtttgagacttggaataccaaagtttttgtgaaaaaggttaacaagacgattgcccaatttggtacggtgctgtaaattgacaacaattgttggccaaagaatgctggaagcaaattgcccaaggaattgggcactaaactaagaatatcctaaaataaaattccaatttaaataaattttgaaatatatttttttaaatagcttacaaaaacgccacggatgaagaataatttgtaaaatggtgactttgaaaattgtttatgctttatgatagtaatcatttccaaaatataaacaattgtcgaaggaatgtcaatgcaaattccaaaataattaaataactgtcgatggctgagcgacaaattataaatttggtcgagcattttttgccttttcaaataaatttttgacaaaggtaaattttttgttatttttatagaaaatggccaccgatgccgagagccaccttaaaaaatttttttttaagaattggaaatttttcacgggttttgtgcaagaatttatcaatttctgagaatttatacaaataataaattgtcaaattggcagatataagttaccacaaacactaaatagcgtcgaaagatctgaacgtgaaaaatgtttgctctcagccaaaggttaataaaattagaaaaattaaattttctctttatgcaaaagactaattcaatagaaaaattattgttgacgctattagttcaatataccacaaaattctaagcacaaattaagataaatggtactcactcattatat

SEQ ID NO: 5642 - DNA, 1915 bp, Heterodera glycines
  unsure (1)..(1915): unsure at all n locations
tttgctcttacgtttagagccaaatcacccagacacgaaagaatacaaatatgcctcacccaattggggatcttggctcgacttttcagtgatctttcgcacctacttcctcncctttatacacacatttggtgtgtttttccggcatttttgctaatgccttttttacattgctgccgtggcggccaaataatttggttgtaaatatcaaccgccgccaggaggagtcgaatcgaccaaaatcgttttaataaattgtgtttggcatttatttttatatttagggatgaaacaaatttttaaaaataaaacaggaaagattgtcgctcttaagaaataactcttaaaaatcaaaaataataattatataatacaatgaaaagatttgtatttttctctatattctctcgcttaactagtccatatctcggttttcttgatgctctctcaattcaatggtcgctggtgcccgtttaaacgtggccactagaaaattattcagtattttatttatatcaatttgaagcctttgctttactctatctaatgcattttatttcagaatttatcaatttttaaccaagatattgtttgttaaaaatacgtgcaaaagtggagaaaaatggcatttaaactgcccgggcgttgcacggagttacatatttaccaacccaatataagagatgttctgatttggaggatctgaatcttacaaaattataatgttttaatttataagaaagtagctttcggggtaacgaccaaaatttgttgtttttcttaaaaatcataaatttgagattttatggcgaactgttaatcatttgttcttttttatccaatcatgttattatctaactattttcttgttgctttcacaatttatctttagtattgcacccactaaccacttactggcaccgcccaaaaaaatctttttcaagagtgaaaaaattagaagggctgggctgggaagcttggccaatcatctgctgatggtcttttaagcgcttcgctgattgggtctgttcttgtttctaaaaaatgttctgattgggggtagtgcctattttcatcagaaaaagtaaaatttctggaaaaattagttactttctaacaaaattcaataaattctaaaatttttccacggcggcgcctatcggcactgcggcccccaaaactcctattttcgaaaaaaataatatttgttacattttgatcgaataaattgtaaaaatagctgatttaaagtaattttgcataatattcttattttgaccctaaaattcttattttttcggccttgatgtttttattttgaaaaatctcgatccgggcccggtttaaacaggtgtatcgggcgtcccaaatttgtcaggcgctcgcgggcaggaacttttacaatttttggaacgctgaataaaaaaaaacaaaaattgtcttctattttaacttgagataattatttaaatagctagcaattcgttaacagaatttgtcaaaatatgaccagtttctttcattttttagaagcattagcacaatcaagaatattaaatagaccatattgtacataaatgaatgatgacttttttatttattattctgtagaacttattttctaatttcgattcaaaatttccgaattccctcactattgcaccaatttatttatcaataatttttctgacttttttggcatataattttgggatatacttcataacgaaaattctagcccacagattaaaaaactttcttaaaaaaagtaatattaagcaaagcattataaattataataatgcttgcaaaatttattanngaatttaatgcgaataataaatcataatatagccaaaaatatattcattaattttgcttatattgcctgctctatttttacatttgctgctaa

SEQ ID NO: 5643 - DNA, 2210 bp, Heterodera glycines
  unsure (1)..(2210): unsure at all n locations
atgatgaggagcttgacgaagaattttggaacaatttgcctaagatcattgatntaccaaaattagacggagttggatttataggaaatcatattaaatacaccaagcaaacaaaaaaaggtttgaataaagacaaaaaatactaataaataatattttgtaaaaaattactagaattaatttatgtttaggtaaagatggacaggactcagcaacaattcaactttgagggggcaaaaaaatctgattggaaagctattcaatgaaaaattaccagggctgggattttcatggaatcaaggccgccgttttaaatcaattagatcacttctagctttgccaacatgttaaaagtcagaaaattcaaataatgatgttatgccaaaatattcgttcaaaatttcaaaggttttaaaacggttgggactagggctacgatttatagttgctaaaaactgccaaaataattagtttttaatttctaaaaaacctccaaaatagttgctaaaaatgggtaaatagttgcaaaaaaagttccgaatttaggggggtgtaaaatgacaaaatgtattcaaaaaagtaaaaaaattaggccaaatcagtattgagataaataatttttaaaatcacaaattcttgtaataaataaataaataaattttggaggtgaatttttgagaaatttttcatttctcataggtgcatttttgaaaattttcgggtcgattcttaggggtgtattttttgaaaaaatttaggtcgattcttaggggtatttcctttttattgtatttttgttaacaaattttgggcaaaatgccaaaataatcaaaattgtttttttcaaaaattttatagttttttaattgctaaaaataaaaaaactagaaaataagtgctaataactcgaaaagtagtttaataacagccgaaaaaaaacatgtttttcgtgcatttcaggccacggggagctcaggaaaaaatagtgaaaaaactataaattggagccctagttgggacaacttttgtattttttcctctttttccagagctgaaattggttttaaggtttaaaattgttttataagaatttactaaatgaaaatcctagccttagcagattgagcaaataataccttttttcggtcctttattttgcgttattattattcttcattttcttaatttgtacaatatacattctctctatctctgtctatcttctcttctctctctctatcttcggttacgctgccacacgcctaattttttattttttttcggtcatattgtaaaatttcaagacttctatcagtttcaaatgattatagtagagtagagcgggaccgggaattttgggcaaacccgggaccgggaccttttcgggttgaaaaaccgggaatttttggctgggaaaaccgggaaaaaacccgggactggtcccggtcccggtcaaaaccgggacctcggtactcagttgtactcagttgtccgtgttttggtcccggtcccgctctactctagattatagcaaggaaatgcgtttttcaaaaagctcataacttgctccattaatgtgctgttagagtgaaaattctctatcatttctctgtgctaaacagttccgccaaaagacaaccgaaaaataaatttctagctgatggcggccgttcaaattgaggtttattagaaaaatgctaaaatatggacataataccaaaatatggacaaatatggagttggacataaattgcgaaatatggaaaacatgaatatagaactccgtcctagaagttttaaccaagctaaaaacatgttttttgtgcgttcaggtcgcccataatccaggaaaaaatatggattcccacatatgtaattggacaccctagtttttgaattttcaattaaaaaattgcaagcaaaaaaaaatagaaatattgagctcgggtcgccatttgtgattgattatttctacaattcatgttatttagatatgacttgtttattttgtgcttattttattgatttgggtacaaaaattacaaaaaatggtgtttattagccaaaattttaaatgccaatttttgttgcaaaatcttcaaacctgataaaaaaattttcaatttctctaggacacgtgtcggcaacacaggccaaaattgattgcttagaagaaatttcgcataaagacactaaagaaaattcaaaaa

SEQ ID NO: 5644 - DNA, 2049 bp, Heterodera glycines
  unsure (1)..(2049): unsure at all n locations
ttttcggttaaaatttctccgcgctttggccccctgctctttcgggggcagntatcatttttggtgccttgtccaccctgttgaccattacgtgggcattcccccgttttttgcgcccttttttatcaccggctcttcctgcccgtggtcattgttttttgccttttgcttagccatcgcccggccatttctcgccgctttggcccttgtctttttccgttgcctctggccagcatcccactgactcaggcccccccttttttggcttccctgtgtttaccccatctaacacagtttgattaagaaactcactcagaatgcatttgacgatgaatgcgttggcgtccgtgttcagctcaacggtcgggtcgaattggaagcgctgctccacgctgttcagttcgccgcggaccatctccggcaggtgcaaaatgttcactgtcactttgccaataccgcctccactgctcatcaccgccgtgttagcggatgaggtgacggcaccaccaaaatggccagcagtttccctctgttcactcggcacgggcagcaaatcgtccatcgagctcttaaaaatacaaaaaatttcgttttgttgaaatgttttaagtcaattgtcatacacggcgatggttaaatacaggagaaatgtggacataaaaatggaaaaacaaattcccaagcattttttcttccaaaaaacaacccgccgataaaacgtacgtaaagatcctcaacaggcgtcacactgccaggccattggtgttgctgctgtgcagcagaattcactgccgacggaccgcccgccgccggcgccatgccaccaccaccagctgctgacgacgcgtagcttcccagttgcaccgccggttgtcctgcctggactccgccaagttctgctttgtgctgtgttgtgcctgccgccggtggtgccgttgccgccgcgaccatttggcgatgctgctgttgctgcctctgctgcatcatcatttgttgctggagctgttgttgttgctgctgatgaaagagcatttgttgctgctgctgtgtgttgtacgtcatgttcggctgttgctggtggtaatttgtgtactgctgctgaacggcttggtaatgttgctgttgttgctgatggtatgccgccggctccatcggttgaccgtgcgcagcagctgtcgacgtgggcatcccaacggcgtagtacggcacctgcccagcaggcggtggcatcattccgccactctgcggcggaatgtacgcgcccgtcggtgtgccggccttcatggcgttcgtcggcgccaccgggtaattgccgcgtggtggcatcgccgctgccgagttccagtccatccaattgttcattgcggctgcgcccggttgaacagagcccatcgccgacggtggcatcatttgttgctgttggttgtgagccggaccatatggcggcatctgtgccgagtaatttctttgatactgtacctagaattgcggaaatcctcctttttctttgttgacaatttggggaccggactcaaagggtcgaaatcggtaaaaaccccaacgcgtgcgtattgccccgactcgtactgtttttcggcgccaaatcaaacattctttgtatcattagatagcccttaaaattccatatctccatacaaaattcaagaaaattttattgtttttctaagtttgacaaaaaatcacaataaatttttttgtgttcgtaacctttcaaaaatgataatttttttaaattacaaaatatgtttaatttgattaaatttacaacattttttgtcggaaaacatacaaaaggactagttcatgtgggattcgtccgtctaaatcctgctagattttacccccccccccccccgttgatccgctatttcccccccccctcccccatacattttgctccatcatcatttgctgttgctgctgcggttgtgccatggacgacggttgcgggtacacggccgggtgcggctgtgtggcgctgaacaacagcgaagcggcggaggatggcatttgttgttggtggtggtg

SEQ ID NO: 5645 - DNA, 4204 bp, Heterodera glycines
cctgcccagcaggcggcggcttcattctgcccctcttcggcggaaagtacgcgccccgtcggtgtgacgggccttcatggcgttcgtcggcgccaccgggtaattgccgcgtggtggcatcgccgctgccgagttccagtccatccaattgttcattgcggctgcgcccggttgaacagagcccatcgccgacggtggcatcatttgttgctgttggttgtgagccggaccatatggcggcatctgtgccgagtaatttctttgatactgtacctagaattgcggaaatcctcctttttctttgttgacaatttggggaccggactcaaagggtcgaaatcggtaaaaaccccaacgcgtgcgtattgccccgactcgtactgtttttcggcgccaaatcaaacattctttgtatcattagatagcccttaaaattccatatctccatacaaaattcaagaaaattttattgtttttctaagtttgacaaaaaatcacaataaatttttttgtgttcgtaacctttcaaaaatgataatttttttaaattacaaaatatgtttaatttgattaaatttacaacattttttgtcggaaaaccttacaaaaggactagttcatgtgggattcgtccgtctaaatcctgctagatttgaccccccccccctttatccgctatttctccccctcccccatacattttgctccatcatcatttgctgttgctgctgctgcggttgtgccatggacgacggttgcgggtacacggccgggtgcggctgtgtggcgctgaacatcatagaagcggcggaggatggcatttgttgttggtggtggtggtgcgatgacatcatccgtcggagcacaaattcaatgtcgaacaactccttgacgcccacaaaactgtggaaaaatacaatatacaggaattgtggtggcagaatgggaatttattagaaagaagactacggattggacaaaacaaaatttcagcatttttattttaccattcgaagcgcaacaccgaaagcattgtgttgatacggcggagctgaaaaacaaaactgcggagtaaaagaaagctaaaattagatatttttaattagtaattcagcgtaaaatttgtgaatttatttgcccttgattttggcggtgaacccatttagcaagaccatttaaaattctgatcacaatgaccaaccatcgccgggtcggccgcgtatttgtttagcgaattgtgcaggaaggcgacaaactgctgcagttggcacaccttctcgtagtagggtcgttcctcctccccaagtgccttcagttgttgcacaatttcgggtgccaacgttggcgggtagtcgaaccccgcggcggagccgccgtactgctgggccattgcagcggcggcacccggcacaatggcatgttgttgctgttggtgtggtggtcccatgaatgggcctccggcactgaactgttgctgatgaagcgtcgttgtcggcatgttggccggaggatggtggtgctggaaatggaaaatgttatgtacacacacaaagtttcaattgggagcagttcgtttgccgctcccctaaagatttattttttgttaaataataataataaaaaaaaatttgcttataagtaacattttttctaactaggacaactttcaaaaaagttgtttgtcttttaaacagaattttagaatgcgatgacatttactctaaagacgacgacattgaaagtcgagaataagtttgcactccacccgcatggtcccccccccccgagaaatttttttataaaaaatttactaacagaaatttttcgagaaaaaatctcagttttttataagaaaattctaaaaaaaaaaattttttgttgagaaattgttatttcttaaagactcgatgaactagtggcaaaagtgaatcgtgttgactccctcctcacctgcatctgctcttgctgctgctgtctttgccagtgccgttgctgctgcatttgttgcgcggtgaggacggcgttcggcattttgccaccaccgccggcacccgccgtgcccatcatcagttgaggcgtggcgaccgggtaagcggctgcactcgcactgcttgtcgccattgtgatcggctgaccaacggacggcgctgtgctgtctgaaaaaaaaaagttttaaaagttgacagggaaaaatgaagaaatggattctgccacaaattatttcccatgccaattgcaaattagggcaaaatgcacgagactctcgagaaaaagtggcttaataaatttggcagtcgatggcaaaaggccccagaaaagtacagtgccaactaccaatacacacatgggtactgttgctgctggtgcgctggttggaagttgctgctgctaattacacccgcaacatctctcgtgtcgacgacggtgccggcatgtgacgttgcgcctaccattacggcggcggcggtcgtgccggacgccgccatggccatggacggcgcggaagacatcgccggcggcggctgtcccatcggttgatgaaaggcatcggcggcgccaatttgttgctgctgatgttggacggcggcggccatcctttgctgctgctgttgttgctgatgcgttggctgtgggtcgggaggcacctgaaaattttgaggaaattggttgaacaacagaaccgactctcgctcatttgagaaaccagagcagcggaacctcaaaatcaagtgtaaaatgcatgctttttcaatcgcacatagcataagcagcattaattgattggtgtcaggaaaatagctaaagattttataaccgaaacttcatttttaatgaattcttggaaaaaatgaatattcaaacatttaatttttgaattttttatacttattgtatcacaagatgttgttgttttcttaacttgaaagcaatcaatgctttctttgattgaaaaaaacatgaatttgaacccgatttttagtgtttcggtggaaatacccaaggcgcaaatgtggggtaaatccattggaatattctgcgcgatttgtggccaactgcgccaaatagaaaatggggggtgtgtgagcgcttttttggcaaaaaataaaataaaaaatatataatttcggagacgatatatccaaacgaaaaccccatttttttaaaaacagtataggaaatggcacggctcggattcgcagcatcaattaagattgcgctgctctccgtcccccaccccaaacaaatacacactttgtaggcggaggaagtgaccgccgaagcagcgacaaccgtgccgcccgtggcagtgactgtgcccgttgccggtgagccctgcgactgggcaacgctttggggcgtcgcggacggttttggcacaccgccgccgccaagttggtgctgttggaacacgggagaaacggcgctgctcttcgagttgcaattgatagcattgattacctatacacaaaaaattacggcattaatgtgccaaagccaaaaagcaggatttacgaaatttgaaccggcataaaattggattaattcaatagaaattgctttgaaaaatacaattgactcactttcgcaatcgttctcatgtactcgtctttgctgctgcacttttggaagacgtaatcctccacctggaaagtaaaaagtaaaaaaatatttttaaaatggcaccaccgccgacctgtcgggcatcgccagggacctgtaaaaaattataagtgaaaattcgagcaatcgtgaaacgatgactcaccggtaaattcggcgcattctgacgattccgtgccaattccggttcactgtaaaaggatgaagtactgcaaaaatagctatcaagaaaaatgtttccgttaaggttttctttattggtaccccagatatattccaagaaaggtcgtaaattttgccaaaaacccacaaaattagcaaattttcagcgaaaacatgttaaaaatttcaaaattttcgatggctgcgcctaggcaccgctgggttcgcaaaaaaataaaaggagccacaaaaacgccgtgaaacgttgaatcatcgcccgagggcggtaccaccaaaagccaaaatcttccctgcctgtattccttaaaatgctttcaaatttgtccaccgttaacttacagtcggttgatgacattgtcccggaaggactgcgacggccaatcggcttcggccaccaaag

SEQ ID NO: 5646 - DNA, 1426 bp, Heterodera glycines
tgctgctgacatttgctgctttacgtaatatataacaaaaacaaaatttaagcgcgttaaattttaagatagaaaaatggaaatgaaaattggcaacgccaaccgggcgaaaagccggacaaattgttaccattccaacaagaaaaaaaaagtgaaaaatcggctttaaaagtcagtgttttattcgcaatatgcaaaatggaggagagcgataggggtgaggaggggggattggtcacatgacaactcgtgccattttctttaattttcaaaaaaaatttccgagaaaaaccctaagaaaattttttaataaaatttcaagaaaaatttttctcaatgttttcggtgatttttggaaaaattagtattcatcatacaatttcataaaaaaaaatcgtggaaattttttttttgaaattttttattaaaaattttctatttttttttataaaaatttctaaaaaaattcggtggcgggattttgtcccgccagagagggttcggctttttgcatccatcacatatcggcgggcaaaaaaaaaatatggacgagtggggagaggaggacataacattaatttttgaacagcatctcgtcctgccttcgcttctgcacaattgtgcccggcttgttctgcgcttcggggtggttggccaactccagcggacagttcgacacgggactctcgagcagacactgcttcaggtcgtagaacacctccttatcctccggcgtcaaaaaggtgatcgacttgcccttcttgccggcacgaccttggaaagaaaagacggaatgtcaaataatatcaaagaagaagaaataagaaatttccaactacataacaattttgaaagagtttgaaaacggggcttttcgaaacgataaatttaaaaattttagagggcaaaaaaaacatattgtattttgttttttgtcccatttcctgcaccgtttaaaaaaaaatttgtaaaatgcgtagtccatggctatcaattacgttttattgtccgaaatttaaaaatctaacataagcgtagaaattacgaaattttaccgaccttctgaatccaatttaaaaagtgccccgcaaaaactacgaaattgtagtctcgagcaaacaaaacccgtatccagaaataagttttaggaaaggcacccgttttttttctttgaatttccgaccaataattttttaattttctcaaaatcttcggcgtcatgggagaaaaattgggtattttagccaaattttgcattttgggatcaaatcttggagaaaatatacaaaaattgggattcagtgatgccgttaggcgccgcaagggaaaattaaaaagaaaacttgtccatttttcagtaaaatcctttaatttttcgttccgggggaatgggcagtgaccccccccccggatgtgggcctggtct

SEQ ID NO: 5647 - DNA, 8104 bp, Heterodera glycines
ttccttatcccaaaatcaaaatgaatttaatttgcttttcgttcttttttgttgttcttgtgacaaatgccatcggtgaagggtaattaaatgaattcaaatcaattttcaattgctttctgtttctttagacttgccgaggacaaatggaaaaagtgcgaattgaatggaaacggaatgatcagaatgggaaagaaagccaaaaagtaatttgcaaataattttggtgataattaattaatgttcccgcattaattagtctgctgatttgctacaagagcaaaatggccgataattttggatggaaagtgggaaaagtgttcaaaaggcgaaatggaaataaccaattggctgaaagatgtgttggcacagacggcacgaagggatggcacgcgctaatgatcgaacagaaggaaaacgggctgatccttaagtcctcttttgggtgagtgatttaatttaaaattaaaaagcaaatttaattttagaaaggatttattcgtggaaatgggccccgaattttttattcaaggctccgactttttggacattaacatcacaaagggtacagttctacaacaaattaaatttaattgatcgagtcattagcgttaatgagttcctcttccgctaaattggacgagttccaaaatgctcttccgttcggtgtttttttgaatgatttcgacggcgcagcgcttggaattgtcgcatttgaaattcattgtgccattggaacaaatgacgtgaacacttgcaaaacgatggtaaagtgaaacttaaaaaaataaatttgaatattttgaatgaaaaaaatggttggctacggggggaatagaacccatggctacaaaacaactgagatttgaatgtattaagaattttttttaataaaaattataattttgtaggctaccgaagaaaaaagtagaaaattgaccactcggggaattcgaacttccacaaccactcgggcaactccgccaaaaacaaagctgaaaattgtaactccattcaaaactgaaacaccacgcgttgtaatcgttttcattttttaaaaatttaaaaataatgcctttttctagtctgaaattgaaaaatcaccgaaactgaccaccctggaaacccatacaaaaacaaacccaaatgtcggaacttcatctgccgtaatcatttccctcaaattaaattaaattaaaaattttttagccgaatctgttcactccacgtgattctactgtgaagcatttcggcacaaattgcgtccaaattgattttccagcagaaattgcccagttttcgctgaacatttccgcctcattattcggcattgcctgtaaacaatacctaagaaagtacaaaattggacaattgccaaaaaattacgacgaaaaaatggaaatgaaagacaaaatggaagcgtgtggaaaagtgccgacagagacaaattgcaaaaagttaaaaaaatggaaattaaaattaaattaacacctaattaaggtcatatgagctaattggatgttctgaaagcaaaagtcagcagaaaattgccaacgaggaaattgccgaagtttgccgaaaacacctcgcaaatgccaagttttcggatgggtttcgaattcggaactgtgccagtcgtaaaccagggacgaaagtgatcgttgtcgaatcaactttggaattttcattcaccgagaaaaagtgaattaaataagaattgaaaattttttaatttttttatcaaagttataccatcacccgaaatgcttcaattgatgatgtgaaggaatttgaagctgcaacaaaatcaactcaattatttttcatcgaatttggccaccaaattgggcaaagtgcgctccgtgggaaaagcggcggcacggatttgtcattggacgatttggtcaaaaaggcaaaaattatataaaaataatttaatattgttgtttctttaaatttagaatgaaacaattggccactttttgggctcaatcgctgagcagtcaattgatgagggttgggcgaaatcaattcattttattccgccgtctgacagatttctggatgtttttttccaaatttcgaacccgccattttcaagactgatcagtaacgagacaaatttgatgccatatgaaaatgacccgaacaaagtaagagttgggaaagaaaatagaaaaaggttaaatattactagacgattccgacgagatgcgatttgctgggaaatgattgtgaggcgacacgcgaaattctgcggaaaactcggaaagttttggagtgctgctccccctctaatgctgctggtccatgtatttgtaaacttccgaagcccgacctggtaaattaataatttaagctaattgtactgtcattttctgttagagtgaatttgcggtgcctaagggtacaaatccgtctcagccacaaaagtcacgcttcagcagtaacagccaatcggacgacccattggattggtgggacgatattttatatacgaaagagcaggcgcaacaaagatacgactatttggttctaatttaagtgtgcgcaccgtgtttcccaccaaaaaagaaggggaaacggagaaggaaaagacaggcagagccaaaattaaaaaaatggaccaaatttccaattgcgatccatttcagtgacgaatgtatgcattaagttttataactatttcttaatggtattcagtgggcgacccgactccgcaacaatatgttgaagctgttgaacaagggataaaattaatcatgtgggatcattttatcaatcattaaaccgataaatagtgagataaatagatactttagataaacttttgtccaatattccttgctttctgttaaaaagccgaaaaataaaacacttctcaaaattaatattgtttaaaaattgtggattgataggattatttagtgaccattttcctcgggtcttcccgcattttatagttttgatcatttaaacaaaaatatactagggacaaaacttgcgtaacattcaccacggatctgagccatgggccggacgaaggcattgaaatttacgataagaaggacggatactgcggtctatcttgggttggacatattaaggaatggcaacgtgtttcaattaactgtaccaatgtttgtttttattatcgttatcaatttaattaagttcatttctaaattatcagtccgacactgttgcccacgagtttttacatgcgcttgccctcaagcatgagcaagaccgggacgatgccaacaaatacatcaaatggaatccaacgccacgaaatgttagccaggattacaagaatttttttttgcaattttacattaaaaaacactggcataatttaatattttagcaaaaagaaccgtcgaaaacagaaaattacggctttccctatgattttcattcaattttgcattatgctgctgtgaaaacaagcgggtcagttattttaaaggtataaatgaaaagaaaataatttggcaatgaatcagctattacgacatgattacgctgaaccgtttttaccaacgcacaatgttccgccaaacgtatgaactttcgtttaaagacgccgccattatcaacaaaatttattgcgacggtaaatcgaattaattcattataaaatagagtgaattaatttaagaaaattgcaaaaacgtcgaaaacaaatgccaaaagggaggatatcccaacccaaagaattgcaatcaatgcctttgcccggtgggttacggcggcgaaaaatgcgaaatggtcgaaaatggtaaaaaaaaaattaaaatgataaaaattattaatatttcagatggaaattgccaaactgacagggcaaatgaaattgaagcagattggcaaattcgaacgttgaagccaaaagtgagctgcacaaaaaaggatgagtcatgcggatgccattggcaaataaaggcaacatttatatgaaatattaaaaataaaattaaaaaacgaaaacaaacaaataaaattaatataatattactaaaaattaatttaaagaaaaaaaacatatttacagccacaagatggcaaaaaggtgatcatcaaattgaaatggctgcatgaaaaggtgctcacctgtgatgacccttgcggcacttatcgagtcgaaataaaataccgaaaagacaaaagggcacggggtaatttaatttaattaaattaaatctatttaaattttgtaaagttgcatttatttgctgttcttcccaaattgaagaagatgaaacaaagaattggattgaggcggacgcacgcggcgaggacattctcatttcggcttatcccaattcgtctaattttgaacaattgacggaattgttcgaattgacttacgaaacgggtatgggcacgtaataattattattttatgctaattgcttttaaattacttagacggcgccaaaattttgccagcgagcgattgtccggacggtgtgaattggaagccggagagatcacccggacatgctgatgtgcaatcatcccgacactggcgagaaaatcgagtgctgcacgaaggggcacaaatgtccattaagggccaactcaacattcggctgtaaactaattgtggtaaaaaccaagaaattattaattttttgatcaaaaaaagattttagcgttgaccatactcttttagacagttttggcacactttgggaaaattttataaaaattttgtgaaatttgggtgtggcctagtctcagagagggtatgaataagtaaaacctgtaatgttgatagaaaatgattaagctaaacggccaataccgcgagatcagaggcgtaaacgaaagcaaagtcttcttttttgagtgttttgtaagtgacattaaataatttaattaattaattgtaattaaaatacattgtcaattaattaaaaattaattgattaattggttaaatttatttttaaagaggcgagaaggagagacgaaaagcttttggggttattggaaggacaaaagcaaagacccaattcgcattgacgaaatgcaatgcttgagctacgaacaagccggcattgtaaaaccgccaaacaaaacggtgattgattacccattgcgcttcaaaagtgccaacacaaacgaataatgatgccaaaaagatgaaccaactgcggagaatggatgtgatgcatagggcgggtgtttttatttaaaagtttttctttttataatattttattttttagtgtatttaactttggttttgtattttaaatttatttgtattgtaaataaattatttaatcatagctctgtgtcctatttcggcactaatgataaatttaagagtgccaaattctttcattttatgttccttaacatttaatcaatgaaaaacaaaaaataaaaagaaaagaatttattattttttagataaaagatactttcgaacaattttaagagatttttcatttaatttacaccacatttattttttacattttttcacacattttaactttttaagaaatattaattcaagaaaacctttctttctaattatttttaaattaaaaaatggaggattcatttatttgttagcataactatttgctaaaagattatggagaaagaaaatgaaaaagtttacccaaaaatttgtgaagagaaataacatttaaaaaggaaaataagttttgaagaaatgaatgtgaattaaaaagggatggaaatttaaaaaattgtcaaaaatgatttttataaaataaaaaaataattttttttaattttttcccgtcattttgttttcctttttctgaaaaaaatgtcattaattcttttattcgttttaataatattttttggctgtccaattcatcagaaaataaaatattaaatacaaatcatttgatgaaatatttagaggaaattgagaaaaataataagaaaatttggacgaaaaagaaaaataattgggaaatattcgctgatctttctaaaaaatttacatttcttttaatgcgtagtttattttaaatattgaagtaaatttcaatttgcatttattaaatcataattactgttgttggtcgaccgacgaaaaaaatgcaaaaatctagcattaatttcttctgcacataatttgttgaattcgaaatgaaagttaactacatatgtggaggaaaattaatttttctgattttcaaataagcatatatttttttgctgtgtccagtgaccatgaaaaagtgatcagatcaatttaatgtaaaaacattttaatctgcaaaaaaattacattagggcattttcaggactttttgcccataaaatttaaaaggcaaaaagtgcataggtttttaggctaggcttaagcttgcttgggcataggcttaggttttatattgtaaatttattattgtatattttacctttttgtttttccattgaagcataatttgtcggttagataaatattttaattattttacatagcaattttcaatgaaatttactatttttagcatttttttcatccgggaatcaaaatgatgttaaatagtcgtcattatgtcatcggaaatctttttaattttttcatttttataaacatttggcattatatgtcacaacaaataatgataatgatgcttaatattgaaaatgtttaaccaaccaaatcaattaaaatggaaaaaaattaatgttgctcattaaaaattactaaaatgatcatttcgttaaccataaaaatattattattcatttgatgcttaatattgaaaatgtttaaccaaccaaatcaattaaaatggaaaaaaattaatgttgctcattaaaaattactaaaatgatcatttcgttaaccataaaaatattattattcatttcaattacttttttaatcgtgcggaaaaaaaaattggaacaaaaatcatttgataaaaagaaatattcaaaaaaaagaatgggataaaattgaagaaaaaatagcaaaaaaatgagctcattcgaaaataataaaaataaaataaattcacaatgtaaagagattttagaaaaattaaagagattttatgaaattttattataccagaaaattggtgtaaaatggccaaaaatgaaattttagcgccgaaaaatgttgctgttcacgaaaataatagaaacttgaatatttgaatttcttatttattcaaaaataaaaataaccaaaagaagggcattgctgccgcttacacttgaggtggaaatacgagaggtcaaatgggtagaagtgacatgattgttgaaattttaaaatttttaatttgatattttaaagtatttccttccaaacaatatttttaattaatttggtcatctaaattgacataaaagcaacttaatgttgagtgggatggaaatggaaatttcgaaaagcgtgaacaatactaatcagacatttgccaatgcttcttcatctcctgcccaattcatcattgtcctttactttcggatttcacattttgacctttttgtccctcctttgccctttaatttgatcaataatttgacccgggaacggctgacattggcactcattgaccaaggcacttttttactcgtccgatgtccgctggtgcgtgacgagcccaaatgggccaattgggagagggaggcgaaagagtggccaattgatggacaaatgaacagaattgtcattggtgaacatgaacaggaacaggaggaagaaagcgaagatgatggtctctatttggtcaatttgttgaacaccggctgaacaaaagggtccgactgaaatggcatttttgaaagtgccaatgccaatgccgcccatctcattaaggggtggggaaaatggtttttttcgagaaattggtaacaatttaaaaaggtcaaaactttaagctcagcaacaccaatatgatttgtctttgattctttcaatgtttgaattaaaactctaaaatgattcatttttgggcttattttttcgctttcggtgcctaattgaatgcattttgcaaaatgattagaggaggaaatttgtgcttaattgatgagatgagaggagaacagcaattaattttttgtgatccagtggaac

SEQ ID NO: 5648 - DNA, 754 bp, Heterodera glycines
tttcggcaatgtttgtcgctttgtaaataaaaatttgatcttttttaaataatatttattatttttagtaatatatttatatgataatattcatatcatattattaatacacgggatgtctattttaacattaatcgtaccactaatttttttaatgcttttgctgattaatgacaaattatgtgccggaatggacacaaaaaggacgacgacggggacggctccaacgccgacgcatttgagggaaatgccaatgccatcgagtgagcaacagatgacaccatcagcatcaggaacaagttcagtcactgacgaaattgttagccaacaagcgcaaatgccatggcatcaccaaatgtcagaggcagaatttggacaaatgccaacggacgattatccattttatcaaaactgggaacaatcatttgtattaccaaatgttgagcaggaatttgagggattagatcacttttatcaaaatgattttcaaatgccagtggaaaatgaatggcatcaatccgagagagaacaaccgattgacaataatgagccatcatgggatgggtggcaaagacaagacagagaagagaacgaagaagtcaaccaaagtgatcagaaagcgcaaccattgcaaatgacaaaaaacgtgggcaaattcgacgccgctaagctggacaaccaactgagtccgacgtgggctgaactgatcacgattttcggaagcccacgcccaccggcggggattggcccaaat

SEQ ID NO: 5649 - DNA, 6836 bp, Heterodera glycines
  unsure (1)..(6836): unsure at all n locations
ccaaaagatattttaaagaaaccaaaccatatagataaacgcttttttttacgcgtgctttttccaaaaaacttcgagtacagggggcaggtggtgccaataggcgccaccgggaaaaaatttgtaatttttaatgcgatttgttagcagattttttccaaaaaatgaccaaatttatgtttttgagccaaatccccgatcattattattattaggctgcgattttaggcaaaaaaccccgaaatcggcaagtttagcattataaaagtcatgtagacggcccaaaccaagcggaaaacgcgtttttcgtgcctatctatgcgtattaatttgtaagtgcgccgaaattttaggcatttgcctaaaaatcgcagacctaattcgtatatatgtataaatttacattagcgaataatcaaatatatttttttcttttaattatttcattatgtttttcgcaattcatggctttttcatatgcgtttaattgattatataatgaaaaataaaaattcgatgctacaaattgccttttataataaagggaaactatcaatcccatttttattatacaatataatactcatattttgaaaaatttaataaaacgaattgagttttttccactcaatccttgtgaattttcggcttttcattcattgaaaaggcttcattttcttttggtgtgccctcccaccgaattcctgaattatcttgccttttcccgccctgcaaaaaaccattgccgaaaaatgtgtaaaaattggcacttttacgaaatgactcagcacacgctccctgactttgggtttttaattgtaattttgtaatattacgcattccaaatccttaacaaaagaagaagaaaaatccctaatgattgtgaaaatttggctttttctttaatagaaaacttttttaattcatatctttttccccgaaaatttacactctttaatatttcggcaatgtttgtcgctttgtaaataaaaatttgatcttttttaaataatatttattatttttagtaatatatttatatgataatattcatatcatattattaatacacgggatgtctattttaacattaatcgtaccactaatttttttaatgcttttgctgattaatgacaaattatgtgccggaatggacacaaaaaggacgacgacggggacggctccaacgccgacgcatttgagggaaatgtcaatgccatcgagtgagcaacagatgacaccatcagcatcaggaacaagttcagtcactgacgaaattgttagccaacaagcgcaaatgccatggcatcaccaaatgtcagaggcagaatttggacaaatgccaacggacgattatccattttatcaaaactgggaacaatcatttgtattaccaaatgttgagcaggaatttgagggattagatcacttttatcaaaatgattttcaaatgccagtggaaaatgaatggcatcaatccgagagagaacaaccgattgacaataatgagccatcattggatgggtggcaaagacaagacagagaagagaacgaagaagtcaaccaaagtgatcagaaagcacaaccattgcaaatgaccaaagacgtgggcaaattcgacgccgctaagctggacaaccaactgagtccgacgtgggctgaactgatcacaagtctcggaagcccacgcccaccgggcggggagtggncaaaatatgccagagaaaagtgccaatttatttggaggcggagcaaccaaaagcagaaactaacacattggacctactcagtcctgactcctgggcacggtgatcagaaactttgaacagctgagcccattgactccaccggcagcaaaaattgtgccatcaaatgatcagaaacaaaaggagccggttgtcattattattgatgatgatgccaataccaataatcatcagaaacggatgaaccgcggaatggccgtggcaacaaataaggggaagaagccggccgaatcaccatttagtaattaggcgttgatctaatcacgacaaaaaacgccaaatctttccaacaaagacgggaccgaattctgaaatctctgcttgcttatcaattcattcagttccggtctctctaattaatttctcttgcgtttagttggtcgcagcgatgccattgtgccatcgtcgaaactcactcccattgtgccatcgccgcaacttcgttccgccgctggcatcggagtaccaccagcaaaactcgatttgtccacgttgccgcgcacactcccacccgtgtcacccatgaaaggaatatcgccgcgcaccgccgccgcttttccgattgcgcggaaacgacgcccgccgctgccaccgattcgggtgcccagccagacgaatcagtcccacggccaatccatcgtcgcaccgctgaatttcaggcaaatcatttccgaatcagaccgattttatttaagagctttttttgcatatgtcataatggtcataaattgtactgaactgccccaaaatctctcttcccatttcagcgccggaaaagtgttggcgcgcaaaaaggcagcaaaatttgagcccggacaatcctcaacacaatcagccggacaacagcaacaaaaaactgttgttgttggtgttggccacggggaacacatgcaacaaaaaggacaaggacaccaaggaattcaagggcaagaacaccaagtaattcaaagacaaggaatttacaacaagggcgcaattgcaggctttttatgtgagttagggcaaagtttaaaggtaaaaatttagcaaaactcagaaatatgacacaaaatcttccaaaatgacaatttaaaaaaaattaatttacttgcaataattcatagccaaataaaactattggttcttcattacccatttttgagcaaatgcatggttaatacgagagaatcttttttaatgccaaaataagggccagcaggcgatgcgatgccaggaatatgcttaaaattatcatggccaaaacagtcaaagattaaacaaatattcgatcaaaatatttgtcggaaaataaattgaaaaaaatgcaaaacccaaatattggaaaaggtaaaattatcggaaaaatttagtgtattgcgtccgtcatattgttctgatgagtctccgctcgttgcaaattgcttcgcccgactcttttctcgatggcacaattcaacaaattcgaaatggccacccgctggaaatggcattgggtcccccaaaaatggcattggcacaaaaattgagccaaatgaatgccatggaagtggcaaaagggatcaaaatgcatttgttgaacgatggagagatcaaaaactacaaaatattcgccgaaatcatggaccaaaccatggaaaattgtgtcgcggtgctcggccaaacggcgttgacgttggcattattttaaaaacaaatattatataattttaataccactttggttgggacaacttcttataaaaattcagaagaaatatgtatataaaaatattattttataaaatcttttagaaagttaaaaatattttaagtttgacaattttttttggggggggggaaagacgaattcggcattttcagcatttgcttcgtgacttttttttaaccaaaatatatgaataattaaggaatggtgacaatgtaaatgttaatgccaacagcaatgacggtgatgatattagcccttccgttgtgctgtttttcttttctcgtttattccggaaattggccggctttttgaatgcgccatttatggaagaaatggcatttagtgtaagccaaaaaacgaatttagggataattaagcatttaagtgttaaactcaaatataagtttaaaggaagcagaaaaatgtatagatttgggatttaaatatttacctattagcaatttaaagagccatttttaagaattgaaaaatatttaaagaaacagagataacattcgagttttatttacttctttttaaaacaaagtatcaagaaaaatgaatattttttaaaaaatgttagattttttgaaaacttcaagaaatatttttcatagaaaaattttcaataaatttctcaagaccttttaaaattctatttgcaaaattttctcgaattttttaaatgagtttctattgttgactgttgagatttttatgtcatttttctaatttttatatataatcgaattaattagcattattgaatgatgatattaagaattttaattttgtttttgagcatacgattttatagtttcattattactcgtttttcagagctcgtatcatttttccaaaactcattgacccaaaattaagttattattttttaatgtgtaattatgctaaatatatcggaactaatgcgcaaaaaaggcatatgcctcaaaatacattctctattaataaggcaaagtcacttaagggaagggtacggatcgaaaatttttcaaaagcagaacatcgagcccaaaaaccaatggggtcgaaaatcagaacattttgtgaaattgcttcataaattagcaaatcgtaaattttaatgcattcgggaccaaaaaatcagattttatttttgcagtacaaatttttaataattttctcaattttaggccgaactgaaaggaacaagtcgcgttgcgatgttcattttgattagagagattagaacactttttgtatcacaatttgacgcatcgttcaaattcattgttcacaagggacagaaaattgtgagttgattagactttcttagggaaaagcaaagaaaaaaattatgaaatttgaaaaaacttgagaataaacataaaacctccattaaaacatggcgattagggattttttatggcgtttgcaaaattcaattaatgtggtaaaattggcactttgagttttttcgtactcgacaccaaaaaataattttaatagcatatacgaaaaacattgaaaacaagtacttaagtagttgaggacctaaactaagtgatttcatgccaaatgaggattttttagggctctatgagcattttcaaatagctgatctgaaaagaacgatcattttaaattgccctaagttttccgaattcttttttcaatttaaatttaaaaaacaattttgaacactgattaactcaatccaattcagcaacaggcaatggaattgaataaattggacgcttttgaaacggccatagaacacttttcgttggcccatttggccatctgttcgacaatttcggcgttcactgacaaaaaaatttgccaaatggatttaaaaatttttttcattttgttggcaaaatttttgcatagaaattttgcgtgtttattactgagcaaagagaacatatccaatttcgtgcaaatgttcactcattatatgacaattgagtttggcaggtgggcaaaagaatttaatcaaaataatttggtgggatgggcggggggagtgacctctgatgactaattagtaattcgttaattacataattctttacataagtattggcgagcttgaattataaaaatttccccatttgttttgcacagattcggcatatcccaaaatctgcttataattttacaaaattggaaaaatgaaattaaaagcgaaagtaacagtgcgatgccaattaacttaagccgatacgtggccaatttaattgtcaatttatttactattgtaagccaatttctgccaaaaaatgccaaggattcgttggccgacaaccaattcatggcccacggatgggatgagatgggccattttttgagcactgctggaaaacagttgacagagttggtccaacatttagacaattggagagcagcagaaagtgccaaactgggcgaaaatgattacaaaaatgaggctgaacagagtgccaaaaaagatttttggcacaaaaattgtactaattttgcatcgagcagcggaacaaagcaacaaaactgatcaattgaatagaaaagaagcggaaaagaagactttgatgaacgtatattttattgttgaggaatttattcatgagaatttggcattatttttttttggttttttcgtctaccaaaatattgctataagaccaaatttgtaaaaacattttaaaaatcaaaataatgaaaatatttctgagaattaattagacaagaaaaacttgcttaaaaatgcgacgtatattaatgaataattagtggagggattttctgcaagtcatatccgattagggcgatgatcaatcattgggcgatcatccgccaaatccgccttttgttttgcggctttctgatgcatctgctctgctgaaagaggacagatcaaagtccttctcccgcaactaagacaatgctaatcggatgtataatgaaaacaagtcagccgataaagcagctttttgtgcgaacggaagcataaatggtcatcatcctcatcgaactgatcagcgtgtgggtggcaagagtgatcagaattttgatggataggtgaattggttgaattttcagaatcattattaaattaccgaactaatgacaaatttgttagaagttctcttgattcgtttctctgaacagaatattggtgaaggcgccatctttgatcatgatcagaattaagcattttgtcagggatggtcagttgcctgatatgagcagggagagaaacgaggcgaagcaattgtgatcagcagaacggtgaagtgatcagaagccactatcttcatttctcagattgngcagctgcttttttgcagcaggcagagaagcagaagagaagttgaagcgcaggacacacaaatttatgatcagatcagctgcgcata

SEQ ID NO: 5650 - DNA, 1562 bp, Heterodera glycines
  unsure (1)..(1562): unsure at all n locations
agctcaaaaatccccttgattttntaaattaactcaaaaatccccgaaaatattagacntgtcagagttttttgattttataaaattggtccaccatcccctgatcggcgtcactgacgatgcgacagcggaaaattcaatttacggagagaaaaacaaattttttgaattttaggaaattgaattaaaaaaatcaaaagttggttaataaaagaatcaaaaaattaaacgatttttttcgatttttaagtaagtaattaaaaatttttgaaaaaaaagtctcgggtcacggtctcggggtaaagtctctgtctgggggtaaagtctcggtctcggggtcaagtctcgatctcaattctcgggaaattttcgatctcgaacagcactacttcataggcccctaaattgggttttcgtccctaaaaatcctctcaccatttatttattcaataaaatttaagggagaaaacgcgaccctcgaagaaattgacaatttcattgagcaaagaagagatgcagcatccaccggacaacgttctcagcgacgtccttgtgtgctggagacgccggaggcaccaccaaagcctctggtgggtcaacttagttagaaccaacaaattaagggattttggtatcaatagatagcccttttttctaatttcaatatataatttcaaaaatttatttaaaaaaaaattattttagcaaagttatgggtagtttttatcgattaaatgtttgataaaaagttgtcaaaaacaagcacaatcatatttatttccgaactgtaaaagaactgaaattttttggctagaacttttgaaaaacttaataaattttttggctagaacttttgaaaaactcaataaaattttttaaatttggcaggctaatagagaactcttagggctatcgtatgatagcaagattgtacaatttggttgagtctgagaaaagttatgagtggatttagtcaaaaaattagcaaattttgcactttttgtcctttgacctaacaccgacgtcaatccttttgcccattcaaccctaaaaagtccaataatttattttatttggttttccgcggttgtattaatatgagatatagtacttttaaaaaatagatacagtataacaatgaattctgatatttttttactgtattactgacaactttagatggtcgtaggtatttttttactccacttaaaaaatgttcaaagaaatactgagctgtagacctgaaaatataaatttacacaattttacaatttttagaactttccttgcacgaacacgaactgtgatcgatctttcccctcaaaaaaagcactttcaaatcataagagggcgtgcagtgcccctgctcgtgtgacgcctccccctgctgctcagatgacgccccgtcgacgcgtgctcaatgtaagttttcggtggtgaaatttaagccataaaaaatgttcagcgattttttcttttgcgcttcggggctgcaattaaattttaagggaaatatccgttgtttttttaaacgattttgaggaattttttctgatttaaaa

SEQ ID NO: 5651 - DNA, 2222 bp, Heterodera glycines
gtttaaataattgataaaattagaaaaaaattaaattaaacttaaaattttcattattttgtaagattatattaggttcatttttttaaacccaattacagtttgacgaatcggatgccgaggatccagctgaagaggtgccgccatgcactgttgaaattggccttcgctcacttggtaaaaaatgtttcatattgtacggtaaatgcctaagaatagtgattggaaatactttcctcatcagatcattgtttttaattatttttgcacattttcaaggattttctaattcgtgggaaaccatccggaagcactaaaataattttttaccgttaaaattaggaattcacaattcaaagctgaattttgttttgactcacagcttggaatgtaattttgtcggatttttttgactgaaaaagattgaaaactcgaaaaaatgcggaaaagtgttttaaatgcttttttaactaattaaaatatatgatcaaaaatgtttttttcaatttaattctatgaaagaaatttaattgattttgtaaatgagcagtttaagagcttttccactgaaacttttggttttcaatcaatttagtgtctaacaaagaagccccggacaatcagtccatcactggtcaatcaatcagtggagaaaatccattagcaaaattaaaatttaaaaaaaattgcaaggcttttacaatatttccacatattaaattttaaaatcttttatttaatttttttaaaataataaattcttcactaaacaacataaattattattttaagttttatcaaatttattatattttcataaaattttaaataaaaaaattgtttgtttattttttggatgatttcagacacgccaaaggcgcaacggacgcgcagcgccactgtccaacggaagtctcgtcggctcgcggctgtcaacaatgccgcttccgctggtcaaagtgccgacaaagcgcacgctcaaagtagggatgggattttccgaggcaatattataggggaagtgtggacgaaaatggcaattattaaatatttttttatccaacagaaacgaccaattttgtttatttttgtgtccttattaaaaacaataaaaattttgagcagtgtgccgatagtcacatcagcaggagggaaattttggcaaatttaacgaaatttgtttaaaaaaattttaaattatttctctaatcgtgcattccaaattttacaataatttcgtctgactcatttgatttatatttttacaatattaaactctcaaaaaaatgtatttatttgattgttgtcccaaactaaaaagagcttttgctttaattaggctcaattactcgccgtgtgtcaaatgggacaacattggccgatgtgatcccacccgatcacttgcaaacattgacggacaatggcactgatgcattgctgccttcaacatcggatgcgccaaggaggtctcgtcggatcgcggcaaatgtaagttttgggcgggttgtaaaaaatgaaatttgattttcaaaaactgatttattttttaattaattttatattttttaatttaccgattgctttttgattagtttaaaaaaattaaaaaacgcccattaaaaattttaaatttattaattaattgcatccaaaggcattttttttatttcaaaatttattaaataacatttaattcatacataaaaaaggtgtggggggggtgtcaaaattttttggaaagggaggtcggccgtcgacgatccttttttttgcttttcaaaaacagttttttcggcgcggtttttcctaaaaattttcttttttatttttgggctttatttttttattacaaaaaacccataaattgaaatttttgctctttgttgaaataatgagttaattattttccaattttttaggtgcgctgcgcggacgaaccgctgctggccaaggcgccattcaatgtgccagggcggccctacccaccggagccactgtacaccaccgacaaatcaatcatgctcaaatgggaacgaccgtcgctggacagaggcacgccgatcactgactacgagctggaaatacgcgagcgtggcaccaagctctgggagaaggctaccaccaccaacgcttcgctatgggagaaggaagcatttggcaatgtgccggacacacgaatcaaggtgggggaaaacatgagccgttcgtccccctccccctcg

SEQ ID NO: 5652 - DNA, 5522 bp, Heterodera glycines
ttttattacaaaacaaacaaaaatagaaatttttgcttattggtgaaataatgagttaatattttccaattttttaaggggtggtgcgcggacgatcgtttgctgtccaaggtgtcattaaatgtgcagtgctgcccggcccgccgaagccactgtacttcaccgacaaatcaatcatgctccaatggacacgaccgttgcgggacagaggcacgccgatcactgactacgagctggagatacgcgagcatggcaccaagctgtgggagaaggccgccacaaatgccgaccccaaagccaacaccaaaaagcagtgggagaaggacgcatttgccaatgtgccggacacacgattcaaggtgggggaaaacaggagccgttcgtcctcctccccctcatttcatccccccccctcgccgtaaattttttttaaaatttacaattagaaatttaaacaaaatcagaaaattttttataagacgtttcagcaattttttgcaaaaacagaaaatcgttagtttttcaaaaaaaccaaaagaaattttttttggtattttcttataaaaaatttttaaaatttattgtaaattttcaaggtttgaatttttttttcaaaaattttccgggggtaacgatgatacttgaaatttgtccaaaaaccactaaaaattggcatcactgaaggtgaccggcgtcaaaccgcagcacacctacgagttccgcgtggctgcagtgaacgcggcgggccgaggcgagtggagcaagaactctgtgccaattgctgccacatggttcccctgtaagccgttgatcaccatgggaccgttggcatgcgacatgactgtgctggtgggtgaacaggccaagctgctggtgccctacgcagcgaattcttcacggccgaaattcgtttggagcaagaatggcaaaccgatggatccgcgtgacgacccacgcgttaaggaggaaaaaagcggtaagtgagcgcgcaatcctggcacttaacagggtggaggcgcagagccatacaataaaaaaagggaggggggttaaccaaattttttgctaaaatggtctggaaagagggggtcgacagggggggggggtcagcggccaattttgcgaaatggtccagccttgaatttgacgacctttcaaacagatttttttgcagtggcttttttaaaaaaaaatagttaacatattttcactaaaaactgccaaattgcgattctttagcaaggcgatggctttttttgtttttaaaaaacgtttttttcgctgtacacttttttaaacaacttttttttgcaatttgttagaagattttgtctaaaaaatgggcaaattttaaaattttggctaaatgctcttttaaaatttttttaaattaaattttatttttttatattcacgttttttttctcccatttttagacattctcatccagctgtgctatccgaaatgcgaacaatcggacaccggcacctattccattcgcattgtgaacgacttgggctcggattcggtggacttgcgcctgaaggtggtcgatcgccctgcaccgcccgaggggtcattgaaggtgcaaaacattgggaatatttttgtaaacagaaaatgatgagaggggcatatttgtaaaacaattaggaatggatttttgaatttttttagaaattaattttaacggagtatttttcgtttttactgtattttttttttacaaaatattcttttaaatatttaatgtataaaaatatgaacaggagcggaccgcgtccagtagcggaaggcgacgcgttggcagcacagcggcggatcggtcggcacaggcggcagcagcggcttgcgctgcggacgaagaggcaaaggacgaggtgtacaacaacgaggaggagcgacaggacatggcggtggtgacaaaaaggatggcaattttggtaaaaaaaaaatttcaaaattattgtgtatgcttttcgggatttttgtgcttaatacctaggcgccttttttgtgcctatttcgccatttttggcgcctattttttggattttttatttattaatatttttccttgagaaaagcagcacaaaaacaaaaatctttcactttttaattgtttttttcaatttttgggcaccccttttttatttctattttttaaaggacctggaaacatccggcacaccggcacggattgtcgaaatcccagaaaatgtgacggtggttgagggcgaattggccatcatcaaatgcgtcgtggagggcaacccggcaccgacaattgtgtggaaaaagggcggccgaaaaatgccattgaccgacgaccgagtgcggtgccaaacggacggtgacacgggacatgtaagtggcaacttttaaatgaaatttttaaacacagaaattaaaaaaaattgctgttttttggaaaaaactttttttgtgaaaaagtcatttatcataaaactgagaaatcataaaaaattttttgttttaatttcaataaaattacatttttcataccgtagccctcaaatggaggacaagaaaactttttactgtagttctaatcttggaagggatttttacggcactcaattaattaattaatgtagctcatttatttctaaactaaattcaaaacttagcagcaaatttaataaaaaaaaatttatcaaatcctaaaataatgttaaaaatattttatcaaattaaaataatgttaaaaatattgtcaggtttctctgatcatttccaaatgtcggccacaagatgggggcgagtacacattggtggtgaagaacgcgcatggcaagcacaaagttggcgccaagctgcttgtcacgccagcggccgaagtgaaaaaaaattgccagccaaatttaaataataatatttacaaaaaataaatttacagtcaaatttggacttccgggccaagcagaaaaaacgtggcacgggcattagcaattcggaacaggaaaaacagcgccaacggagtgatgccgagcccaaaagcaaggctgaacgacggtgagccaaaaacagctaccaccaaaaaattttgcaccgaattttggaatggtgccaaaaaatcgatgccaaattctgcacttcgcttattttctttttaatttgactgaaatttcaaaaaaaaaatttcagtgcctcttcttttttttttgatggtgacaaaaatttaaagacatggcaaaagaaattattgaaattcaatttttcgattaaataaaaatctcgaacggaaaatgggtcagtggaaaatgcgtcagtgaatcaggatttctttaaattgagatacagtagtaatattaccgaaatcacaacttgttttttagggatttgggaaagtttcaattattttgacttttaaaaacttaattgataaaattcagaacaaaattattagacaattttgtccttttgtaataatacaatacttaatgctacagtaactttattttaaaaatacagtattattgacaccttttccactgacgcatttgccaggagccaaaattattattatttttaaaaattaattttcatttaaattatggcacaaaaatttccagcaaacgccaagtgtatgtggtggaggagccccgtgacacatttgttgtgccgttgaactcgcagcatgccaacgaaaaggaaaatgccacttttgaatgcgaagtgaacgacaaggagatcgatgtgaaatggttccatgacggtgccgagatcgggatggacgggcggcactttaaggtgggaaggagggggcaaatctcttgctaatcaaagaatacattcatattttgtgttatgaaagatcaatttaaaaaattgagtaggagtttaaattacctattttgggattcctttaatcccaaaaatccctaagtatggatatttccaaaattcaaaccaaaactagctcaaattcttcaattcaaatgcctatcagaaatttaaaaaatatattagaaaagtcagaaacaaaaccatttttttaacaatattttttttaattttatatttttttacattatctaaaatttgtttttatgccaaatttcattttgttttcctattgtgtattttattgatgcttcttgttttacaggaacgggctggatgccgtcgtcgcctgctgatcatcaatgtactcattgaagaccacggggagtacaaatgcacagccaaagacgacgaaacaatggcccaactcattgtgcaccccaaattcgtcaaaaaaagcggagcgcaagccggtgaccttctggttggacgatgagttgtattaaatttttttgtttttcactgttcctgttttatttgtgcccatctcttttttaaactctgtgaattgaagataaaattttattttcctttaattgtcctattttatggtatatcccaaccagggctggccgtgattgaatttccaatcacggaaatccgtgagccgtgatcacggggctttaaaaaaaatccgagatcacggcaccccaaaaactccgtgagccgtgatccttgattaaaaaaattttttctaatgatttttttaatttaaatttatttagaaaaacggaatttaatcgctggaaaaatgggaagtggcggaacatttttgaggagagatttggtgaaaaatgaaaaagaactgtcaaggcaaagagactgtggaaatgccaatgtgaaaatgccaatgatttaatttaaaaaatgatggcaccacattcccaacgaacgaaggacagacaaaactcttacaaaattaggcaccaaaaataagaaagtctttgtgaaagggaagtgatcagacgggcggaacataaggcaatgtaaaaaacggcacggaatttagtcaccgacggaagacacataaaacgccaaaaacgcccgccacaacactcatttgtcaatttgctcgcggtcaaccgcccttcgtcgcctgttgaaattaaaaaagattaataatttatgtaaaattgtgagaatttgaaggccaattaaatgctatacaaattattaaaattctgcctcaccttcaaaatctcaacatttaacaatgcgaggaccgcaaaaagttgtatcttgacctcttcgtccgaaaaatgtgcaggaaaaaataagcgcattctgtcttcgggctaatttaatgaatttaaatgagtgtcaatgcacaaatcaattataatttggcgttctttatccataccaggcccgtgtcgagaaaaaattttgggatgagaacccgaagagccattttaattggatgccgtggaaaaactatgaaattttttaaccattttagccaaatttggccattggggtaaattttgcaaaaaacatggaatgccggggatacggctgtgcccttacgcgccaccgggaaaatttaaagaaaattttatttaaaaaatagtaagatttaaaaggattgcccatttttcctgtaaaaataaaagaagaaagaaaattaagaaaattggtagcactgtaaaactca

SEQ ID NO: 5653 - DNA, 4046 bp, Heterodera glycines
  unsure (1)..(4046): unsure at all n locations
aaaaaaaacattgttaagcgtctggcatttaggtaattcaaaaaaaacgaacggttaaggcacacgaaatccttactttaaaaaaaataacaaagcaaatgcgattttggatgtgcataaatggtacaattttggcaaaaaatgattgtcccgggcggtcccaaattttggtcgggcgtccgccggccgctgggctttttcaaatttatgaaattttgattaacaaaaagcggtttcacttgccaaatttaagtccgttttaggctgcccggccattttgaccgggctcgggcttgacaaatagaccgggtccgggcggcccggccaaaatttttcaaaatttcagggccggcaaaagtccggcaggtgcccgggtccgtccgggacttttaaggaccaaaaacgaaaaatatttatattattttcccgttgtcaggtgctaaaagatcgttgcacccacggctacacaaagaaggacccgatccaggggctgacacgggccaattaccgcaatctcgaaatgccggaaagatggtaaaaatgaaccaagcattttatgggataattagattgtatagccaaatccattttgatacttcatccattttatttgataccaatgggcaaaacatcgccaaattttcagctattagaccataaaaacatttctgacgattttcggtgtctctgaatacgacgaagtctgacttctactgttctaacaaaccgggcccctgcccgaatttgaacaaaaaatcattaactcaaaatttacaacacatttatactaaattgatccaattgcataaaaatttagtgaaaataggctgtagatttcgtatcccgagtccggggttttcgaaatggtcagaataaatattccgattcgtgttcagtggccccgaaaagctcaagaagtgtgttgttatggcttatttaatgctgattttttaagtttttaaaaaagaggattggtctaaataaaatatattgtaatatcaaattgtctaattcaactctttgtccctcttttcaaggactgaatacttctggaaagaggaatggattggctcttcctgttcccttcacacactgttcgacccgaccgccaaggactacgacccggagtatttgtccaagcattagcaacgcccatcacgcagaaagagagagggcggcaccacaaaatgccggaattgaattgaaatggagcagattcacatttaggaagaacaaaacaaaaacactcttttcgctgccgcacccattcatgtgttcctttttaggaaaataaattgtttttattgtattaaataaaattgagggtaaatgttaaattcaaaaaagaatttattcgttggtgaggtatacccaacttttttgttgtggatagagagcatctaacaatataaacgtggaaattataatattggtggtaggattttttggtacttttcccttttgggccagttttaatttttttttttttaatcaaaagcgggcgattagaattgcagacaccgtatcagaagcacaaccaccactgagtttcaaaacatatgcgtgcgaaacagaaggccaaggggtcatcctctgtgattccatcgtaaaaaatatacaaaaaataatgggaaaatattttaatgtgattagagccgggaaaattaacggtgctgtgcggtgggcgataatgcattggtcagagacatgccgaggccccaaaaatttttcggaaagtgcaattgcgaccataaaaatgtcggaaattggaattccatgccaccctgttaccaagcttcgtgagcagaaattctattgaattgctctacctgtgaattgtatgtgtttttgactcaaaacaaaagggcttccacgctgggaaaaatcatcaattaaaaatttgagataccacaaagccgaccttttaatgatttttcgtggcttaaattcccatccctattaatcattcatgtgaagttagaaaaacaactaagattttaattaagaaaataatattctattcgggcaccgtgccctctgtcgacgccaaccaccgccacctcaaaaactgcggccacagctgcacctgcccgccatcgccgaccaccactggtgcaccaacatcgcccggcgatggtaataaacattgctcaatcaaaaaatttaggcattgttttggtgaaaacctatntaaaagacgtattgcaaaaatcaattagttttaacgaaactacgcgaaaaaaccgaaccaaatcacttgacaattattgaagaatgcccaaattcacctttgctatttgggataaaaattcgggggcactgatcttgaatttgacaccagttttgtcaggcttacaggaaatgcaccagggtttgcattttttgggattaggggaggtggtattgtattgaaataatttgtcggttgcccattttcgagtttgtcaaccctgccacagctgcggtcgccagtgctagcagttggcacagcgctgtcaagtctcagtcgtccttccctccatcaccaccatcaccaaatctcaagccggaacggtaatagttcagtttgtcgcccaccccctcccccgtttttgaagtttttagatttataaaaacatgctttaaaggatttttggggtagctgatcacgaatatggcatccattttgatcaattcgaacgaactccgaacattaattcgaacaaaaagtcaaaaatttaaattgttgaatttcgcgctttttcgtttaaataaccgccataattttttttatttttcagtcccgcgttttgagtcctaatggtataagaaatttcagtaccgtctcgaagacagacttatttttcggaactttcttcgattcccatccctagtcatgacatttgctttccggctttttgtgcctatgtccaaatcaatttcagaaatcaaagtaggcatttaaatcccaaaataaacttggttcaaaattctgcagttttggttttcgttgtttgtatgtaaatttatgtgagtaagttctttgtttttctctctgtcttttttaaatcaataaatcgattaatgcttatttcacaattggtaacgctaatgcattggttaccatgcacttttaagtaggtacctatatcgatcattataatttcataattcctttgttggattcattttcttacattgaattaattacctaaaggagttttagatttactttttcgcaaaaagctcacacgtaaattttggcaccaaataattttatttaagaaatggcattgtcaacgaagttgttgcctggcctttttcttcgctcttctgcattttttgcaccaatttcttgcagtcggatggcaaagtcggacgtgccggcgctgagcacgacgaatcagccctacccgtacaaggaacagactccgaagggtattttcgagaagatgggcttgcagaaaacgccggacggcgcttcaatcggcgaattcgcagtgatgcgtatggacgacatgatgaacttgatcgggcgtggctctctttggttagcaaacatttttttaattcatgcattgaacgaatgttttatagccgatggctaaagacaacgcagatgcccccccccccctcctttttaaccgaaaaatttattttcaacagttctaaaaacattttttggtgccttttatgagtcgctgattacggatatggcatttatttaggcatattccggatccaaattcgaacaagaacacaggcgaaaattcgaattttttaaagatgaaacaattaaaacggaactggacattgaaatgctttatacatacacccaaattgataaaacttaacacaacacttagcactaaactgttcaaagatttaggccattgaccttcggtttggcgtgctgtgctgttgaaatggtttgtttgtgcttttctttttgcattattatgccatttaactgcagctaaattcagatgcatttcgccgctcctcgttatgacatgatgcggtttggcgttgtttttcgtgcaactcctaggcaggtttgtgtattt

SEQ ID NO: 5654 - DNA, 1646 bp, Heterodera glycines
atttgtcagatgggtgatcagcatgggctcgtgtgccaacggtggcggttattaccattattcctattcggtgttgcgcggctgtgaccgggtcatccctgtcgacatatgtcagtcattctcataaaaagaattttcttttaaatccctctcgtccatcaaccttccttaagttctttttggaaatgtccccctattttgacagtattaaaaatttgtttattgcatttccaaattgtcagatgtgcccggttgtcctccgtctgccgaggcgttgctctacggcgtgcttcagttgcagaagaaaattaagcggctcaagaaagtgcaaatgtggtatcgcaaatgagtgcagttgcaacagaccaaagaggagggaggactgcctgattagatgattttttgcacatccaccaattttatcgtgtataaaaataatattaaaaagtgttattttttcagaaaatgaatttggatgaaggtcgttgtgcccgttgaaactctatctctgaatgctcacagactaatgatgctcatttaggtgcgatgtgtttgtgtttggttgcagcatccaacaaaaagtggcaccaaaacgccgtctctgagtaaaaaattgggacttcgtatcaagtcgattttataacattgtctctcttttcctttgggttcattgtgccaaattttatctccgttgattgatgaataacgatagtggaacgaacgggacaacctcatcaccaacgtacactaaacagcaaatccaacagtgtcaggtgaggtccgtccgctggttgtgtgttggttggttggagtgtgtggcttcacggcacgcgcatccgagcagagctgttggatggcacaggattcgtataaacgaagggtttagtcgatcaccaattgtcttgttccattgaaaatttgacaaaaataaaatttatggcctaaaaaagcgcggcggtcaattggtgggatccgtaaaatgtaggggaccatttgtttgaccttttttcggagtgcatacatttgtggccaaatgctcattaccatttatccactgatttctgctattattgtacattggattttctcccgtctttctttttttatttttctgcataatacacgactaattttcgattcaacatttaggaaattgtcaagagttttcgtgttcacgaacttcaccaactgttgagcattttccactacccgaagttgggcaaaaaggtggaactcgtcgatcgagcccaagccgtgttgtcgattcccaaacatcaggttttttacagttattactggcaatgtatatttattaattcaatttttgtttagaccaaagctgcgcaaaaggtgttcgaaattcaggtgagcaatcgcgttcgtgacaacatgcatccgtactctccaaccggcaacatcaacggtaatgatgcaataaatgatcctcgaaatttagtcgttttttacttccagtcagtaaagtgttaatttcaaagtggggatttccatggccttaaatttaggagaatctagccaggattttggagtgccatggcttggtcgctatcgatacgcatggtttccagccccggcaatgagtaattttattgtaaactagtttttgtcattgttttaaccgttttcat

SEQ ID NO: 5655 - DNA, 1065 bp, Heterodera glycines
cgctaaacagcagtcatcagcacctgtgcaacagcagcaacagaaacgtacgacttcgtcgtcagcatcggctgttgccccgacgcccgacattgacatcatttgtttgagcagcgacgacgaggaggaggaccgtcagcagatggcacgtgccattgctgccagctcacgtcaacagcagcagcagcaaatgtttggcgccgggagcaccgaaaatgggaaggaagtggcccggggcaacagcagcggcgggggtgagggttgtgctgctggtacttcttcctcatcgtccgcttcgtccaacggcggtggtgctgctttctcgtactccgtgtcctcgtcgtcgtcgtccgtcaacaccaacagcagtgccgcttcaacaacggtgagacaattgagggccaacaggaagaagacggtacgatgggggtgccaggcggatgatgatgatgccaggtcatcggatgaggaggatgattatggcaaaaaatacaagtatgacgatgatgaggatgatggagaggaagaggaggagcccgtcatgatgacatgtgatgacgatgaagaggatgaggaagatggcgataacagttgggtgccatgggcggtcaccacttcacggcaccaaaaccgccacccgaaggcggcacccaaagagcacaaagcgcgctccaataatcataaacggcacaaaaaatcatccagatgagggagaaaattgtggtgccatggggccactgattatgaagggctcaattgtttcgaggatgtgtgccacacgggacgacaaaaagctgcttatttctttttggcctaccattcattttcttttgctattctttgagcgccattgacacaaaaaactcacagcaaaccccccgattttcaatttgtccagcagagaaggcgaacccagaaaaaagaagaatcaaccaaaactagaatttacgctaccaaaactttttaggactacgaattttctgggtgcgccgttgggctggctcaccacgattatgtgttacggtcaaattgggaaatcgttgtggcataaaacaatatgcctat

SEQ ID NO: 5656 - DNA, 5934 bp, Heterodera glycines
  unsure (1)..(5934): unsure at all n locations
ttttcggtgaacgggatcttaacgnggagcgggatttttacgggattcccgttcgggactctcgtcccggaaaaattttgaactcccgatcccgctcccggaaatttttacccaaaaaacgggagtaaaaatgcactggtacgaattgagttttttggtaaaaataatgattttttattgaaaatctgttaaatatatagccaaaatttcaaaaaaaaattttcccggaaccttaaaatccttaattttctttaaaaaatgcctcaaattttaaaaaattggctatttttggacataatctaacaatgtattgtatttaaatattcaattttttttccctgcggcgcctatcggcaccgccggcctccctcttccaccctggtcaccaccaaaaagttttttcaaaaaataagccgcaaaaaattgttaaaattttctgcttactaaatttttctgtctatttttttctctaataaaaggattgaccttaaaatttgtgcattaaaaatattttttgagtaactcccgctcccgcccgggactaccgtaaaatttctgcgggattttcacgggattcccgatcccgctcccggaaaattttgaactcccgatcccgctcccggaaaattttgaactcccgctcccgctcccggaaaaatttgaactcccgatcccgctcccggaaaaatttttttaccggactctaattttattgcatttttatgcgttttaaggttttggacggttcagtccctaaggcatttggccacttcagtcccgggtctgtaactcttcagggattggaatataagctcaaatttgtggccagcaatgcattttttaagcctagaaaaaatgcctgccaaatttttaacattttttcgtcgggacatcaattcttgatgattgccaaatgtttcatttaaaaatgtaaatttttgttaagaaaattagaattgtcagtgcgaaaataaatgattttgcctgaatttaaatactccttttggtgctcacaaaaaaaaaaagatttttttgtctgttgacagatttttctatttaagtgctgtctcgttgctgctctttgctcattcctttggcaatttctttgcccattcaccactattcccgttccgaattttatttagtcattcattttcattttaaattttatattttttgtccccacaatttagcacatgtacataaataaataaacaactcttctaatgactgacagggaaaagcatttgcattttgttcgtcttgcggaggaagcggcgcgttacgacgaaatggtccaggggatgaagcaggtgaaggaaggaaggaggagaccaattcagaagaaccattaattaaactttgcatgcttaaggtgattgaattggatgccaaactgaacgaaaatgaacgcaaattgttgggcgtcgcgtacagaaagtcagtcactgggcaacgcttcgcttggcgtgtcattgcgtccgtcttggcacgagggaaaggcacgaagagacagctggagatggtcaagcagttgctgaacaagctggagcgcgaggtggaagagaggtgccgtgaaatattggtcagtggtgggtgggcgcattcttgtgccgcgaaattccgcactaatttgcgttacttttcaggatttgttggaccgggttctgatcaaggaggctgcagatgatgaagcgaaagtgttctacttgaaactgaaggctgaccacttccgctatttggctgagacacgggcggtgaaaaacggtaaaaggacagacggacggaccatacatgcacaaggcgtgtctcgacaccccccccccccccccatcgttcgtcgtaaggggggcggctgtaaaagaggggggtcgtcgtggagggaggcgttaacgaagggagaaaataaaaaaattttggaccttcgtatgaaaatcggtcccgagacacccccctgtcccaatcatccgtcgtatggcccttgggctgagacaccccttgtgaatgtatgggacggaccgaagcattgaacaaacggtggatcaacaattggtcaattttcaggtgttgcggagaaggcaaagcaagcgtaccaagaagcgttcgacctcgccaagaacaaactccggccaatgcatccgattcgtctcaccgtggcgctgaactttgccattctccaattcgaagtgcagaaatcaccagccgatgcttgccaaactgcccaacgggtgatgaacagaaaatttgtttttcaagtttaaccgctccaattttttttacaggcttatgacgacgcgacttccgatgcgcagacaacgggcgagagtatttgcgcggagtccgtcacgatcatgggactgttgcaggacaacatctcgtactggagtggcaacacctctaagacggagtgaaaaacgatcgctgtatattatacgacataatttgtccttgtccattgtgttgttctaatgagccttttaaattatatgtatgtacaatttgtatataaaacagaataaatgttaaacgctgatataaaagtaataggggtcgaaagatgaaagcaaaggtttgggggccttagggcagacttatagtttagagtccctcaaaaatggtcagacaataaaaaaggactgtgagctgtttgggtcacagatcttttcatgaatttgatattcattttaagcacccgaaatcaccatggacggtaaaaaacgaaaaaaattgccaaaaaataatttacttgtcagttttactaaatttatttccgcgattcggtgataattaatcttccatcatatactattagctttggcaccaaaagtgccatatttgtttgtattttcttttctccttttggccatcccttcccttttattcgtttttcatatcagctgaccgaagaatgagtcaaaaaagctcgagaaatttctcattcgggattttcagcagtatttgtttcgggatcattaatggacaaatcgcacattttgacaatggcattaatgccgtcgtccacctgctgctgaatatctctggtgagtggcgctgttcctcccccccccggcgccatcaaataaatatttgcaatgcaattaagtttgccccattaatttctgtcctttttataacacttttccccggctttgctgaattcaattttccgttatcagtgtatatagaagttcaagcagtacagcaaattttgatgggaaaggagatgaagatggacaacagcaaaaatggagaaacaaggcaagaggaggaaaatagcattaggttaggaggagagacggaagagaaagagagaaaaaggaaaaattcggcggaaggaagaggagagaatgaagctgaaaagagaaaagaacagcagcaaatcggcacttaatgttgccggtgctaattgctaattttgtgtgtcgtaaatccatcgtcaaaatcccgaaaattaattgtcacaagtttcaaggagaaattcatacattcgatagataccaaaccatttttatacatccgatttatttaccgaaattgagagttttttcttcataaaatgcatttgatcacggatgaatatgatcggtcgatcaatcattcttaattaattcatttcttcttctgcggttgatcgctgtttttgttgttttgtccgtcactcatttcgccctttttcgctgctttgtcccgtttcttctgccggtggaggagacaatggccttaattaggcgcaatttgaattatttaaacaaaattaaatgcctttttttaattgctcacccaatgcaattagtgccatcataaagccaaatgagcacagtgttataattgttgtcccaatttccgtctttccaataaaccgccgcggtttccccaattttgcagcgtttcattatccaactgttgtcctcaaattcattttcgtcttctttggccaatgtcagcttttcctttgtgcattcgttcaccaattcaaatggcacaatttgcattgacgtcgcacgaacataaaaatgaatttcgtaactgacggaagaaatggcattggcacggagaaaatgctaaacaatttgagtggggtcggaattccaatttccgaaattttgggcctcattttttcgaattttatagaatatttttttcgaaggctagagttgggttcaaggggtaaaccaaaaatacgtttaatggttcttaaatggcgtataattaaaaggtatgatcattttttggcgtaaaacgggctgagacctcggaggaccgggaattcccgccccggtccgtacaaccctacttttaattgttaatttctttcattattttttggtacagaactgtctatattcaatgggactcagttgtccctgtgcttaggtggctcccgttttgacatttttctttgatttttagacttaactcaccaagagctttcgaatgatactaaatttggtaatactacccgatggtaccacaacttttttgaaaaaaaaaattttgttttcaaaagccgtgaaaacatgttccctggggtttttggggttgctgatcatcaatatgacatccatttcgactaatttcgaaccccggacccgaactcgaacaaaatttcgtaagttcaaattttgcatttttcgtctaaaaatgggtaatcacatggaaacattctgaagtggtaccatcggtagtattaccctaaatttgtctgaatttgacctttttaaaaggctaaattgtccaattttgtccattttttcggtaaacaaaaaattgtatttcactctgaaatcgttggttttacgccaaaaaatgatataccttttaattaacgccatttaagaccattaaacgtatttttggtttaccccttgaacccaactcatgagttcaaaaaagctcgagaaatttctcattcggggattttcagcagtatttgttcctgctcccccctccctccgcaccacacctccttgaaactgttgacccaatcgaagttcgtttgtttgttgtaatttgcgcaatgcaatcgtttgggttggccatcttttctcggagagtgcaaccatttggacaatgcttggccagaagaaattgttgaatttggcccatcaaaatcatcaccaaacgcagcgggcaacaaagcaccggaatggattgaagtcaattggttgagatcggtgagaattgtcggcgaaatgcgacgaagcaaattgtccaaatgatcaccatggggaaagcccaagtggcgaatgtttgccgaaaaaattggccaaatttcacgaacaaaaacatccatggtgtatgataatggaatccacaaatgtaaattggtgcctcttttgtcgaaaatttggtgatttgaacgaagaaaagcgatcacggaatgatcgatgtaactgaaaatggaaggaatgcttttattgtcatagctctctgatttttaattactaaatccgaaggcgcttaaaacggattttgctgggcaacggacggtccggcaatggaaatggcacaaatttgtcacccatttgtacagacagcttcggttctggtcctttgtccttgcgacgaatttcgatagttctccaaattgtcaattcgcttttgccatcgaaatgtttgtccaccaacgcatcgaaacgtggcgaaagaagtgccaatttgaggccgagttgagcacggtcaaaggatgggaaaatgtccatccaaacgtcgttgcaaatccaactgaaattatggaaaaacagtttagtcaaataaatgatgaatttgtgtgacttttcaaattgcttaccgtctgttcatttttggcagcaattagcacaattttggccgagttccgaatgatgtcacacaaatagcagaagaattaattgcgttggaaactttatttttttaatgagagtcaaagcggaaaacaaaagatttttatagtca

SEQ ID NO: 5657 - DNA, 1490 bp, Heterodera glycines
  unsure (1)..(1490): unsure at all n locations
atttcacgaacaaaaacatcccaaatccgctggccatncgtggtgtttgaataaggaatccacaaatgtaaattggtgcctcttttctcaaaaatttggtgatttgaacgaagaaaagcgatgacagagtgatcgatgtaccaaaaaatggaaggaaagcttttattgccataaatctctgattccgaattactcaatctgaagatgcttaaaacggattttgatgggcaacggacgatcgtcgggcaatggaaatggcacaaatttgtcatccatctgtacaaacagcttcggttcaggtcctttgtccttgcgacgaattacgatcattctccaaattgtcaattcgcttttggcatcgaaatgtttgtccaccaacgcattgaaacgtggcgaaagaattgccaatttgaggccgagttgaggatggtcaaaactgggcaaaatgtccatccaaacgtcgttgcaaatccaactgaaattatggaaaacagtttagttaaataaatgatgaatttgtgtgacttttcaaattgcttaccgtcggttcatttttgtggcaattagcacaattttggccgagttccgaatgatgtcaaacaaaagagcagaataataattcgttggaaactttatttttttaatgagagtcaaagcggaaaacaaaagatttttatagtcatgaaaagggaattgtattttttgtatatgaatagagagagccctgatttttttttgatttttcctattttttacggatagtacttgatgaaagaaacacgaaaatcacattttattaaaacaatttttgaagttttttgccttaaatggggttggacaatgtttaaatgggaaacgaaaaatcattgacaaaaacggaagtgaaggaatcattttggcataaaatgacgacggatcggaagaggaagaaaaagggaacgcaacataagaggaccaccaaaaaggagaatattttgcaaaatgatgacatttgccgggcgttttaccttatcctcaacccccaaatcaatcaaataaatcaattcgatggataatttttcatttgtaaaggttaaatccgcccttttcaaattttgaaaattggcaaacgttatgattagggatggtaattattagggatgccacaaatatggatataaaatggcaaaaatctcaaaatatggacataaatttttcaaaattgagttcaaaatttcttcaaatttattggttgaaattgcatatgagatacatttccaaattttttgactcggtaaggcgctttgacaaagacggctttcgttttgcaattagtcggtcaacattcggaaattggtctcgaattttttcggcaattacgtgcaaccattttaaaagaaaaaaacataaaagctaaaatttattaatttttttagcgcaaaatcaacaacaaaagcgaaattttcgcttttttgcttatttttgacataaatttattaatttttaagaaa

SEQ ID NO: 5658 - DNA, 4490 bp, Heterodera glycines
tggaacattgaaattttccaattaattcaaaaattttataaaatattactttaaaactatgaataaatcgcataaaatttccaaaaccttctcggcggtgcatatcgatcgcgccagagcccaaattctaatttggttttatggtctaaaatacccaagataatttttttgtgaaggcgtccatttctttaactctattaataggaaaaaaacagaacaattcgctctatagaacattttttctgtcaacattttttcaaatttttataccgattagaaacgggattgtcaattttgtttgctccaaaactatttgcaaaattgttattttttaattttgggaaaataaataaaaatattagtgtaatggagcgggttcgaagttcgaacctccaccctttttgcccaactgagtttcctaacaggagctcattttccggactctttgtgccagaattataaataagagatgcatttttctctgcactttctatttaatggttcacctctggttttttgggactgtatgggcaaaagcagacatagttttgttgtatttagggttaaatacttaattattcatttattttttaatttttcattaaaatcccaaaagtcggatccccaaatgttgttttgtcgtcaaatgtcgttttgttcccaaatgtcgggtcaaaagcaacaaaaaaaaaatcaaatttcatggattgaaaaataataaaactcatcaattttctttaaataatttgctcaaaattaagttatttttggcaaaacctgttaaaaatgattttgggccgagggaattgattcctgcactaataaatacggaaatatacaaaaagcaaataaaaattccaacttttggatgcaaaagatgagttttttcctactatttagagcatatattttagaaactataatccaataaaaaatacgggattccgggggaagcccttttggttagtcgcacaaaatttataaaacctacagattctaattgggatcgaaccagtaaattattcaaaattcgaaaggataatattttgtacttaaaaacattttgcaatgaatctcattgagaacggataaacttggctttttacaaaatcattaatattaaataataaaaattaaataaaaaaattggaatatatgaaatattatctcttctcactttttaggcataatttatatctcaataataattttagaaacaatttatttaaagagaattttgttattcaaatcaaaagttgccaattgaatctgtaccaaaagggaatttcctctgcgcaaaattttttttttaataattttagacaaaatctctgtaaatgtaaattggttaatttatacacaaaattttgtgaatttgctgccatcttttgacttttaaatgtgtgcccatttcggcaatgttttcttttttgcctccgttttgtccctttcacttccgccgtcgctctttgttcagatcagtgacacgtgctcatcgccgatcgaaaaaatgcgattgccgggaaaaggcagcgaataacgcgagaattgcgggtagaaaagccgacgttcgaccggcccattttggacgagttggcggaagagacggatggactccgtgttggtggacggagttttgtagatgaacgagtcgaacttggcggagggatcggggcccgcaaattggagcagaacggcacggagaagagccgaggcgacggacttaagcaaaacggaggagcgtaaagcgggggcaaagaccgactgacctcactgtttgcatagaacagactgatgccgagccgatcgccgagcaaatgccgcgcttgacataagccgaccacgtcgcccgtctccctgcacacggctaccttaagtcattaaaatagcagcgaatgccaaaaactagtcgctgctgacctttgcggcactttggggaaggcgaagtgcctcccgcaaatacgacgatctgtcaatgcccaccgtctgctgacggtcaaaaagcaacagtttgtcgaacgaagcttcacgccagtccttcagctccacgctcgagtcgtgatccaaccgttcgggtcgcacgtcagcacatttcgcaccgaatgaccacagtcgccagtccaaatagtgatggaatgcgtactcttcctcgtatttgtgccacatttcaggaacttgaaaagaacagggatactgacaaaatcaatcgattggccatcaatcaatcgatcagtcggcaaagcgatcgatgggccatcaatcgattaatcattctacggagcaatcaatcggcaaaaaagcatttgcaaaactgccatatgttttctgacctgcataaccaaatacgggtctgtcccctgcaaattccagcgctctgcgagcgagcgcacggccgagttggtggccatgataggggtccctcacgtagaacatgctccaatgtgccacttgcgggtacagtgccatgctaatgcagcccatcggcactcggttttggtcgaggacaaagaacatgctgaagttgggcccaaatgccttcttccacatgtcgtagtcgtgggcggaattgtcccagccaaatttgtcgacaatctgtcaatttgagggacaattaatttgttaccggcggacaattaaaaattaattaatgcccgtctgatttgagaaatacctcttggacaatgttcaggaaaatttggttttcggcacagttgcgctcaattcgaagtccggccttttcccatttgggcatcggtcgctgtgccatcgccgccgcgtcctcgtcgaattcgtccatcgttttcagcgaaaagggcggcggcggagagtgcgccgcattttgcgttgtcgcagcgatgttggcacagtggcggagaggcgaaaacactgcacggaaagaacaggaaaaaatgagagaagagacaaaaaaagattaataaataaattaattaattggtacttgtacagtttataattaattaattggtacttgtacagtttataattaattaattggtacttgtacagtttataattaattaattggtacttgtacagtttacacccataagcattttttaatgataaaaattattttccgtggtattcggggtcaatcatcacgaaatatgacatccatttcgatcaatttcgaaccccggacccgaattcgaacaaaagtctaaaactcatttttcaccaaaattctattttagtgtccctaaaaacgattcaaatgcatagaatactcatgaataccaataaaatatttttcaataaaattttttagccaaatcaataatattaaatgaaattttggggtcgtttattaggggtgcatttttaaaaaattcccaaaaagttgatcctcgcaaattaggggtgtatttttcgtttttattacatttttgttaataaattttatgcaaaacgccaaaataggttaaaacagggtttttacaaaattttctcgacttttaggctctaaaaataaaatactcaggaaaaaaataggcaaaaaccaaaaatatcatccctcaaacaatgaataataatgaccggaaatcagaagcggcgagaatttgttgaccaaatgttgctgaaaggccattgttaatgccgaaaatgcaaatgcaacaaaaaatatttgtccgatttgatcagaaattttgtttcgatttgatcagaaattttgtctgatttgatcagaagttattgggaaagataatgtttttattggcttacaattcgtcccattttaaatagtcaattaattgagtggggtgagcaaaaaagggcaaatgaactttcgataagtgaagaagcaaaggaagggaaaatggagtgtaaatgttgcactttcgtccacaaaaaaatgagtaggcattatgaaacatttggattttatgtttaataagacaggcggttttcctgttagataaaataggcttgtatttttatgaaatatttggaaacatttggattttatttttgatgaaaataggcgttatgaaacatttggattttatgtttaataagacaggcggctcccggtaaattggacaccagaaaattggacaccagaaaattggacaccgaaaattggacaccaatggaaatttggacaccggaaaattggacactgttgtaaataaaaattaaaataaacaaaatatattaataaacaaaaattttggcttggcctaaaagatctttatcttaatctgcacatatgttgtttataagcgtaaataatatggaaatgaatttgttattatttttgtaacattagcaggagaagaaaaacatcatatcattttcctaaagaaaaaagtttattacccatttttcgtgcattatttgggacattggaacaatcgtcacccattttgtgggtcctttttttggcaaattgatcaaccaccccccatttttggtagattttttggggaattgaccaatccccccccaatttttggtgcatgttttgg

SEQ ID NO: 5659 - DNA, 587 bp, Heterodera glycines
taaatgaaaaaatccgccaaaatgcgtcccctaacattgtattagaaaggaataaaccaacggaacattgttgagggagctgaaattactgttgaagaaaagaaagacggcttttacacttgctccatgtctttggttgtcaatccttgcaaaaattgtttggcacccgccccatggaccaacagcaaacttttgctaaccaaacgcagctgccgttgaggcattagcatctttaatcaaaaagaaattgtttttgttttgaattaaacagcaaaaaataaaattaaataaaacttttaaaaagatttttttttaattttgccaaagtcagttttagcttttaagcatacaaaaatttggtatttcattggcataggtaatatgattttacttacctatgtacatatttaaaaatcattgaaatgtttagaaatgatgaagaaaaagaaagcaaggagaagaataaataacacggaaaaagagagatgggaagagaaacacaaaattatagcccaaagaagggcaaaggcatcgcccgacgtgccatccctcgcttttcatgtgcggctgcttctgctattcctcca

SEQ ID NO: 5660 - DNA, 2185 bp, Heterodera glycines
catttggggaaagtgccaatttcacttttctgtgctcagtggtggcaaaagcattgccagcgcccgtgctcaaatccattatattgtaataaaatatatttaaaaaattaaaaaaacattaaatcgaagcgcggaaatgtattgcgcaatatctgtccaacaccgaccgcgtcgaggaggaggacgagcgggcggtgcttctctgcaatttgttggatttgctgcgcagctcggcggacagcacccagcgattggtggatgactttggcagcgccggtggctttcgctacacagcggaattttgccggaggaggttcggaattgctttttttaaattcaatggcacgattaaaccgagattgttgtccgctttaagcaatgtcaagaatgcggagcaagtgctgtccgcactgaccgggctgatcaccgccggcgaccgaactgttcaattcggcatcccccagcaaagtgccaccgcccatttccatgcccaaaaaatggtgtcgacaattgcgaggagtaccggcacagtccgcagcatggaggcgtacaaagtgttggagcaatgctttacagttggagaatttgaaaaaaaaagattttaattgaaaaattaaaggaaggcgacgacgaactttgtctgttggcattggaaaaagtgggcacaaaaacataaagcatcaatgatcgattaaacatttatattttggcattttggttcagatttcgcaccttttccgtgccgaacgaatgaattattttattgttgacgaatgttcgtctctttttgtgctttgcgaagaaatgctcaccaaaggattcgatgtgcaggtggcaaagtgccgtcttttgctgttcccctaattatttgtttaaaattgtcaggacaaaattctcgaattggtcgagagttgctcccgactgctcaattacgtgccctacaaggagctctcctcgctgaattcacatctcaaaacggcgatggttgtcacaatgacacgcaattttgaggccgccgagcgatttttgtactttttcctcaaaattatttctgtaaatgccacaatgcgcgacgcatttcgcgaactgctcattttggagacatttctgcacattatgcaacagcacagctcgggtaaaagccacttggaagagcacaaaatcctttttctgatcaatttacggacttttatcacggcattgataattattaataaatatcgcacattaaccccaccccattcgttgttctcacgccaatttgattttccgattcaaaatgtgccaatgttttacgtcgttcagaagcaactgttcagccgcatgtccgtcgtgtggttcaactctctttggatttgctgatcaatgcgactaagggaaatgtgttgaacgcccaattcatcaccggttgattaaaaacgaaaatacatttgaaaaagcatttaaatttcgcaacagaaaatgttgacataaaaattgcgaaaacgcttttgctggcccaacagtcggacaacgacgagctgaggacgtccattgccattctgatcaaacagttattgtatttggccaagaacgaacagctgttcagctcgctgctccaattgttgttctccgagccggaaaacatcgaactttgcgcggtcattctgaaggtgcacaatgcaaatgacgttctgtggatgtgtcgaacttgcctttaatcgttctccatgaagtgattggctgtatttcacccctttttttaaatttcaatccaccaaattaattcccccctcaactgacccatcccccccaccttaatttcctgcccgccgagtcgggtgcgcccatttgcgctctggcttatcttcttttgatttttgtttctttttagggcatcactgggccattcattcaatgcgaacgattagacaataatgaaatcttttgggtatggacggcggagaattggaaacagaggacggataatcaaaacattgagcggaggatgaacgtctgtttcatcaaggcaccactctttttgacttgcttttgtgcatcggacgcacgcctttttccgaggggggtggacgtttattggggtacttttttggggttacacctcaatgatgaaaaaaagtttcacgattcaataatttacacgcaaaactcctttatcgctacatacgtttatgctatgataatg

SEQ ID NO: 5661 - DNA, 3116 bp, Heterodera glycines
  unsure (1)..(3116): unsure at all n locations
gggaataaatgattgatcagacagaaattagggacggaggggagggaatgatagcactgatcaaagaggcacagagatgcaaagtcaaagtgtatgatcgatcaatggtcaaactcttcacgcgtttaattttttgccccttcaaattcattctcaaaaatccaactgtttgataaggttcgtcccgccattatcaactcggttctgctcaatttcggctgtttcggcaaatgcacaaaagtggactcggaagcacccgtctgggccacagtcactttggccaattgcgggcccaaattggctgccatccaccaatgctttcggatgggcacggatttgtacagagcggacaacaaatggttaaaaatcggacgaattcaaatgaattttgagggaaaccgaaacttaagcaatggcgggcaaaacggcgcattagccgaagtgccaaagggaactttcaacgcacttttcctaatgcgacttctgttcgatttggcgtttgacaactttgacaagtatttatttaatagtctttcgcagtttaaattgttcattaccaaaaaatgaaggctttcaaatgaattgtgctgggcaaatgccgaagaatggcttcagaatgccgagaattttgaaacagtgccggttctgacctggtccaactcgaccgtgttgacccatccgagtgcccttctttccattgtcgatttgctcccggccatttgctttccgtccaatttgcaaccagcaggggacaatgagaaacacagggattataccgtagagggggagctgtcattagcggtgcgtacggtggcacaattagacgaatggtgcgcactggcccaactttacatcgcattggtcctaaaagtatttattttgcttttttgaccaaattcatctgggattcgctttatgctgttcttcgctctgaacgcaatcagcagacgatgtgccaattcgacttgcccgccaaacttttggcggtaggcgaaaatctgttcaaaacggaacggcacccgctgctttcgtcgttccattatttgttcgaaagactcgcttatcagtcacttcgaccatcggaactcaggcaagaaaaaaaccaaagagtgatcaaaaaggcaaaaacaaacagcaaacagttaagacgatttcttcggctggacatgccactttgctgcacaaatttagacgacgaaaacgaaaagggacggagcgacgcggcgatgaagccgggaggaccaattccgacccatcggttagcttaaccggcgaatcattgaaatttgattgactttttaattatttattgcacttaattgtcgatcgtttttgggtactgtactgtaaccttccaagggttattggtttcgcattggtcaccccttccctcccccatcccctcccctaaaggatcaaagcgttcgtgtcgatgctcaccccgcgtaaccattcgcttctgctggcgccgtccttcgtggaattcgatttggccatcgaagggttcgccgctttggtcattccctcaattgtgcgcagtgttcaacaactctcgcagctgccgccttcgctcggcagcgccggaggagcggcgactctgccggcgacgggcgccggcgattcgtcggacggcggcggcgcgaattttccatcgtccgccggattcactttggcaatgtccgcaatttttggggacaaagtatggaaaattggccgttcaggtggataaacattgtcgatttcgtggacaaaaaagagccgaccgtcgccccttcacaattcgccggcactttgccctccccgtcggcccaacccaccacaatttgcttgttcagcatcgttagggtgtttgacggcagcccatcaacaacaatgcttccggacgagaacacttcgaactcatctcgagactctcggccggtcaatcccgcgtattatggccatcaactggcggcaaacattgagaaccaccagaactgtctgcaagtgctgcttcagcgagtggacagctgcggttggtcgctggtggtcagtggggcggagcattccgtggcggacgaactgcgcaaggacttcagccgaggggcggagcagtgtctgcaagtgccgttgtccgagcagtacttcccacccaaacagtgggctcatttggccatcggttggtccgttcattcgccattcattcattaatttatcaatttctgcagtggtcagtcggccctctctgctgctcaagtccagcaatgtgtacaactgcgaagtgttcgtcaacggacactctttggccagtcaaaagttgcaactttggtggcattctgccgacagcggtggtcagcagcccgggctcaacgcgtacatcggcacattgccattctttcgccggggaagcatccaattgcgctggcgattagcctcgctgtgtttggtggaggaggcactcggggcagatgttttgcgcaaaatggtcgcacttggagtcgcctacacgggcaattaccaggtgccgtgccttttcggcactttccgccacctttgctctttttcagactgatgcttttccctcccccgcggcatcgtcccgttctgcgctaatctctgaagagagggtgctgctctcgctaaatgcttctgcgagtgcggagaccaccgctctttcgctgcgttcgatgtttccgtgccggacggacgccgaaatgattgctgcgctggtcggcatttcgccaaatgatcaaagcactccgttgtgtatcctctggaacatcacttcctgcccaaccccgtgccgtgcgcttccgctcggtgccgttctgatcggttacctcggtatccgtaccttctgcccgtgtccggtcagttcgctgctcgattctgtcggcggaatagctccgctgctcggcaccgttgtgatgagcagcgacttcagcggactatatgcctcgctgaaagtgttggtgtgtgccgtgcgcacaaatcgctcaattttcgccgaaatgcaacgcatgcgtggctttcaggtggacaaatgccatgccaaaaccaagcacggcaacgtctcacccattcatttcttcgcacagagtctcgcggttctgttggaggacaaaantatgcctgat

SEQ ID NO: 5662 - DNA, 2713 bp, Heterodera glycines
  unsure (1)..(2713): unsure at all n locations
atatnaaggcctcacctcgaatacgcaagcgaagtttgaaatatctcctcaaaagaacagagtaaaagaatggaaacggttcaaaaatttttcacaagaatcgtatacaaaaaatgtggcctcaaggcaataccatatgaaaaaagacttgagatttgcaaattggagaaattaagtactcgaaggtcgctcactgatatgaatatgactttcaaaataattagaggcttaactcatttagacccaaaaaaatatttcgaattttcaacaagatcgcaacgaaaaacatttaggattcaaaataaaagattcagtaataaatctcggaataacttttttattcgtacaattaatccatggaattgctctttgaccgaaggggcaccaaattgacattgcaagtgtccactgaaacagcgatttgggatgtctttgtcaggcagacttggcccatttttgcgccaaacattcgccatttggcattctatgtgcctgcaaatttgaataatttgcgcaatttcgtttcgcctacaattctcactgatctcccgcagctgaactcgatcagttccttcgtctgttccccgctccaattgcttttgatggtaggaatgcaactgctggcgaggctttatccaaatggttgcacacgccgaccaccgatggacagccgaagcatttgcgttgccgattttcaagcacttatgcatcaaagggcaaagaattggtcaacaagttcaaggaggtcgtcaaatcatttttaatttcgggggaggaaggggaaggagttcgaccgcgattttcgacatttttttccgcgtttcacgaccgcggcaatttgaatccgcaaacgcgggattcatcgatattttaatttcaaatttttatatgtattaggcattccatcgtgcctccaccaccacttcggcctgctacaatattgaaattttgttggacgcggcctcgtcaatggaccaatttgaattggtgaacgaaacgacccaagaaaagttgacattgcaaaaagaagtcggttgtggaaagaacaaatgtaaagaatgtgagaaaatgaatggttggctgttgaagaagcgatgtttatcgtcgaatgttgttgtttttggggaggcggttcagcaccagcagcagcggaaccacaacattttgaacaattcacaaaatgtccgaattgaattgcgtggtccaatttgcattgggtgggtgagcagcagacgacctttttttggtgtcatagcaactcgtacaaaatgcaacagctcatacaatttcttaggctatgcctaggcttaggcctaagctataggctagtccttaactttggcctgctctggcctaggttaggctttattttcctaatacatatttgttgattttcgtacgagttgccattgactccttttttattaattaaatttattggtaattgtttagcggtggggtgaatcaaaatcttcacccaaaaatgcgagattcgaaaattttaattttgagtttttgctcaaatccgggttcgggattcgacgtggctcaaaattaatatcagattcgggttctccgctctttaatttttattcaaaaatttatttaactaattattcttcgaattcaaattttaggccattgtctccgcccgccgaccaaaacaacgaaaaaggcgccaatttgtgaacgtatggccattgagaaaagaagaaaggaccgaccatttgattacctctgctggacttgatttgatgatattttctctttgaatgtgcttactttttcttttgtttaatggattttcattcaaaatcaaaattagatttttcgcggctaaatgttgatatttaataaaatcaacaaacattatgccatcaaaacaaataccaacgcaaatttttaaaatttatttaagtggcttataattttatgtagagcgataacgcaaaaatgagttctgctatctctatccccattttatttttgcgccaaaagtcatttgaaaaaaattgctttaaaatttcaaaaattatcgaaattttaaaaatgatgttgagcctttctctaccctcgagcccattggcaacaatttaaggcgaacagatttgaaaattgttttgatagaaaatgcgattctcgtgtttttctcatcaagtattatccgtaaaaaataggaaaatcctaaaaatccaggctttatccaacgcattaattcttctgctatatattgtgtgacatcattcgaatttggccaaattgtgcttatttctgccaaaaaatgaacaggcggtaaggcattttttaaaagccacaaattcctcacttatttagcctaattgtttcccatttcagttggatttgcaacgacgtttggatggacattttcccatcctttgaccatgctcaactcggcctcaaattggcacttctttcgccacgtttcgatgcgttggtggacaaacatttcaatggcaaaagcgaattgacaatttggagaccaatcgaaattcgtcgcaaggacaaaggaccagaaccgaagctgtctgtacaaatggatgacgaatttgtgccatttccattgcccgaccgtccgttgcccagcaaaatccgttttaagaatcttcgganttagtaattgaaaatcagagctatggcaataaaagcatttatttcatttttcagtacatcgatcactccgtcatcgcttttc

SEQ ID NO: 5663 - DNA, 3131 bp, Heterodera glycines
  unsure (1)..(3131): unsure at all n locations
aattcatttttatgttcatgtgcgtcaaatgcaaattgtgccattgnnaatggtgacgaaatgacaaaaggaaaagctgacattgccaaaacaaagggatgggacaaccgatggataatgaaacgatgcaaaattattggggagaccgcgacggttcagcagcaaaagaaaaatgaaaatttggacaacagttgtaacaatgtgtccatttggctttataatagcgccaataattgcattgggtgagcaattaaaaaaaagtgtttagataattcaaattgcgcttaattaaggccattgtctccgccaccggcagaagaagcggcacaaaacatcacaaaggggccgtcttctgacaatgaatgagtggtgggcccagcaaaaacagtggtcaacagaagaagaaatgattaattaagaatgatcgatcgatcataattcaaatcagtgatcaaatgaaattttatgaagaaaaacctctcaattttgtaaataaatcggacgtataaaaatggcaaaaaagttgactctattgcggttcacacgaccataagcttttttttgcaactttgatgcaccatagctttttcttattaaaaaattcttacacggaaatgaactaaaagtcatcactgcttcagtaaaatggtaatttgaaccatttttagactaacaagtgattccaaaaaattgaattttcgactttttgttcgaattcgggtccggggttcggaatagggcgaaatggatactggattcctgaacagcgacctcgaaaaccacaggaaacctgttttcatgtcttttgaaaacaaaaaatatttttttcaaaaaagggggggcaccagctttactattaccgaaaaacattttccttcgctaattttagagacaggcactatacatttttgattcagtctttttcgattaactgatcaaaaatagaaaaatttttgtatttcgaatttttaatataaatttcagaaattctttaacaaaagcaacaattttttttattgacgcgtgacatttttgggacaccttcaaaatttcaaagtttcgttaaataaattctgttgaaaaataatttctccgtctccattttttcgagttttgaaccggttcaaaaaccgttttttggcatttccgcaactcgagacatatttttccacggtagggggggggtcagttgcatcttgggccagttgcgtctcaaacattttttatagagtaaaatggattaattaagttttctgtatgctatattttcattttcacagatacattgacaagaaatattcaaaaatttatagaaaaaataaaaagttttaacaaaattaacaaagtttcatttacccatttggtaattgctcgaaattcccctgagcatttcaataatcaaatttcggttattttggttttggccatattggtgatcatcgtcgatttgcggctgcgttttttcctcattgtagcgctccagaatcctcaaaattcgtctgtccacttcacggtaacgctttgctttcagcggcggagcatttccggcgaggaaatgttcgaagtccacgtcgattattttctgatgctcgcgcaaattgttgatgaatttccagatcggtggggtgtccttgtccgatcgaaagttgaagcgtgcaatggtatgcttcggcgaagttatttgtgcggtcggtgccgttcattgtgcgctcatgcacacttcattcttcgggacgaaacaatggaggactgaagcgttagcggcactggcggcagcaattcgatttcatggcggactcgcttcactagcttaaccaaaaatgtgaacgtaaaaaaatgattagattttcacttttttgtggcattctttgttggaatgttcgccattactggcgtggcaatttgctgatgtgtgtgcgccctggttgccgctggtggttccatcgtctcagcggcacgccgctttatgccagtgacgattttttgtgtgatgacatttgccgcactgtggttgcaattgtggtcgccaattgtcttcagaacgacatcattgagcgctgtgtgaaggcgtcccctgcacttgaattcatcacgctgatgttcacagcgccaaaattttacgtcacggtcagcattgaacatatggaagacatagaggcatccttcatgttcgagttttttgttgttttgtttcgttataatttgattgttttccatttttggggctaaattaaaagattaaaacaaataatatataaaactacgtttacaccagggctggagcgcgcacagaaaaaaccgcggccgcgcaccgcgcattcaaattgccgcgaccgcggatcgcgcaaaaaaaaacgccgcggatcgcgcatcgcggtcgcgctccagccctgatctgaagggctttcgaatgatataacaattgttagatttggttgacaaagaaaaaaaaaagttatagtccaaaaacatggctggggccgaaccgtgcggggccgaactgacgtagaccgataatttctgtaaaaatttttataaaatgattagtgtgcaaattgctgagtttattgattgttcgacgagttataccttaaatggctttggcaattgccaagatcatttggtcccacaaaaaagagggaaaccccaaaaataaagcaattttaagggtaatttgagacgctgactgagtacgaatttgatctttttgcgcagtttcgaacccctaacccgaattcgaacgttttttgaaaaattattttttatttcgtacaaattttaatgggaatggagaaacaaaagaagaggaggaaaataacatttgggaaggaggagagacggaggagaaagagaggaaaaggaaaaattcgacgcaaaaatgaggaggagaaaagagagaggaacagcagcaaatcgacactttaatgttgccggtgctaatattgctaatggatgtcgtaaatcccccgtcaaaatcccgaaaaataattgtcacaacttttcaaggaaaaattcatacatcgatagatagcaaaaattttggcgctagttacaagaaggacgtttttgaaatttttttccctttttgaaagagaaattttgttttatttactcataatatgaaccattaa

SEQ ID NO: 5664 - DNA, 1091 bp, Heterodera glycines
tttttatttgtgtttttctttagaccattcctgtgaccaaggccaaacctccgacggtgtccgagtcgagcagttcgggagacgacgacgaagtgccggccaaaaaaccggcccagaaggcacagccggccaaagtgcctccgaaggcaccgaattttcttttaaattttttttatttgtgtttttctttagaccattcctgtgaccaaggccaaacctccgacggtgtccgagtcgagcagttcgggagacgacgacgaagtgccggccaaaaaaccggcccagaaggcacagccggccaaagtgcctccgaaggcaccgatttttcttttttttttttaattttttaatttgtgtttttatttagaccattcctgtgaccaaggccaaaccaccggtggagtccgagtcgagcagttcgggagacgacgacgaagtgccggccaaaaaaccggcccagaaggcacagccggccaaagtgcctccgaaggcaccgatttttcttttttttaatttgtgtttttctttagaccattcctgtgaccaagggcaaacctccgacggtgtccgagtcgagcagttcgggagacgacgacgaagtgccggccaaaaaaccggcccagaaggcacagccggccaaagtgactccgaaggcaccgatttttcttttttttaatttgtgtttttctttagaccattcctgtgaccaagggcaaacctccgacggtgtccgagtcgagcagttcgggagacgacgacgaagtgccggccaaaaaaccggcccagaaggcacagccggccaaagtgcctccgaaggcaccgaattttcttttaaatttttttaatttgtgtttttctttagaccattcctgtgaccaaggccaaaccaccggtggagtccgagtcgagcagttcgggagacgacgacgaagtgccggccaaaaaaccggcgcccaaagcacagccggccaaagtgcctccgaaggcaccgaattttcttttaaatttttttatttgtgtttttctttagaccattcctgtgaccaaggccaaacctccgacggagtccgagtcgagcagttcgggagacg

SEQ ID NO: 5665 - DNA, 1848 bp, Heterodera glycines
aaaaaccggcccgaaggacagccggccaaagtgtttccgaaggcaccgatttttcttttttttttttaattttttaatttgtgtttttatttagaccattcctgtgaccaaggccaaaccaccggtggagtccgagtcgagcagttcgggagacgacgacgaagtgccggccaaaaaaccggcccagaaggcacagccggccaaagtgcctccgaaggcaccgatttttcttttttttaatttgtgtttttctttagaccattcctgtgaccaaggccaaaccaccggcggagtccgagtcgagcagttcgggagacgacgacgaagtgccggccaaaaaaccggcccagaaggcacagccggccaaagtgcctccgaaggcaccgaattttcttttaaatttttttaatttgtgtttttctttagaccattcctgtgaccaaggccaaaccaccggtggagtccgagtcgagcagttcgggagacgacgacgaagtgccggccaaaaaaccggcccagaaggcacagccggccaaagtgcctccgaaggcaccgatttttctttttttttaatttttaatttgtgtttttatttagaccattcctgtgaccaaggccaaaccaccggtggagtccgagtcgagcagttcgggagacgacgacgaagtgccggccaaaaaaccggcccagaaggcacagccggccaaagtgcctccgaaggcaccgatttttcttttttttaatttgtgtttttctttagaccattcctgtgaccaaggccatacctccgacggagtccgagtcgagctgttcgggagacgacgatgaagtgccggccaaaaaaccggcccagaaggcacagccggccaaagcgtccgctaatgtacggacatgctatcgttaattattacctatttgctgtttaaatttaagcccgtttcgattcaaaatggcaaggcaaatcccgtgaatggaaatgaaacggagtcaaacagttcggatggagcgcctccggctaaggcgcctcgaatggtccttcataattattattattattattattcgtaaaataggattatgtttttcaaggatctcgattcatggggtaaaaaggccgctgccgattttaatggggtcaagggaaagcgttttcgccacgagaaaacgaagaagaaacgtggcagttacaatggtgggaaaatcaacacttcggctaattcgatgaaatttgatcactgatttggaaaatctttcggtgtttgttgctattttttgtttgttggttgattatttgttttgttgattttggtacatttgatttgttgttcattaaattgtgtaccaaaaattacccgaaaaaagcaaggaacatggttaaaagtcactcatttgatgtggttgtctctgtttaatttttctgtttttttgtgctgcgcttaccactccaaaaagtgctgcgtggaatgcccgcaggccgatttcctggccatgggcacgaaattcgaccagttcaggggacaggcagaggtggcgcaacgcgagcagaggcaaatggacggcgatgagcagaaacaacgagcgaaaaaggatgagcaaaaggaactgacaaaatgggaaaagtgccattaaaatgtgggaggggggagagcggagtttggcaccaaagagatgatttttacgactatataatcatatggaatggtgcctggcagggatggcattccgagttccaaaaattttacggaaatcggaattccgtgtcatccctggtgcctgcccattcaacaaaattccgaacaaaaaattaaaaacaaaaaaaataaattaaataattgtccgatttaaaat

SEQ ID NO: 5666 - DNA, 1624 bp, Heterodera glycines
tggactgtgtgattgggacagagacatatataattgagtttcatgtaaaagacaaaatattttatatttaaacaatacttaaggtgagatcatttcacgggtgttcagagatgttttgtactttggacgatagctccaaaggaaaggacaattgaagagaataaatgtagatccgaaattcgcatggaaattttgagggaaaagtgcaaaaatatttcaatcggtgaagttagggtagaataaaacatgtagaaatatatattaataggtagtattaggagtgtgatatcagagcggaattgaagaagaatgaggagatgaaaaagttctttgtaattgtcctggacaagggaccaatcaatccggggggtatattaaagaaatatgttaaattttaaaattccatttgacattaactgacctttgccgattggcaattgttgtcggaccatttgaaacggcctttttggatcacttggagggacagaacgacaaaagcggtgacgagcagtgcaccaataactgaagaagagatggtggcatcaattattaaattaatattggccaactcggcaaaggcgaaagtttacgggtcaacaaataaaagtcgtaaaattcacgaccgaatgtctgcaaataaatcaaaggcacattaaattcatttaaataattttaaattgaaattaaaaaatatattttataattttatattttctgtacttccggcatttcgcaaaatgaggagatttggacggttgaattatctgcttgactaatcggatgaagccatgccgggaaaaaggtggctgaagcgagcagcaaaagtatgacgaaaacgcccgggtggaaataatattccgaaaacttaaataaattaatttaaaatatttttaattcaatttttaacacaatttatattcacctctttgtgccgttttgtccacactaccgaaataaattggtcaaaacaaagcaaaatgagcagaatcaattgagccgaatcagtgtaaatcttttccaaatggaaatatttgaatagtaaatgagattctcacggcttaatggccccctaatggaaccaatttcacaatgacaaacaaacggagtcattaatcactgggccaatccgctcacccaaatgtgcaaatggagtgccgtgaaaaggcaatggacgggcggcatatgctgagcatcctgttcattaccgtatttgaccgacagatggataccgtagaagccggcgaagaacagcgaaagaccgagcaaaaggtctgaggaaaaacggagcgggagagaacagtgggagaagtttggtacgaagaaagataaccgaagatattgataaattcgaatgttggaatcggcaccgggaatcaatcccgacaaatgccgacccgaatgggtcccaatcccgtccaagtctctcgtttcggaaaaacatttgttgatgattaacatggaaaactgctgattttgagtcacactttttctttcccgctttgccccatttttcacgctaattcgtaagcctaaccacgggaagggattaatttggcctaatctccgcccggggaagcggaaggggtgatctcggtcggattaacgagggacaaaatcccgaaaa

SEQ ID NO: 5667 - DNA, 2839 bp, Heterodera glycines
aaggggggcatcggtcgacgatcggatgggccaaatttggccaagaattttcggaaattcactcgggtattttgctctgacgatgaacaataattgaaaacagttaatcgaatcggtccaatgtaaagttgtgggacggatggcccaagggcgctccacattttccttcctttccaatttaattaatgagattgcactaaagcattaggggagatttgcgcaccgacgcctcttcgccctccagggtggcaattgcgccgctccttttcaaacgccgacacaccccctcacaatgccaatgtcgccaaggtaagaaagagtgaatgccaattgggattggatggaagtggggcatcatcaaaaaagaaactttgagccttttaaaacacatttttttggatgaattgaaatttcataataaatgaagcggattaagtagtgacatcacttacgcatttttttgtatttgaaaacaaagaaaaacgacaacaacaaagacgaaactcatataaataaggaaaagtcaacggagaaaaaaacaaaacaaaaatttgaaattataagtcaaattgtctggctaaacaacggcgcaaagtgattgcctatgccaaagttgcggacgacgattatttaacgccacgaccattcttcgccccggacgactcatttgcggacgaaatttgtttgtaaatggccatggcctgaacagaagaaaaaaatggatgtaatgaagttcgttatatggttgagcaaaagaaacaaagaaatggcaaatgtatttaaatacaaaaaacctcttaatttgggtccaaaaataatgacataaatggaccgaataatgagtaaatagcacccgacctgagagacgaaagagcccactgagcccatgtcagtcgggagcagcacagtgttgttctccttggccagctcgccaaacgctttcacatacttttcagccaccagcaaagaagcggcatccgatccaccagcctaaactggggagaaaaggtaaaaaagcttcatagtcattcccaagtgactgaatagagctcaaaacgagcatttcgtcccgttttacgagtactagtatttcgacaagtccatcaatcgccaaggtgcaaaatgtcggattacgtaatgcgccatgctaactgattgagtgtttggttcggaccttgttcaacgcctcggccaccgcgtgtagtgccttttgacgtgcctcggcctcccgaaaaatcgcctccgcctgtcccttggccaaattgatgcgctcctgttgttccgcttcggaggctaaacggacgagcggaacagatttaatctactatttttgcatgaattaaaaccgagaattttcgcccttttctcgccctccgccacattaatcgccgcgtctcttttgccctccgactccaaaattgcggcccgttttttgcgttccgcctcaacttgcatctgaaagaagttcgctagtttggctaaaattgtttatttacttaatttaattagataattgcaaaaatagtcaacatgattacctgcatggcctcctgcaccttcgccggcatattcatattgcgaatttcgtagcgcaagcaaaccatgccccagggctcagccgctttgttaatggattctgagaaagaaaaaagaatcacgaaataaccaaaagctaatcagcattctacggataagctgtatgaatataggctttacggaaatgggatgcattttactcaccccttttcagaaaaaagtataagcattgaaattttttaatttttgggggaacgatacggggaaaaagggcggtggaggggggcgggccgcaccctctgcaataagatttaaaaaaatcaaataaaaaagttaaaaatattatattttttgacggaacgtaaaaatacagaggaaatattggacaacccaacagtccattgacctttttgaaggtttacgggatggtattttccgaaaataaaaactcttgtgtaattcccgtaaagctacaaaaattccacaacaactaaaccgaaactctgacccacaattgccacgttcagctgctcgcgctccttgaacaccgtgtccagtgcgattttgcccacctccgatcgcatcgtcgtctgtgccaactgaacaaccgcgtagcccgggtcttcaacgccgtaagatgcctaaacgagtcggaacggaagtgaaaccaaggacaaccatgcgtgtttgccttgtaagggtccacaattttcacataaagcactccgtccaggttcagctgcacattgtccaacgtgatggcactttgctgcggaatttcgatggcacattccttcagcgaatgccaatagggtatccggtcgatgaagggcaccaaaacatgaaggccctaaaccgattttcgacatagtataccaattaacaagacacaaataacaccaatttcaaaaaattttctcgctttaacaataatttgtttacattcgattgggtttttttctgacttaccgggcccaatgtcttggcgtaacggccaaaccgttcgacgatccacgcctcctgctggggcacgattcgaatgattgtgttcgcttttccctgcggcgcaaaatcgggcaaaatgtcggagttgtaattgcgggacgaagtgtgaaaaagggagcagggcaaagaagaaagatgcctttaaaatcaaatggaaaaatcagccaaaaaagacaagaatggccaaccatttgtctcgggtcaaaagcttccaaccaatcgccatgcctctgtttgttgtcatatacatggagactaagaaagtcaatagaaatattgaaaaaatataattataaaa

SEQ ID NO: 5668 - DNA, 3909 bp, Heterodera glycines
atatatttactaaatttctaaatattaaaagaaagtgcctcccggttattaattaaaattccaataatacaaaatgaattttaaaaattaaataaaagctaaatataaaatgaaaaaaaaacagaaacctaattgaaaaagaatgaaaaattctaaaaattattaaaaataaattgaaaataaaagtgcccagtgagcgaatgacacgaatgacacacgatagcagtagtaaagaacaagatacacgagagaatattattaaaataacattacatttaatcaaaatataaatttaaaataccaaatttaaacaaatattttttattattatctaaataatttaaaagtcaaagctcataaaaaaatttagattataataacaagaagctcgttttgatgggacaaattttggcaaatgtttatataaattcttaacaaaaattttgaaaatctgtttaaaagtcggaagatttactagaagcttttgaattttacttgatatttttgtacatttttgaaaagtaaaatcctattaccactgaaattaaaggtcaaagaatgtttgagagcaatataataggaaaatattaagcaacaataataatacaaaatttaattattttcccactatttaaattaaattattggcgttttgcccaaaatttattaacaaaaatgcattaatgataaaaatttaataaaaaaaattcataataatttggtttatgacacgaagaaaattacatttaattaatgtaacaaaatctcgaatgacgattttcaaatttttaaacattcatatatttataacaatatttaaaagaataagaagctaaatcagaaaatgcaaaacgcactatttaataaattataaaaatatattttaattcaaaaatacaaaaatgagaaaaaaaacaccatttaatgaagctgatacaatcaattttcctatataataaagctgagtgtgtgtatgtatgtgtccgtgtttgaatttgtgtggcgttttgttaattttaattaattataattagtgatacgatttttaggtttttacctattttcctgagctccccgtggtaaaaattttaaaaacttattttcacctattttggcgttttgcccaaaatttgttaacaaaaatgctatctcattaatgatttggcataatatttttgctttttgagaaaattttcgattttacaccccaaattcggaactttttggcttctattttcccatttttagcacctattttgggggttttttagaacctaaaacctacttattttggcagtttttagcacctaaaaatcgaagccctaataataatagaatacatttttgatcgaataaaatgtaaaaatatttgaagcaattttgcaaaatgttcttatttttgaccctaaaatcttatttttttagcctttattcttattttgaaaattttgaaatagaaaccctggatttagacaaaaacacccataaaaattgactattctggcataatttataatccttaaatttggtcatttttagacaatatctgtgcaattataccaaaaaagaattgaatcgaggcgatacatcgaataaaggaatgtggagccaaacacatcattcaaaaaaaaaataattttttgtgagattttttggagctaattaaaaacaaacccccgcccccgttcccgggggcgagaaatttctcaccccgcccccgcgactctgaccggcgccgtatgcattctgctgcgaacacaatgcataagtgtcgagagagccgccaccgcccgtgaagaagcaagttcccctctctgagtggctgttcaaagggtcggcttcggccacctcgaagtacatcatgccgccagcgcttccgcttcttgccaagccgacagaaacgccaaccatttttgcacagactacagtttttttataaaattcaattttcattttaaaaattttgttttataaaattgccagaaaaaattatgaattttttcttaaattttgtcttcttatctagatttacttgtaatcatgataagcatccaaccgcttaaattcccctgtgtatattgcaatttttgcctgaaattttcgtaaattttttgatagggaaacggccatagggaaatggcctatagggaaacggccacagggaaatggccatagggaaacggccacagggaaatggctcgatccccttctaaaggggcggaagcaacttgatacaattttaaattgttcatatgatgtaatcccaacttgccgtctctctgtggttggcagaaatcactagccgtagttggtttgctgggggtgcacttcatttcccctgtcgaaccacccctccacattaaaaagcaattcttgacaaaaaaaattttgaaaaaataccataaaatttcaaataacgctagaaagcttcaaaacaatttgtttagcggcggaaccgatgtacgacaagcttgaccaaatttgtcgctgacacggaaagcaacgctgcaggccatttatccagggaggggagtggggcacgtgcaaactccccccgaaaattaaaattttcacgaacaaaagtcggtttctcttaattacaatataattattttctttttcaagggtgaggggacggtcacttcataccacgcttctttaattttgatcacaaaatcaaaatgttataacgtttggcgccaaaatggccggcgaaaatgtgggcgggccctaggagaatgatacgtaaagacaagcgagggtcgggagaagggggaggaggttgtattcccttccaccctgaaataaaatttaaattttctgccgacgggattgttgccgattagtctggtgccgggcttttattttgacaaaatcccgagcaaccgggagtcccgccttggtcgattttcaggtcccgaaataaaaagagagtgcagagaaaatacatctctcattttgggagtcgcgcccaagttgactttcaggccatgacatttcaaaatttccgggctctaattcccgaaaaagtttctaatattttagtgctctaagcaacacaaaaagacaaaattttcaacaagagtcttttaaattaggggtattttagtctcgtcttggagggggggggggggggggggggggggggagtactccgccttttcacctcaaactttgcctgcggaaactttgccggggcataaactcgccgacaaaattaaacaaaaatcattttatttgattttgaaaatcagatttaaaaaaaaattattaatatgatcgaatgttgtaccctttttgtaaatcattgtttttgcaaatctgatatcattttgtgatcagaagccccaaaaaccccgggttagtcttcataacaaaaaaaattttgggtggaatccagattctccagtattacgtatcttatatttcatttaaattggttattcaacttacattttcatgcattttttccccagcgcttcgtcgacgaaaaaattgaaatcggtgaatttacgttcacgtaatagtcaaaacggtggctgatcagtgcaattccgaggccaagttgtaaaggctcaagcaaatcgaaaacaccgagccaacaatcggcagagatgaagctgaaaacggaaaagcaaaatgataagccatgggcatccaacttagaatattacatcgctttttccatttcactctcagcttctttcgggttgtgcgacattttttttgcaggtaatcaaactaattttaaataggtaggtgaatgaaacgaattccttttaatttaatggtaattttaaattgaatcattaaaaaaagtgcggaaaaatgcgctaatgaattcgtggtaaaaatggaaatttttttaatgaaaattcgaatgaatttaagtatccaatgactggtgac

SEQ ID NO: 5669 - DNA, 3026 bp, Heterodera glycines
ggacctgatttttaaggaattcattttaaaaaccaaacgaatttttaaaaatcttattttattacattaacaaaaaattgtattgagtaaaattagttaagccattgttttttgaaatatcggaattgcacatggattttcggtaaaaaatgtattgaaaggatattcagagatttatcccggactgatagaaaagtccccaagtttgaactccccctgctggaggaatgttagtatcctcaggcttttttcggcctcctatttagctcctgttgtttacgaatttaaaagtttacatcgactaaattaaatttttggcgtgaatttgaaaaaaaaatgccattttgcgctcaagccgactccaactgaatgcaagcgccacatggcatcattgccttgccggacttgtgccggacatgcccaaccctcgacctaggccgatcggctggcacaccctttacaatgcgaatgggggcgcgaaacagcgccggcgagcagacaacgaaactgcgttgtcagccattatatatgctgaaaatttgttgttcttttttccgttggggtgtaaaagacgcgaggaatgggtggcagagggacccaagtcatgcactatttctccactgcgctgttttctttggttctggtcggttttatgcgtcccatgaatgttcatcctcagcttcgtaggccataacttttttctaacttagtcaaatcttacattattggtatcaactataagaaaataaataattaagacattaagaaagaattacggtaatagttacggtggttgcccccctttttcgaagagttttttttttgttttctgaagtcataaaaacatgcttccaatggttttcggggtcgctgatcacgaatcttgcatccagttcgaccaattccgacagctctacgtatcctctattatttatgtaatttctaaaaaattagtaaaaatttactaaaagttgtaactaaaaaagcgggaaaaatttagactcaacaattttgaccctaacttttttgaaattcaatataattttttgaaatttaactgaataatagagaaatctttgggctatcttttcatatcaattgcgggtgtaaattaattgatgtttgaacaattttcatacatttaaatttgaggatttccttgaattagaaattaatttaggcccgatactgtcccatgctttttatggtcaattaattaatgaattagtcccttgctcaattaattaacggtgggggtcgattgggcgccgaccagttgggcgccaccctgctttttgaggcacaactcctttcatagttgaccgaactgaatgtatttaatatcattcaataggtctaaatgttctctattagcatgctaaattccgaaaattttggtcaagtttcaaaaaagttatgcacaaaaatattcggaaaaccgcttttttgaagttttttgtccataatatttttgaaacttgacgaaaattttcgaatagagaacatttaggcctattgaatgatattaattaaaggctcgcggtcttttggacagtggacatttggacagtggacattacgacagtggacatttggacagtggacatttggacagtgaagtcatttggacagaagtggacatttggacagtggacattacgacagtgaatgcaaattttttactgataacaaacttttgcaaacatatgctaattccaataactgaccattaataatttcccaccgatttttttggttcttgataagaatatttgcaaaacatcgcttatattctctcccgttaatgcctatgtgttttttgacggatagtttcaccaagaaagaaacgtttttcataattgtcagggtcgggattttgctcttgagcctgaatattttgctggggttcgtggatttccccctcttcagaagatgaggaggaatgcattttggtaagaatgaatgacccataggcattacgggagagaatctttgggctatcttttcatatcaattgcgggtgtaaattaattgatgtttgaacaattttcatacatttaaattaccttagattttttggtgaccataaaaatattacactattaatttcttcataacttttttcagaaagaaccaaatttaatcttgtttatataactagatagcccaaagatttctctattattagctaaatttcaaaaaaatttttattgaatttcaaaaaagttaggatcaaaattgtttagtctaaattttttgagcttttttagttacaacttttgtaaatttttactaattttataaaaaattaaataagttattaaaattaaaataacttaattaaattcatttgtcacttcggctcaccacgatttgaatacacggaaacgaactgaaagtcagcactagtgctaattttgcacatatatgctgaaatttttgctaacttggggcgtgataataagcattaaaaacttctttctaatttgctttgagacttctaattccatttttttcatgctgattttaatgttttctagattttttaatgtttgtgctgatttggcattttggtgcttttttgtgctattttatcattttgaagaattttctaaaattttttcagcaattttcaaaaaatttattaacaaaatgcaataaaaatgatgtaaaatacacccctaagaagcgatccgaaaaatttcagaaaatacaccgttaagaaatggaaaattttatcaaaaattcatctccgaaatttatgtaatttatttttttgtcaagaattttgatttttaaaatcatatatctcacattcccattttgcacctattttggtgggttttttattatcagggagcaaacaaacgttttttgacgacttttttcaattttttgtgtttttaatcccttaattttatgcttttttccaattttttgtgcttttttatgcttattttgtgaaaatttggtgctgtttacattgattaatcggtgattttttgtgttgaaaactgagcattcta

SEQ ID NO: 5670 - DNA, 6975 bp, Heterodera glycines
aacaattgcattaaacgagtgtccatgtacaaatttcctttgactttgaagaggaaagtgtaactgtaaatggcaaccaatgtgtttcttgtgattggggtataagttcaccttttcccgtccgatccaatcaaagataatttcttgggtcgtgttttggtaggtagcacaaaagcaattttgtccattttgtgtacggtgactgcttgattaaaactgcacaactcttgaccaggaacaggaacagatgttgcggagaggtcgccaagatgagttgaaattttggaaaggttcaaacacagcgaagtccttttcaatgcttgcttatttaacatggaaatcagctgaaaagagtaattagaatgctttaaaaatagaaacacctttctgaaaggttcccaagctttgcgtggatcgttgagaatgttctgttccataatgacaagcgaagattgaatttgctcaccaaataaaagcttaaattgccgttcgttttcactctccccactctctttgcaagtcatttcttccaaatatttcaacgatttaaggaccttagcaaaaatgttcattttgcattgaagtgacccactgatgcacctgctccatgtattcccgtaaacgtccatcagttggcggagatgatcgtccatttggcaaatccggcaaaaccgaagcatcacttaagcccattgatgaacgaatcagacgcccaattcgatggtcaaattgggtcagtgtgtaaagccatttctcctcattaagctgagcaatgcgttggagcgaacggctgaattttaattggtaaaagcgaatgatcctactatagagaccagaattcggtggtatctcgaacgagggcagggaatttggcagcaagagaatcgattagacattcgcacgcattcgaagaaaccgaaaatcaaatattttaaataaacaatctatggatgtattgaaattacaattaatctttcgctgttttcttttgagaactccgatagcaatggcattgtgttggctaaacagcaaaataaatttaccgaatttttatgtgtttattttccacctttttcatccgctgccccagcaatgacaatggccgggtagcaaacgacgtgaggcaaattttgaccaatttgctccaaaagcatgtgaatggcatcgaccacaatggaatttgaatggttgagacaggcaaaaagttgtgggatcattcctagacatttaatttgaagagaaaagaattcacttaaataatgaggcgaaattagaataaccagtccaaacgttgacaggaattcggtccatccatgccaattttttcccagaattattgccggcagaagtggcggttttatcatccggaaaagtcacaattcgttgaaaccattcaggttgacgagaaagcattttcaggaatcgcagaatcacttccgcagtttgtacgtaacttttttctgaggactaaacaaattaatacaaacaataaacaatactaattgaaaatgaaaatttataaaaataattaccaaattttcaaggaaacgcaggtgagagttcaatgccaattcatagagacggtattgacggtgtttgatggacagccaaaattgagtgaagtttgactggtcaagtacccttaaaagaatgtataaattgcttaaaaagttaatattcgaaatttcccttttaagccctaatgaaaattaataaaacaaataaatacattaaaattgccgtcgaattcatggaaacatccgtaagaggaaaatgttcgactatttgagaacggaactcttcaaaagttgagcaacttccaattaactcctcaaagtgacgtccttgcggagaggaaatgtcaatgccaaactaaaaggaaaagttggttggtcacagaaaggaaagccataaacaaagtgaataaataaactgtacctgttgcatgatggctaattcgttgggcaacaaacgaagagaatcaccgtcaaagtcctcagaaaggagactcttcgtcgcttgaggggtcgcaggagccgtgaaggaaatattgttgacggtgaaatgattgtgagcatcttcagtttgaaaaggttgattgccgagtaatgactcgaagccaggcggaattgactaaaagataattttcgttgcatttctcatgtgttccacctgaaactgcggctgggtttgttgttggatgtacaaatttgaaattcccattggcaattgatattctggcaaaatgtctagctgccggtgcatttgatttccatacaaatcatcaattggccacgaattttgggtccctccgttttgaactgagagtcgaaaatgcgtgttggccaagtttggatttccaagtttttgggcctgaatatcaattcaaaaaatttttttatataaaacttttccaaattaactaattgagcaatttgtccatgcattctcttcagcacaaaactgtgctccttctgcgctccgtacaatctgtgcatccatccgcaatacatttgaccaatttccaaactatgcaaagcattggagttgcaattgtgcaacagatcagcaaagtcaacttctagcaaaatctaaatagtaccataaaatttagtaattctaaaaccatattaatcagagtccatgattaatgctgcaaaaataccggcgttgaaacggagtattttggtgggcttctcatcatttgcttggcgctttgttggccctttggtggaaagtgctgctgaatttgagctggttgtacgtggtactgttggttcggtacattcaaatgctgaatcccagtgcaaattgcgtgaagaatggccaacttcgaatgtgcaagtccgtcgctgttttcgtggccaccacacagcagaaattgtgccaaatcactcagctcatcctaaacgattaccaaagtcaccgcattataacaagatggtatttacctgttgtgaaaaaagtatttccccggtattttggcgaccgattgaatttttctgccgtatttcgaaaatgcgcattattttcgcctctgtctctaataaatggttgttcagagcccaactttcatttttggtctccgtggtcaactgagtgggcgaagtgtacggagccgaattggccaattggtcccaggaagagagtttcaaaacactggcaaaaaggggagaaaaaaggcatggacttattactacatcggtataaaaaaggttttattcccacctctcccagctttgaagtgaaaaaagcgcagtcattttggcaccgctctctccgctttcgtcgtctttaacttcttctctgtcgatgattgcttcgcgaattctttaattaaacaatacaatagaattcgcaaaacaattaactttgtttcagcttgtgggagacgtaaaatcccagcggccatcagtgccaattcgtcaatggcatttaacacgtggtcacgaaccttcggaacattctctttggattgctttgcacaattcaaaaagtttaaacatccatcgagtgcttcctcaactctaaaaaaaaacatttttccatatacaccttttattgttaatataccgtgccgatgcaagtaattcggcataatggcaccacgaaaaatcaaccgcaggtccaaacattgtctcggaaaacctttgaaccccgcggattgcttgtggtgcgcctaacctgaccaaagcacgaatgacccaagtaatggcaaattgaatggaaggatcaagccggattttcgtatctgcaaatgatagtattttaaaacccacaaaaaaagaaagaccgttcgaagcatttgaagggtgtttccgctcgagttcggcgaaaagaaaaccaccaaatcggacaatttgagcataatgaccgttggcataggcagtgctcattagtggaagtgcagttcggaacagccaatccatgcaagttttgaagttgacggaaaagaattgacgtgcattctgaaataagaggcaattatcgaacaataatcattgatgtttcagcattaccaatggaagttcgtcgtaaattttaagcatcgacccgcgcaccgcataacacatcattttctcgaccatgtcaatgcaatggaggagcatccgaacgcggaaccattcctcctccgggtacaaattccgttgttcctttccgcagttaccgccttcaaaagcttcattactgtaatttattccgttacttactcgattgattcattgataagtggtcatcatcattagaattggaatatgaaatgattcccttttcatttgaagccaaattttttgaacgcgaagcaatcagttgtgaagtagaagaggaagccaatgctcgcaattgagctggaaaatgcataatttcgaggagttaggggaatttgtcaaacggaccttcgaatttagtaaatgtttcaagtggtgtcttcccaattggcgtcttcattcgattaacggcacaataatgtgcaaattggccaacaataaacaaccatttttgtaggagagatgcgctgtcaccgattcggttattttgcttggcattttcgttgaaagttgtcgaggctttctgtgacttgtcattagcagtgcacgacaaactttcaaaaaggtattgtccagaaatgaaaagccaattttgaggcgaacaactgcaataacaaaacaataatttgtttttttcatgaaaattgaccaatttacttgtcttgtaacatggaaatgcgcttgcgtccgaagaggaaatcagtcacaaatcgaaattcattcggttccatgcacatttttccaagcaacttttgagttctcttcgcaatttccaagaaagagagacatttaatcgttgatatttcagaaattctaaacaaaaaaaatgaaaaaagtatgtagatatacaaaccgtattaaatatgtgatcggaatgcgattccacagagtacggaactgttcaacttcgagatgttcagcacactcacgcaatttggcaataaattggtgggaaagtattttacacgatggctcatcagaaaggaggacattgaacacatgaattctaaaataaataaacaaattaaagaaaaatcagtcaacgaagaccgacctgtacaaacacttgacgagactctttcgcatttcgaacgattttatggaataaagcgaaaagaatggaacgagcaaaagcgaagaacgcaaagcaaacatttcacgaagctgaacaaaaagaaaatttaaattaactaaacacaaaaaattaaaggaaacctcagagactactttgaattgctcaacaaccaaattcgaaattttggaaagccaatcgattagtgtcgcttgcgcgtggttttgtaatatattaaagaaacggaataattcggcgagtgaatcgaggattttggcaaagtatttgccactgacgctgcttgagaaagacagcggagctgtcgtaccgacatttgacttttgtttatcggaaaagccggattgaaaaatttcacaattgtggaaaaaatggtcatgcctaaaaaccaaaatgactaaaaacagtaaaaaatgttagtgtgaaaaagcttacgtcaatgcaaattccttggccatttgaagcaacagataatgaaaattcggcaaaaatgtcagaacccatcggtcggcaaagggaagaagaccgaaaaacagcgaaaaaaggcttggttgaagaccatgtagcttaagtttattgtttttttactttttcttttttttaagttttttttctttttttggttttaatttaatatttttttttacatattttcttccctaaaaaacatcactgactcaccaagaaaatcgagtttttgactttaatcaattgctttactgagcacaacataaccataatccgcttttcctcacttttaaatttgctccattcaatttttgaatgcttcaattgtgaaataagttcttaaaaaataatgccatttattgcagatttacactattatttaatgaaaaactaaccacatatttcgctgacaatttttggatagacattttgcaattggtctaaatcagttgcatccaatggtcggtaatattttggttttgcaggagaaggcgattgaatttccctcccttcttctgcatccgtctcaactttttgctgttgtttcgtctcatctgctacgaacattaatttttctaaaaatgaaacaacatttatgaattgtaattagcagggctgccaaaaatatgcacgaaaagtgaccaaaatatgcaaataaagtcgtgaaatatgcacaaaaattgcaaaatatgcaccaaataggcacaaaaaaaacttgaaaattaaggtgcaaattcaataaacaatttttcataatcaatttttttctaagggatattaaaaatcgaaaaaaatcaccgaaaatggcaaaataggcacaaaaaatggcaaaatatgcatgaaatatgcagaaaaagctaaaatatgcaaaaaaaatctcgaaatatgcaaataaaagtcccgattttttacgcaaacacaaaaaagaaagtgtttttcctactatttagagcatggagaagccaggaaaaaaaatgcatttgcatatttttggcagccctgctaattatcaacgctgtcatacttaagcagatgacgaatttgggcttacttctttaattttggaattgttaatgggaagggcattattgaaaatcggcggaatatatcatagaatcactttttaaaaatgggccgcatacaaaatcttagcaaatggatttggcccatttcgccacattcactcctcacctctgtggattatgtgtttgagctccttcaggtcattcagtgcattgagaacctggccaaaaagaaacacgaagggtgccgtgtattaattaatgcctcccctcgcttggtaccgtaatgccggtaattccgagtacggtctcctcaaagtgttccttggcaacgccgtgcaccaat

SEQ ID NO: 5671 - DNA, 1672 bp, Heterodera glycines
caggtctctcatgattcgtccattgctgtgattgacaagtccaattctcaacctcaggaaaggccaattcagcacaaaactgcctttttgccgttcacttctgtccgatgggtcaatgagacgcatattgtgacggctgtcagatattccgcttttcctccaacacattgtctctgtctgttgtttagggtcacgactgttccccaatgcttttcactttcgacgggacggcgttgaatttgaaatgcaaattggtcaaaaacttatatttgatgcttaaacaaaatgccattttaggatgtgccgccagaaagtaaaaacggttccaacgtgagctccgctttcgccatgtttcgcagcatcgacaaaaaggcgttgtccgccgactctccgttgggttccaccgcactgaaaacgttgcatcaaaattcgattatgtgtgttttttctttctgttccaatttattaaattttccgaatgtcttacaattaggcaaattcaaccgcacactgtctccagccaatcggggacaatcagcaaattcacaacttgtggcctcgacggggtcgtggctctttgggatgttcaggtgacattcgcacacatttctccttattttattgacatcttttgagttaattaaatagattgtatcattgcctttttaaattataggatgttttcgaattttgtcaggtacgaagcgcgtgatttggcgtgctatttgctttgatactctaacctaattaacattaagaattattgacgtgattttcggtatttaatatccaaacaaattttactgattgtttcataaaattcatttgcaagtcataaattcataaattgatctcattttttaagaaactaacagtgtttttgggtttccctttctaaccttaaaatttgttttttcccaattattcgtgtgtttcttttcagaagcgtctcggcatgcctttggctaatggcgccgcgcaaatgagttaatttggccaaaagtgattacctgatcaacaaatgctacaaattattgtgcaaagtcgcaaactgtggtgtgtcgcggactccgtcgcttttcgctcgctattttatttttaatcccttccgtaatttgtaatttgcgctatctcttctcataatattatcgatgatttcaaccacatgtttttattatatttcgtttattataatttaaaaaaatgagtgataaacaatcactttgatagtgaaacttagagggcaaattcctcatttgtctatcctcccgaatcgtctccaccccctttggttgccgggtaaccgaccgatgtctccggggtccatccgcgcactaatcgcccgtttcgtttcatcacagttcatcctcaaattacgctcattagtgctccattgtcctcaattttccgtccttttgttccaatgcgtcgccatccctccgtcccaacaaataatttcaaaaaacgcatcaaacgccgcgtgcattccatcgccgatgttttggtcggtcactttttgttgtcttttgttgtgccatggacacaattcagacgaatatttccaccaatttattggactccgctcgcagcgcaacgagcggcgatttgggtacggcacggcaaaccctgggggcgacagagagagaaatggacggagagaaaagggcactgc

SEQ ID NO: 5672 - DNA, 7271 bp, Heterodera glycines
  unsure (1)..(7271): unsure at all n locations
gttggtccaagataatcgatcccaatgctttcaaatggtgccgtccgcctcacgcggtctcagaaaagaggaggcatcgtcggcaatttatatgncggggcattggatccggcgacaacgaccgcatgctcgaatgaccttctttattgtcagtctcgctctgggtgtccaatattttcccataaattctgtcagagtggattcaactccagaatgggcaagggactcatgtaccgactgtgcaattagtcgggttattggacaattctcaggaaggataatgggattaaccatatcttctgatgcattgctcattgcgagccgtgttgacagtcggacaagaccatctttcctcgatgtctttacaagttcttgtggttgctttttacacattggccaacatttttgtgccatttttacgagtaagatctcggcgtactggtaatcttcactgctcataggaacaccctctgaaatctcgaatattcgagtcttcctcatcttgtttattgcacggagaaaccaaaccacagtgcggcgtagtttagtccaactgctaaatcgacaagggtcaatccatggattgtcttcactcgttgttgctggcactgcaactacattgtccaattctgaactttcttgtccatcattcatggctcctgttggggtgacctcgaagtcgatcggccaacttttcattggttctcggagccatgttggtccattccaccaaagatgatgggatctcagctcttctggagtgcatcctcttgatgctacatccgctggattttcgtgcgttctgatatgcagaaatctggcattttctgatatcctccggatttctctcaaccgattctccacaaatctgggctgggaatcttttgactcaatccagctcaagacgggttttgaatctccccaaataaatttttcatttattgggattctcagctgattttccgcaaatttcagcatcctcgccccaattagcattgccaagagttccattcttggaattgttacttcagctttccggggcttgagtctactctttgcatagagtaactgtacattggtttcttctcctttctgagaccttatgaaaagtgccgctgcataatctgatgacagcaaaccattctgctgtttcatcagctggtaagatttcgtcccatccaagggttctgtcccacaatcgttgtaggaacaattttgcttggagaaggcaaggtgcgaccattcccaatgggtcaaatatgcttgctaatgttttcaaaacaatgcgttttgaaatcttcccggcttcattcgtcggtgggaatccaatgctcaattcgtccttttgaatgtcccaagggatgccaggtactttagtccctggtttattaagccggtcctcttcgggaatttgctccatcgctttcattgagttgcaaataaattccctcaggttcatttgtgcttcagcaaacaatgctttcccttctcgatacttctttaagacttctccagcgtctttgcatgaagtcattagattgtctacaaaggcattcccagcgaattccaacgccaagggggaagctttctccttcagatgcttctggacaactgcagccaaaataaatggcgaagaaattactccgaagggaatccgagcccaacggaagatctgtaaattgtctgtcgacaatttcttcttagggtctttcacccaaaggaatttcacaaattccctgtcttcattgtccaaagatatggcattgaaggccttttctaagtccgcccataatgcaattattgggagacggaatcttagaaggattcccacgagatcgggaatcatcacgggtcctctgaacatacactcgttcaaagatttctctccccgtgggtgtgctgaagcatcaaaaacaattcgaagtttatgagttactactccatgatgtggcaggaagtgttcaggaaaaccctcccttctttcgccaagttcaaagaatccgagattgaactctctcgagattgactcgtggtatttgtccaataactcgggagtcttgcgcagtttttcaaggaggttgaccaatctcctatatgccatattgtaattcgatggcaaatcggacgggaactctttccatggccatcccgaactataacgtccatcagcgagtctcttggctttcttttcgaagatttccatcgctgtgtcgtcatcattttcttttgggttatcttttattcctatcagttgtaggtcccaaaagttttttgcagtgtcgatgcctgtttctgcaaattcacaatcagcttttgctgacatgactgcgcaaatttgtctcgtttctccgatctcctgtgggatatcttttccacatacgataggtcccactgaagtgtaaatgcggaataagttccgatttatctgttcgcgccgctggaagaatcgccagaattcggccataccaatgagtaaatcgggttcttcatcggttatttccacgtttccggtcttccattcggctcgacggatagatttgactatccaatctgcccgataagctactattttttcggatttgccgttttccaatgcgacatgtagctcatactgcggggcatccagcctgaccggtgaatcgctgtggaaaccgctaacttctagctggccatctttcaatttatataagcttaaggctcgcactacagcacttttgatcatggttacttgcgaacctgtgtcaaagaagactaaaatcctaattctctttgtaggatttcttctggagaaaattgtgacgtatttcgccatcagaagcactctttttggatcagaaaccatcgtggctactgttccattttctgttgaaccaattgtcgtcatattgacttctgcatgggttctcttgaattgtgctttcggctttgtctgccattcacggccggatttctttgtattcggacaaataactttgttatgcgctcctttgcatctcgcacaactcctatttgcccgacaatccggagctctgtgccctctgcgtaggcacagagaacacctattttgttcggcgagcattttcgttcgttgctgaacgctgaccacttttctgcaatcgttgacccaatgcggtccgtcgcagaagaaacatggaagttttggcttcccacgaggcgctgactccattcctcgtttatcttgtgtggctacaaaggctctggctctctccgctgattgccttcgttgctcgcgctggaacacctgtctgttttgtgtcggacctcgattcacatctcttcttagtgatcgagagcaacgctggacctcctctcgaagtgatacgacttctgctagtccacgtctcagatctgacatctgccaatggaacccctcttctcgctccattttaatcaattcggtgagaatttgcttgggcagttttgccttgactgccatgcacatgagcgaattctcgggatgtcccaaagcatttaattggcgacatattcgttccaagttctcggagaacatctggagggagtccgggctatgttctacatttggaagattgaaaagttcggcttgcaaggcttcgacgataacttgcggattgccaaacaatcggcggagtgtttccaccatattttcgtaattttggccacctctgtagcctatcactgcacgagaggctttccctttaaggcatcccatcaaataattcattttgtcgattggctgcaggtgagcctgattgtggaccgcattctcgaaggattgccaaaatgtcggccactctaacggatcgccggagaatatcggcatccgtaattctggaagtctgatccttggttgatgcaggacttctctgacgggtgattgcctttgtactcgaaaagggagttgcctttcctctcgagcaggtgattgccgttgcctttgggcattttctcgcacggcattgtccccgttttgggaaccatcgtattctgactctcctgcaagtgccacttgtatttcatccatcgtagcatgtgcgtcggctagcaaattcgctacttctctttcgttgatgaatgtctcgagtcgttcttgctctgtctgtttttcttgtccttgaagtccagaaatcacgttttcccatttcgctagttcagcttccacacgctgcaatacttttaacagcaatacttttgcttccatcagcgcagcgttgttaacttcttcatcttcctcacggtcgacatgtgtccgtgccgtgtttactcgttgacgaagaattgccacttgtgggcccagtaccatccggattaggttgctcatgatggtcttttcgggaggtccacttgttgtgtggtcgttttacaggagcgccagttatcgcgttcccaggagcgccacttgtcgaggaggcgggtgaggtgcaggtttgctggactggtcggttgcgcttcggctgtcggtttgcacacgctccgcgacaatgttattgaacttagcgaatgggacggggtttccgctcttggaatggacttgtgggatggacagcccctttagacttagttggactgtcctggtggacttcgggacaatcgagcttagacaaatgcaaacacggaactctgagttccgggaatgtcgaaaccgtagagaaaaaggaacaccttcggaacaaaaaacttcttagacaagaagtagtttatttgtcggaatagcgcacaatcaaaggatggaataatgatttttcgagagggattctaaagggaaatattcgggtttatatatgagatttggacagggagggaaaattctaaaacacacctgaaaggaaatgaaaaatggggaaacttcgggaatattaatcacaaagatcacaagggaacattcgagaatcttcttccgtcctccacaggacttcctcatttctttcctccgggcggtcctccaaacggtcctccgagcgatcctccgggctgtcccccaatttccacgcgttcagtcgccagcggcgacaaatggcaatccggtcacgcggtggccaacatgttcaacaaggtcccaattgatgggtgcccttaataagtgctgacttgtcttggctccacaaaaaccaacatttattcatagacggtgctccccattttttcaaggaaaattttgttttttattcgatttataccatcctggggttttaatggtcgcagaatccaatgataatagtaaagtttgcctcccctcgccccttttttggttaaaatttttttctgttctaaaaagtcgtgaaaacacgtttccagggatttttgatgttgcaatgatttttactaaatcaaaactagacaaataataaataaccaacatgtggatccaaaatcaccaaaggtaattgagcaaagggacgcgatattttcgcctttttgggtcaaaattccaaacacttctcttattgcttatcgacgcccgctgaccccatgcgggtggcggcatgacctccccccacccccagcctaacccttgtacattatatactttgagtccacattaactcacatccgaaactgcccgccgcacccagcaggatatgtgcagaatgcgtaaatgaatctgattccatttggatggtggcgcggcgcgccttcgtcaacgcaaaattgcaccgcagccgaacgggtcccaaaagtttgcaccaattcccagtctgcatggtcaacaaagggcataaaaactggaaaagaggaattacaccttgcttacaaaacatttgtttgagagggttttcggtaatcgtacgctttactggtcccacaaaaaaaggtcgaaaaaaggaattccgagctttttttgttgtgaactcaggggttttcgcaggcgctgatcacgaatatgacatccatttcgacctatttcgaatcccgaacccgaattcgaacaaaagtcggaaattaatttttcacaaaaattcacctgtattatccaaaaccgattcaaatgcactaaatgaccttgaatccttatttgctattatattcaatgtatctgactcgattttggaccataaatatgaattttggtgaaaaattaattttagacttttgttcgaaatcgggtccggggttcgcaatcgatcaaaactgttcttaggttcgtgattagcgaccccgaaaactcatggaaaagctttattgacaattttttgaaaatttttacaaaaaattgttcgaattcgggattcgaaataggtcgaaatggatgtcatattcgtgatcagcgcctgcgaaaacccctgagttcacaacaaaaaaagctcggaattccttttttcaccttttttttgtgggaccagtaaagcgtagattaccgggttttcggaaatcgctgattatgtcatatatttacaattagaccaaatgtgaaccaggtcccgaattctaacaagtcgaaacttcgaatttgataacttcttattatttgtctacgggctaagagattttttgtttaaaattttttttggaggtgaactgacttggaattgcgctgatcagccaccgaacacttcaaaagacgacaaatgaaaggaaagcgaaaattcaagacttaaaaattgaaaaaaattatttaaaaaatttgttttggacaaaaaattaacggagtcgaaagaaccgtaaaagtggtgccgataagggcaaacaaaatgttacacatcaaccttatatatttaaaaaatgctacaactgcagaggccatcaaaacatgatcaatttcaattcgaacgaacgtcggctgtggaaggaccattcccttctgttggcccggggcggggttcgaacccgttttcacccgaccacaaattatttttttaaagacaatgtgccaaactttttttaaaatttttctcagtgacgaaatgatctgttattgttggaactaacctataatggactgcagttaatcactatttagcattttgatttttgagaaactcattaacaatcataaacaagcacattatgcattaacagttttattcttacctcgcaaaaaaaacaattaattaattatatattataagtgcgataaggtcggcatataaaagatgacacaatgaatcagtgaattcagtgttgggcatgaaacaacacccgaaaattaatacaaaatcataaaaaggtctgacaaaaaataattaaataaaacagcaaaaaggaaatttaaaaatatacaataataaggaaagtcagttgctgaacaangtaaaagagagagactcacaaaa

SEQ ID NO: 5673 - DNA, 2034 bp, Heterodera glycines
gtaaatcgaccttgctctacatgataaaagtggttttaaattgatttgagcacttacagtttgaaatgttcccttgtgagcacgaatgaagctcatttaaggtttcataatttttggaattttttaaaaaattttcaaggtttggctatttttgctcttgagaatttggtcgaattttccaaaaattcataactaacatcagggagggtcgatttagtctaaaaattgagaaaaaaagagaactttgtgactttttatcaggtttttctaacgtcaaaatgaagaataacattaattctattaaagaattaatttaggcaaatattatttgcgacggagataagctcggatgtactaatgtccctccaagaagaattttttcaaagaaagagctttttgctcgattgttgggcctcagcggtaatctctaattttaaatggttttagcgtaaaacaaaaatttataggcgctggcgttttcgagcagtttttcctcagaaagccggcagtattaaatgtcacggacaaaatagtagcaagaaaagtggcatttaaactggtttgttgcttaggaaagaagggattgcccgcccattaatgaaagagttcaattaccaatttttttggggggggggtgaaaattttatccaactctaaatcaatttattaaggccgaaatggagtgcaccagggtggcatctgactattttaaccccatgcatgatattaaagaaaagcctgagttgaaacgaagggaagaactcattgaattagcaagaagggaagtttttcaaagaaacggctgagacaaaaggcgcggaagaaaggagccaagaggaagaaggtgaactgaacggaatggaaggggcaaaaaggaaacgaaaattaagggaggaggtgactcatcgtccaattcatcggaaggagaggaggaggaggcgaacgaagaagaagagaagggacaaagtcgggagggagacgaatgatcgtgttggtttatgggactgcatttactcagtttattaaactcattatttatgagcaaatatatttttgtcactaatttgtctaacttacctattttgagttttttccccatatatctatatttttttctgtggtcttttattcatttaaatttcgtcggacttatttgttaggaaaatgccaaatttgctccaagttctgttcggaccggttgtttaccgcccatatcaacccaacctattggaatcgggcggtaacaagctgttcagcatcggtgctggtgcctacaacacttgtgttgtgctgtcgcccattctcgtgccgtacattgccttttcttggacccactcccatcacttttcttttgtcggtttgcatgtttccaattcagtcctctcacttttgtccctttttcagttgcgcttcgttttggtgttttatgccattgccttttccttccgaacgattggtcggctgacaaagtgagccaaccaaaattctcactgattgctcattttcgttgactgttcctcacttttgtccgtatttcagtgttgactacgtccgttttatcaaattgctcggaaccgtgcgcaaatctccgcagaatgtcactttgctcgacacactcaaagactacgattttcaagtgaatgtcccaccgttgctcttttctcatccctttccttattttcggtgtacgctgcgcccgctgattttaaagcatcgccaggccgaacggccaaatggcaccctccgcgtgaacgccttccggacttgaatcctccgctgaattttctgcgtcaggctatcgcgtggacggccgctaacacttttggacgtcgaatgcttttccctggttcgatggcacttttcaattcaatgttgaacagccaactggtcgatggacggcgcaaattgttgacagaaatggtgaatagaaatgagattagtttttggtttatcgtttttaatgaaaaattttctgtgtcttttttgagtctaaaattaaaacagagaaattcctaaaacatttggtcagttcct

SEQ ID NO: 5674 - DNA, 2225 bp, Heterodera glycines
tcttctgtcttcaagcctcctatttctttacttttagggttggaaacggaaagtcattgagacggaggatgggggcaaggtcgattcggtgttcatcgacaaacgcgggaagggcaagcatggcaacattttgatgtgagtctttgtatgtttttgcattttcttagcgtcgcgtttttcagcatttgctgtgaagggaatgctgggtattacgagatgggcatcatggtaagcgggcagcacgtctttccccccccccccccacggtcgtttgttgcatcgtttagctcaaattaacttttctatttcgtcatagcatatgcttccgtttacatatttttgcagtgataacaaacagacaaaacttttccgtatttttgcacatgtttatcgtttggtgaataaccttttgatgtcctccctttagtaaaatttttgtggaatgacggattggggggggggggggagaaacgtgcccttggaaagaaattcctcgcttaaatcctagtaaaccttcacttttcattcagtcaacacctgtgaacttaggctattctgcgttgggttggaatttgcctggtacgttttcccgccattttgtccgattcttttacccgtccgttcgtaggctttgccgaaagtaccggcactccattgcctcatacaattctcaattccatggaggcggtcatgcagttcgctgtaaagaatcttggcttccaaccgcaacagattgtgttgttcggctggtccatcggcggtaataatttgaaggccttttacccgagactttaaaaagcattccctcgtccaccgcttaaggatttgctgccacgtgggcagctgccaattatccacagatcaaagcgctgattctcgacgccagttttgacgacgtggtacctttggccagtgcccgcatgccagcggtgttagaagggttggtccgcttcgctgtgcggacccacttggatctgccggtcgccaaacaggtggtccaatgcttctgtcggttgcttttcctgaattacaactcacaaccagttacaacgctacgaaggtccggtgctgctcattcgacgttggaacgatgaaatcatcgccacggataccctcgctaaagacgatgccaccagacgcgcttcaaatcgaatcaatcatttgttggtcagtcttttgcgcagccgccacccgggccttctgaagacgaaggcggacgaaaagtgtgtgttcgaatggtaaaagttatgctcatgaacgcttcaattccatattttcttattgggtttaaaggctttcccacgaaccgcaagaacgtctttttgtctatccgccggaggattcgctggaaccgcaaactttgaacgacagtgaaatgaaaagtgaacaaagccgacacaggtgagttaaaatgggccattgggtatgaaatggggggacgattccgccgattggaacattgggcaactcatcaacacaaatttcattttgtttctttattaattaaaactttaaaggtttatccgacaactttgcaccaaatatttcttcgactttatgggcgccactcacaatgttgcgcttgacccgcagcactttaaaattccgacggctctctgaattgttccgatcgatctctgctcacttatttagaaattatctttaccatattgttgtttgattaaagcatatgtaataaattttaataacagaaatggatttccctgggttccacacaaagtgccatttgtcatggacttcgaaatgatttgttatggatttagaaacgatttgataaagcgtatccaatctttgcaaacaaattgaatgcatttcatgtggtcgtttgatcatttaatgtttttcatctgatcagacatagtaagccgttgaggagatcattattttactgttgctcccgaaaatgtccgacacaacacctgatttattgagtagagatcttctaaaagcgtttatgcccaaagtttcatccaaaacaaaaaatgagtcaaaaaagaagagaacaaaacgacaaacatgaaattatccaaaagaacataaagcaaagaaataagaagggaataaaacgagcaaaagtgacacaaaaataatttttctgattacatcacaaaaagttagcccaaaaaataaatagagttcccttcagaatatcgaatattggagaaaaagccgaaacaatgaaatcgagtcagcggcacatcaaa

SEQ ID NO: 5675 - DNA, 4224 bp, Heterodera glycines
  unsure (1)..(4224): unsure at all n locations
cgaacaaatgaaaatcggagtcagcggcacaatcaaacggagagcacacagacacaacggaagagaagggaaggaaggaagaggaaggcgaacgaacaacgaacagaatcagcagcaaaacggagggacacacgaagaactaaggctggttagaagctgaaagggacagcggaatcagtgaacaatcagtcagaagacggattagcagcgaacggagggaggcaaagaaaaccaaaggcaaatgggaaaagcactgaccgttcacagggcgagcagtgccatagtgctgaccaggacggatgggtttcgctgaaaagaaaattgattatcccagtggaaagggacaaaaaaggatggcacaccaatttgcagccccctcctggccaaattcctctgtcggaccgcctctttgatccgctccacttcgtactggtacttcttgcggtccttcatcgcgttctctttggtctctcggagggcgacctccaggcttttgatgcgttctgaactcgcacggtatcgcttctccaattttggcaactcgcagcggagttcggcgttgtcgcggacgagctgaacagaaaagggaacggttgttcaaattccatccaaatgaatgttccacctgtttgtgcacactggtcaactgctccaagttgttctccaggaagatgatcttctgcttttggatcggacttgacaagaattcttcgtcgccctcgggtccggtcggcgtctttttcatgcgctgtgccaagtcttgcacgaatactttgcgcaaattgtgcaaagtttgcaattccttgttcaccgtctcttccaacccttaatcattacggattattcaattcgtttactctctcatcgcatgccaaattacccttcaaatcctgcttcgcctgttctcttttgtcagaaagtgcggacagtgacttcaggcgcttctccttttcagtctcgtcatttttaaggcgttcaaagtcttgctggagctgttcacgagacagctccagctcttgcaaagattcctaaattagtccaataaagtgacgcctttattttcaatgccaaaattcaccgtcaactgtttgatctgactgttcttcagtgcgatctggtccctgagctgcatcaccagcttctgatgctgctgctgcagttcgctgttgtcgtcggccgagtccgaatttttcgcgtttgccaacttcgcgttgagtccgtccaattcgttctccaactgtcttttctgcttttcctgcccatcgatcgtttcccgtagtgatttgttcttggcgtccatttgttggatttgcaatcgacagtccgccaattctttcgtcacgtcgtccaactttttcatcgtgtcgtcagtgcccgtctccaacaaacttagtttctgaaatattttttgtaaaaagtgcaccaaaagtcaaaaggtggtacctgtcgattggccctgaagtcgctggcgagttttgaaatggaaattctcgcgtgggtaagcgtttcgtcgtcgatcggtttgtttttgtccgcaagatcagtttgcatctgtcagtgaagggaagttgtagtttttttaaaataaattaccttttccgaaaaggcgaaattggtctcgcccaagtcggccatttctttgaccatactttgaatgctatcgtaaacacgtttctaaaattgcgaagtgaaaaataaaaagcaaagtaaaatcgggagaagaggcaccttttgtgacacacaaagttcacgcatttcttccaatttggtgttgatcaaagtcgactcgaggtttttcttggagatgtcgtcagcaagtcgttctggtcaaatgagtcaaaagcattaattataaggaatgagaaacaacaaccattgtctgtcaccagttgagtacactctgcctttttctgatcaagattcagtgcgagttcttggatggccgagaacaactcctccccttcctcatgggttttgttgacttgctctaaaatgattaaattgaaaaagataaaatgcaaaaatgaatccatggtgaggaattagttacaatagatgccaaacatccatggttcgaagtgaatatgcaaactcaaaaaaggggcaaaccctgtgccttctgcaactctgccatcagcgtgtctttgtcctgcctttgctgtttgatttccttctcttgctccatcagttgctgcttcaaactttccgccatttgcgactgcacttggatttcgtcgtccttctcgtccaattgggcgtacagtttggaccgttcctcctcgtatttgcgcctctcttcgtccacaatgggcccttcgcgagaggacagcaacggctgctgagtggtggacggtggttcggagaaggtggccatcgaatcggtcatcattgacggagtcactgaacaattgccatttaaacaatcgaaaatgcctgccacggaaaatgagaaatgctttgcccactcgtgtccgtctgctgcatgttcgctgataagtccgcccagtccgactcgctcactctgtcgcccgccctccacctgcgcagctcctgctccatttgctgtgcttgctggcgcagtcgcgtcaccttctcccngtctcgctcgtaccgccgcttccattcctcggccgtcagttcctcgttcacaaccacaacatttttaatggttttggcccttaatggacggccaatttagtaattattattttatttgtattccccgagctgacctttgtccgaaaagcagcgtcgactttgtctccccttcgttgtatgaagcgggagaacaacaaatcacaatggtcgtccgcgaattgccacccaacgattcttgcaaaatgcgcgtcagtttgctgtcacggtacggcacgtggcttttctggagtttatttcgtaaattttcatttttgacgtgtaaaatgaaccgttccctccgccagtgcggagatgacattgcccagtgcggacagtgacttgttgatgttcttcgcctcttccagcaccgctccttctgcacccgttttgctaaccttaaatccacctaataaagttaaaaattcgacaattgtgtcagccgaccttttcactaccagccaaatccaccaaatacaattttccggtcagttttttcagcgttgttttgttgtcctgctgcacctgtatttggaatacgctgtgcgatcgtgaagaatgctcgttcatgtctgaaattggcctgtcattccgatttccccgaatttcactcactcgtcaccgccacttgtcggttcgtctttccttcttcgatgtaagccaacacttcgtctgggtttgtcacaaacatttcagtgatattcttcacaaatggaattcggtttttgtcctcgtgaattgccaaatttgttttggtaatatccaaaaggtcgcgaatccgttcgttgtaaatttcgaagtaagacactttgatcagaaattccatttcggtgtccacctggaaaataaataattaccaccatttaatgtcggaaaggagggagattgcaatgaaaaataaatttagcagctgctcacaaaattgtagatatgagtgaatatgtcgttgacaatgcgtggaattatgccctgtttctcggagtcgccaataacaccctaaaagagccaaaaggatcgtaaattttccgaattagttttgtaaaacctccatagtgtgcgttttgcccgacgaagtctgtccataggcaaaaattgtcccgttgtacccggtgagtacgtcctgcacaatgtgtcgggcggcagtgctgtacacggcctcttggttggaacttggctcgaacacatggtcataggcgtacggttttcccttggaatgccgctttgaacagaaattatcggtttgtaaataccccaacgacgatggtgtctttggactgaaacttgacgatatttgtggagctgttcttcttctcgctctcattcaaaggccgaacccgacaaaaaaccttgaattggaaaagatttgaaaaaaacatttaaataaacgaaggaacgacctgtatacaacattctgaagccatggaaagaagagagaaggggaataaggagaaacaaaataagtttgtggcttaattcgcaagaaatcttagaatttgagtgtttactgcttatgatttatgatgcatttacataaacaacacgaaatacatatatgtaattttaagtcaaataagaatatgcaattgaggt

SEQ ID NO: 5676 - DNA, 1502 bp, Heterodera glycines
atctgactctcatttcggtgagcagaagacaccgaaagtaactcccacagataagaaaatctgtggctgttacataaaaaagaatggtgttgtgagccattcagttttttccattcgtattaatcgaatggacaataaatgggaagaaactcttcctaatcgaacagagcaatcaatcatagcattgacgctttgtttttacatcagcataagcctgatggttctctcaattttaaaagccctttctattgggcgtaaaaccattgcttggctaatgatccaactcaaagtatcattactttcttttgaggatcagagcacgccttgctttcaagaaggaaggcaaagaggggcaatccctcaattttgtacagcgcgccatattttgcaaataatggcgtttactgtaattttagcatgtttgttccctcttcccgttaaggggggaacagaaacaaatgcttatccaaccaatcaatgcaatgagtgcaaacttctttgctttaacaaaggcgttaaagcaaagattccaaaagaaatcaataaagttgagctctgctgtgcagagaactgttacattcatgagaatgtaaagcagctcacttacgagctaccaaaggaaatcctcctaaatgacttccaatgtgaaggtcatttttggatggattcgaaacacatgttcaaaaaggacattttatgtccagcagttgatgagtgcgaactcatcgaatgctatttttgcattgaacagttagcgaatccaacctgttacccattgatttcatcaatgttagcagggggactttgcttatcactcactcataagcattagctttatggctttttccatattaaaagtcctgttttcaggattttatatggtcatttggctgataattcaatttatcaggccaataatttacttagctggcccaaatcggcttccgaaagagaggaggccaagggcaacagcttctcaaaattggacatcacgccgtgtttacagaacaatggcgtttgttgtccttatggctaactctctccagaatttgactggagcagagaccatagcagtcatggccaaatcggaaaaatgcattaaaaatgcgacaagcatgagatgcattgtcgaaaactcagcaatgctgacgttgctgccagttggccaaacaaacactcttcttctgaaaacagaggaaggtgttctccttggctcaattaacgttttgctgaaggctttagctttggaatgccaaagcttcactaaagcctggcaacgttcatacgcaattaatgtgttggccggtaaaaggtgccctaagatgggatcctgtgaaggaaagtattgtagcgaagttcgccacaatacttccattcctgagctaaaagatgccaacgattttccgggcgattcgttttgcctggacggcacggccttttggggcgacgggtgccgcggtgagggtagtgcgtgccttttttatcgttggtatgctcaggaa

SEQ ID NO: 5677 - DNA, 2734 bp, Heterodera glycines
atcatggggctgtaattcctagggaatttattgtctatacaataattacgcctaggaaactttagggcgaaaaacccaagtcaactcaggtgtttctttatccaggaagaaccctgagatggaacaacatcagccttactccgatcggagtaacctttccgcccgcccccgtcttaaactcagattttgtttatgacgggagcaacatggctctaaccagagagccattaacaattgactttaactgtaaaagtcggcaagaagcaattgatttcaattgcagtcttggagttcaggcatgcactgattgcatacctgaccattcatcaggtttagtgaactgcaattgccgttcacataaccttgaaaagttaatggaaagtccagagaggagacttccattaaacatcaaaaattaccaactcagaaatactgggagaaaggtaattgccttgacaggatttagtcctgtccaattaaaccttcaaatcgaaggtctccaaatggctttggaacttcaccaaagcctttgcacaattttgccgttgaacatatctgggtgttacagatgttaaacgggagcacaattccgttatgtgtgctcgacaaattttggcaattctcttgccgaaattaaatgcgatgatggaacacatttttcgacaaaatgtgattccaacgcatcaatttaccagacaattttggcttttgataaagccagaattgacacaaaatgccaaacaaaatgtttggctggaaatacttcttttgttctaaaagggacattacactatgtccagcccgaacaaatagaagattacagtccaaatcactccgaaagagtgataaacagccaatccagttggccgaactggaattttgattggaaggcgaccctttggtctttgattggcatccaatcatcagttgccttcataatgattatttgtgtaggcattgtttgcctaacaattttcattaaactttctcctttctatagactttggaaattaatttcctggtctttaacgagaaagggttatggtaatgtgcctacagtattggcaatactgtacttggccgggggaggatccttcggatgtggtgttgaatcacgtcctatcccctcggcattcaaaagattttgtgagtcacccctcgttcaggggaatgattcatctcttccattgaatggtggtataaaagggtggcggatttgccacccaaccacactcttcaaatcatccttccacggaatgcctattcccatacgagaagggccttatttctcggctcgccgggtggtcatacccgaaaattccgaggtcttcaatgatcgcctttacggacttggcgatccacgatctgaagaggaggagagagttcctcgctggcaggaacctcctattcctcgccaaattgagtcattgagctcatggattgagcggtcttatggaccgcattggtatgaaacagcacgggagcgccgtgctgtcgaagcccgccttcgcggagaacttcgcgaaggggccaatctcttaggagaacattttggcagaattgccgagatccattttgatggattcacctgttatggtccggagggtctcttcatctctccgggcataacacttttcgatcattttgtacggttgggtcttcaagtagacccagtaaaaccgtgcatacaagaatatatagggtttagccctcgcgagcaagggatgctgcttgtcgacatttatccgatcgaactggtcaacatccgaaccagaatcggagttgcttggagagcgccagcagttttggaggaacctcgccctcctccacgtgaccaagcacagctaccagatggacgtttggagaatcgtcctcctagggtggctcgtcgacttccaaaccgacgatgaaaagaattttggcaacgggacggcaacagttgccgccatcctcgaggcccggagaatgtcgccaaaagcgacacaaatttcttggaaattttcatttattttttgatacttttcgtcgatcaattttcccattcgctcgctccttttttatgactcagctctttttctcttcatttttcactatgagtcaccatttttaatggatttttgtccatctgtttgtgcacatttttcacgtgcctggccccgcccccatcgattgtgagggtataaaagcccggcccattctccattttcttcactgatcactttttgattaagtcagtcgggacagttttctgtccaagcatttgcattaaattgtaattgtgcaattgaattgaataaagattaagaaagagtcttagtcttttctctatctgtaaaagggacgctcaggagccctttcatacagatcattaagccattgacccccgttgggtcaaagaaaaggcttacaaaaggaaaggagaagcattttcctcctttcaaattgtcccttcagtaaaggagaggaatttcctcctttaatttatccctttggactctgtgagtttgtcttttggacagaaattcgctttgcttaaaagactccccccttctgccgggagagtctgcttccccttctgccgggaagtgcaaatttttgtggccctttgcccacaaaattagacaatttttccattttgaaaacagtacaatttcgtcggtatttttcttttttgtgtgaatctcttttatagccccccccccccccccctccattaaaaacaaaaaaaccgaaa

SEQ ID NO: 5678 - DNA, 2068 bp, Heterodera glycines
ttttggtgctgatatgaagctgaactacctaggttaaattttcgggaaaaaataattggctgactaatgtttagcaaatttttcacaaatttggcttctttttcaggcttttcggaaaagtctttaataaaaactcaataaaaattaaaaatacacccctaagaatcgacctgaaaaaatttcagaaaatacacccaaaaaaagcgaaaaaaatttccaaaaagatcaaacaaaatttcgttaattcccacaaaaccgaacaccgccggaatatttggaataaaataaataaattatagaaatttgaattattattgcggagatcagatgttgtttaacaaaataaatttatcagacaattttgtataagtcttcgtattaaattttaaaaaacggtgtccaattaccctcttcaaaatattttgtcacttaatgcgatttccttttttgcctaaatgctttttttgtcacatttcagctcttgggtcgtcccattgcctattttgtgtgcgaatcgaatggaaacgcggagaattttcaaatttcactgcttaaacatttcctacttcaaattgagccgccccttccgaaggaggaggagaatgtttactttgttgaggtgcaatgccacggcttcaaaccgcacacattcaaaacaatcaccagggccaagacggacgtggtgctgcaccaactcagctgcaaaacctacgacatttcggtgcgcaaagtgccgttggaatggatccggcgactgaaataccatggggtaagcagaaggccgttagggaagcgacgtggggcgatcagagaacggaatttctaaaaattcctggaccaggatcctgggaaaaccctgccaagacccggcactgttcagattaatgggtaaataaggcaaatttttcagtttttgctccatttgttatgaaatttaaatgaaattttttggggaaagattttggttatgaaaatgtttcttcagcgaattacctattttaatatacatttaaaaaagagcaatttttcgtgtattaattgtagttattgtatttcctcaattatatgccccccctcgattatatttttattggttgtgctccaaacactgggtcattaatttcattgaaaatcctttaaatcttttggaattttccttggaaagcattttagttataaaagtatttcttgaacgaattacgtattttaatttttatttaatatttcatgtattaattgtacatgcgaatattaatatgctttacaaattaagtataacggaatgatccattcaacaaaaccgtttcatcaattggatattaatattacgatgggcgcgacttatgtgttggaatttccggcaagatttcagcggccgaaacaagtcaattatagggtaaaaaaaaattttactttttggcactttctcattagtgacgaggcgagggaccggcacggagttacccccccccccccgcttttccccgggaattttttttaaattaggagaaaggtgaaaaaatgcaataattaaaaaataaatgaatttccaattacggaaacccgtgaaccgtgattgtaaaaaaaaatttctgaatgatttttttatttaaatttattaacaaaaaacggaattttaatcgctggaaaaataaacaataaacgctttttttgcggcatgctttttccaaaaaacttttcgagtacagggggcagaacaggtggtgccaataggcgccgtcgggaaaaaaatttgtatttttaatgcgctttgtaagcagattttttccaaaaaaggaccaaatttatgtttgagccaattttttgaggaaaataaagggctaattttttgccattttggggttaaagtttcaaagaaataagttaaaagggggtccaggcgccgccgtgaaaatttttgaaattttgagtgaatttattaacagattttgtcaaaaaatgtccaatcatttgttaatttatgggtttaatgctgttttaaaaaataacgaaaaaaatctaatggaaaaaaagatttattttaattaaatttcattaaagttattta

SEQ ID NO: 5679 - DNA, 998 bp, Heterodera glycines
  unsure (1)..(998): unsure at all n locations
ctaatgcgaaacgaatcggttcgctcgagtccaaaatttctggtcgagccgagagggcttttaaggcggcgtgctcaacggagccatttcgctgtgagattattaaacgtgaaatgctacgacagcttgaagaaaccgatgcacgtgagtggaatgcttttgaccaactgatgtcaggcattcgacgaaaaaacggtgaaaatttgcacgatttggcggacgagtgatcactctagtgcgacgttcatatccggggctgactgatcatctcgtggacgattatgcaatcaaacatttcatacggacgattgatagctctgaattagcattgagcttggaaatgggacgaaaacccgggatgacttttgatcaatttgttggaatggcggcacgagccgaggccacacaaagagcaactcgtcggatgattccaactaatggcacatttagaagtaataccggaccaaccaatttcaacaatttcgattcgacggacagagctcgacaaaacgaatatcgccctaaatgttctttttgtggacgagaaggacatttgtcaagaaattgcttccgaagaccgacagaagagggttatcaagcgcggaatcatgagcaaatgatgaatggaacaggtgcaaacaaaactccgttgtcaccgcaccaaaaccaacattttgtccgtaaaacggaacaaaacaatttcaaccaaaatgctagaattttttcaaaaattatgggcagaacacgacggagattcgacacataatgaaaaggaaacatcaccaattgggaaaataatggcaatcaatgtcaagatttttgaccaatcagcaccatcgatgctggatggaggcgcacaagtttcactgatcaaagccgattttctcaaagaaatttttgaaaaggaaaatttggacactgaaaattttaaaattagtccgaaatctcanaatatcgttgacattaatggtaaacgagtncgatggtatggagtgatc

SEQ ID NO: 5680 - DNA, 4403 bp, Heterodera glycines
  unsure (1)..(4403): unsure at all n locations
aacgattgttanatggattaaaaaatatttttgccgtcgatgacagtgaactgactcagcaagcccaattgtgatcgttccaaaaaaggacggatcattaagattttgcgtcgactacaggggtctaaatgctataacccgtaaagactgctttcctctcccgaatatcgagcgaacacttttgatgttaggtggacgaaagtttttctctactttggactttctttccggctactggcaaataaaaatggccaatgattcaatcgaaaaaacggcgtttgcaaccgaattcggcttgcatgagttcacagttatgccatttggcttatgtaatgcggttgcaacttttcagcgctttatgtcgcatttattaggtgacaagctgaataattttgttttcgtctatgttgacgatgttcttgttgcgtctgagtcctttgatcagcatttagagcacctcaaatttgtgtttcaacaaatcaatgaagcgggcctaaaactaaaaatttcaaaatgccatttttgtgcagagcaactgccatttctgggtcatattcttacacgtgaaggaataaaaatggacgaggaaaaagttaagccaattctagaaatgccaatccctgtctctaagaaagaacttcattcctttttgggtttcatgacatattaccgaaaatttatctattcgttcggttccatcgctgctccactttttcagctcttgaagaaagacatcccatttcgtatgggtaaaactgaaattgcagcaatttccaaattaaaggaaaaagtcttaagtgaagttatcctttattttcctgattttaaagctgccatggaaaacccatcacggaaattcttaataatgaccgatgcatgtaagaccgggatttcggctgttcttttccaaccggatttgaaaaaccgaattcgcccaatttattttgcgtctaggcaatgcaacagatacgaatcgcgctactgtccaacagaattagaagctttggcggtcagatttggcgtcaaaaaatttgcgcaatatatcacgatgattcccactcgagtgctcactgatcacaaagcgctaatttcaatgtttagaagtaaaaatgagacaggaaatgcacgcgtggataaatggatttagaattaaattcacgatttattttggaaatcgaatacaatcccgggaaaacaaatgtaatcgcagatgttctttcccgttcgggagcattaaaacaaaatcagtccgcagaaaatgcaattttgatcggagaaattttgccaggaacgatcaatgtgaaattgaaccccaggcagaaatgaatgagtggattttgtcaacgaaagaaagtgaattccgccaaacttatgaatttttggaaaagcgaaaactgcctcaaaacataagggaatcgcaaagaattttggacaccatccaaaaatttactttgttaaacggtcttctttatttctgcgattcaacttttgaaaatcttcgcctttttgtaccactcgagcaaaaatcattgaagaaaggcaccaaggaaaatgcgccggtcacttaagcggaaagaaaatatttgagcaaatctctgaaaaatttagaaaatttaatttttactgagattaagaattttgaccatgaaaatttgtgggaaatttcattggaatcatcagggacgatgaaatttttagacgatggggagaaaatggacaccagcgaagcgaagatcagttggacagccacatgcgagagtggggagcatattatatgcaaaaaactccttgtcggcgacattgaccccgtcctcaccaaaactgatggcattggagcgatatcgccttgttcgaaatgcctgaagctgaccgaattgtgtggaaaaaactttttgattgtggcagctgggccctcgaaaaagttcgtgcaatggcgatccatggaaagacgactttggttgatcagccacgagtgataattggcgattcaagcggtgcgcagctctgtggtgacgcaaaaaaccaaattgcagcacactttatcgggacggtcaatggggcgctgggcgacgtgatcagaacgttgaacaagacgattctgacctcaaaagtggtgtcagcgctgatcattttgggccgtgacgcgttgttgcgaggagagaccattgaacaaatcacgggggaatgcgcgaggatcaaggcactctgcgctcaattcaaacatgtgcgcttcatatggttgccgccaccatttgttcgtgaacatcatggacagtacaatgagcttttgccggcattggaaagtgttgctgctgaatggttcgtagcgatgacagtgaacggaagaagcttaattgagatatggagatttggggactctttcgacatgtcacgggtgaaggccgacggaagaatgctgccggagggcttaaaatgcctcagagcctggatttttacgcaagtgccggagtttcccgatgatcagtctcttggtctccgccgctctttccgttccattccatctgtctctcatcaattgtcgaatctgtctcttaatcgctctcacaatgctcgcgttcatccttacgccgttcgctattcacctcataattctcgggaccctaggggtgggaaggagtattcctctcgccgccgccattaagccaggatgacctttgcaccaccttctcggatgccgaattgccaatctatttttttatgttaagccgaggggaccgtcttttgagagggcggggatgtggtattggatttatttggacccttctttttatttttatatttgattggcgttttgtttatttgaaatgacctcaattcttttgatttgatgatggtgattattattttttttgctggtgattattcggtaattgtggatattaattttggccgtggatttttaattattggattttctttcgtttgtgctttgtcttttatttggaattgttttttattattcttgttcacataaattattttctttgtcgtgtttattctaaagcaggtattctccgattctcagacattttccaatttggtcttctcgcattgtgttaaaattaataccaaaagaagaagaattggtttgactttccaacatggcgctcctggacgacaaaggtctggctttatggcattttcaattgaagggaaacatcggtcgtaaaatttgttgtgaaaaatccaaacaaaaaatttttgacaaccctcgtgttgggttgactccattcggatttttgtccgagcttacaactttcttctcgccaaaagcactcgtgttgtgcttcgccaaattgaattttttttgtaaaaagctcgtgctgctttaaatttggaaattctcaatttatctcgtgttgaccaggactcttccaaacagttctccgcgtcggcaattttacttggctcttctgccactgcaatttcttagttttccttcaaaattaccgctttttccgaaaaatttgtgattgctgccataatttttgcgtttctgcccgtactcagtgcaggttcgactcttacgctgttgtcttcgtcatttgcaatgatgagcacatttgtatcattaaaaatgggtggaacagaaagttcaacaaacttggttgaaaacggttcaaccactgtgttgtaaacgacacgaaccgaatccgatttattgtttgaacattcaaattcaatcaattcaccatttggggcaccgaaaagtttgaaaccaagaggccctaaagcattggttccgaataaaatgggtaggccaataggggcatacgtgatatggaaatcgatttccatttcttcgcaaccttttctgaggacaggaagtgagacagttccataacattcgacgagttttccatttacgtccaccacattccgtgatttggggcaaatgttaatacttttaccctttaggcctaggcgctttaaaatttcccttagaaattcggccttaataagcgaaacttgggccccgctgtccaacatcgaaggggttgtttggccaaaaatttcaacaataatggcgacaattttcccgattgttgaagtctcagctttactctcttcctcattttcgcatttggcccaaaattttttgaagaattccagcatttctgagtcgctgctcatgacggctccgcatttgaaaacatcttcatctttcacttcgttctgttccaccaactaattctgtttcagaaaattgcgtgattgcggaagttgtgagcgattttgactggcaaaatttagctctggttttcgcgcaacgctggtgttctgatttatgggcattggcgtccggtttgcacccgttgcattttgagatgcttcatagtttcggttttggccactttgctcagctcttggtctgaagcaat

SEQ ID NO: 5681 - DNA, 4178 bp, Heterodera glycines
ttcccgatgacgagctatttgtcgcatttgttgaagacgtttcaattttgagaaccattgcattgaaacggaacgccagaatttgttggcgcacgtcggattactatcaaagcgaaagggcaaaggcaggtacgatattggagagaccgtacggtatttgaaactacagtatgaagcataccttggcgttgtgcatttgttgaaaaagaaatggaattgtgagaaaatgcaagatcctatgttaagagaatgcaaaaaatttaaagaatatttgcttgttttatatgaatttttgttcaggaaataccttgaaggtaagtaagaaatttttcttaaatgccaaaaaatccaaaatttcgctatttttttcatacataatttgtgtattttttataaattataattttgatatttttgagatttatagaaatttcttatgagatttaaaaaaaatttttcaaaaaatataattttttatttacatattttggtacatattgggagatttacgtatatattcctatttttttacatttttacttaatattttatggtttttcttaattataaaatttacatccctaattattagttaattgtccatcgttccaattcgccaccacagtacaaccaatttttgtacttggaaacagcaaaacaaatgcgacaataattgacgttttggacagtcttggcattatttgggcattcttttttgattatgcgtatggccaaaaatatgagaattacttggaaaagttattcaaagaaaaggcagcagcagaaccaaaatggttgaacgaagaaacaattgggcataaaattgtgaacaatttacaacaaattaccaaatatggcgcagattttaagcaaatctttgggagagaaaaaccagataaaattgacgatgagcttaagcaaagtttattaattgatgatgctacaaatcagcattcttcaaaggcaaattcagacaaagcaattcagtcattccgtgaagcatttgatggcataatcaaatcgatggcggaaacggcaaaaaccatggaggaatcggaggaaggatttggcaaaactaaaaaaatttgcgttatctattcctttgagatcatttcgagaattatttctttctctatgctttccaatcgtgagtggaaaacctgctgattttacgcaagccgatttttcatatttttttttgcgtgggatttcttgaaaatccggaaaattcagaatcaactattcttctgtccaaacaaattggcctttaacatgttaaaaatgaaaaatcgaatttatgaaacccaaaataatcgggtattgaagaaaaaatcaattccgctcactgtttttaaactttctcaaattttcttacattgttatacccttttttttcacttttcgggggggtcatcagcagggatgcaaaaaatatgcaaatgtatatttttttcctggagggggggggggggggcttctaatttagaggggtgggttctaaaacgaggtaagtacggtaaacaaatgaatttttgttaaattttcttttgttagtttattgttattctacattttttagcgaaatggataaaaaatgagactttttgagaaattcacttattttttgaacaatttttttttcaatttttggcacatattttggccttttttgggcttttttgcacctattttggggttttttttggcacatatatatgtacatatttgacgttttttagcacatataaatccgttccctgatgataatgaatccgcgagatttgaaaattttcgacaaatacattaaaaacaaaaattaataatataaaatttattacattttaaatatgaaattctctgcaacaagtgattaatactattctttatcacgtaaaatttttttttatatacacataatataaattttattacgaacattaaacaagagtttttggggtccggcggtcgataggcgccgccgggaaaattttttaaaacttggttgcaaattgttaacaggttttcatcaaaaaatttagcctttttgttagagtccgtgcctgggattcaaaataggtcgaaatggatattatattcgttattagcgacccagaaaacctcatacataaggcatgtttttacaactttttaaaattttaaaaacttttttcaaggaagctgtgataccatctaaactattaccaaaatgagggagggttgcgcgacaaatttcccattgcatcttcctttactttattttactctcgtttctttccccattgtcattgactctcccttattgaatccgcgatgcgcgatccgcggaatttttgaatccgtggcaattttggataaaatttttaaaaagaaaaatatattgaagcgattgttttatatttaaaattatttaaacgacggtgggggtcggtttagtctggccgttttagtctggccggtttagtcagagggtcggtttagtctggccggtttagtcagagggtcgttttagtctggcaagctgtttttgtcctacattgatccaattctgatttgtttctcgaaaattctttaaaattaacaccataacagatttatcaatgtgttaacaacaaaaaaataacaaaacattgaaaatattacgggcgcatctcataattccgagaaataccaaggagaaaattgatgatgttataggggttaacattgataagggcatggtaattgtgatcattttggtgagcctggttattgttgatggcattgtagctctgcaagagtcgaagaattctcgcatcggcggcacgatatttgggcgccttttgaggagggagttcaccagcgatgcatcgggcgatgtctgcatcaattgatttttgctcacatcgaattgtgttgatgaagcggaagacagttggatgtgtacaatcaaatgcccgttgaagttttctatggtatgcttctgcgtaattgttggttctgtctcctccatccaacgtccgttgatgcacactccattcatccggtgcgaaccgaggcgctgtcaaaccaccattgaaccgcggccttccggtgtaattgtccgtgaacctttaaaaaatattgttgattttccattcctaaaaattcaccaatcgaagacgccaataagctgttgagggagttgtgcctccaaagcattgaggacagcaggaagatggtggacaggaagaaaagccatagatgtgatcattttgctcttttcagcaaatacggcgtcgttgttgtacgtcttaatatgaaaaattttattggggaaaattgtaacaatgcaatacctgtgttaaaccctctgaagcaattcgcttcttcatacttctcaccaagtgaaaaaagcagaattgcacacgacaaagtggaaagactgtgcggacagtagcgaccatcgcttgctcgaagtccaacgatatggtgtcaggtgcaaaatttggccatctttggacaatcagttgaagcatccgtgtgtatatcacttcacattttgaagtgagaaggcagtacgcaatcggaaaaccccatttatcacgcctaaaaagaccaaaaaaaagtggtaaaaaattaaggttttactttgcaaggagaacataaatttgactgaacaaaggcggcgccaaactgaaagtgccatctgcgtatacatttttcataataccggcccattccgaagtcgaagcgcgagcaaatatcaaaattcttaacatggaattttttaaaaattaatgggtttattatttttacctttgcggtccagcctgtccctgaatttgaaaaacgccggtgtccgccaataagaaattctcctcgtcaatctctgttcgattgtacattctgtacgcgggcggcaattccaatgcttccaaactgagtggtgcagcaggtggtacatcttcgtcatggcgaacacgttttataacctaaaataaatgaacaaatcatactttggcagaaaaattcgtaaaagttgaccttttttgtcgctgctttggtaggaaaaacagccaacacgggggatgctgtgttctgcaacacttgcgcacggattgttgcaggcgcttcgcacgtgtcaacttgcacaccgcttgagctgggtcaaccgcctctgacactccactggccggggctcatgtcccatggatggcttc

SEQ ID NO: 5682 - DNA, 2323 bp, Heterodera glycines
ttttcaacatttttggccataatttttttgaaaccccttccaattttttgaaatgcaggataatagaggacacataggtctatcgaataatagcaagaaaataaaaataagaataattttaactaaaattttttaattaaaaatataattattttgatcatcaaaaattctgaccaaaaccaggattccaaatgtctgaatgaatgcatagtataaaagggagttgtttcagcatttctggcgaaagcggaaatgtttttgaaacatttaaaatttgtttctttttaagcggcactttaaacaaccaaatttggcttgacacgttggcatggcttggacgtggagaggtcggcttgtacatggcgctggtcaacgcccgcttcttgcacatctctgagcgcgaaccgatagggacaggcgccgaaacgatgatcgtgaacagcgacggctcccgcttcccgtcgccactgcccacagcacagttgccggaaaatgtcgtcggcttcaacagcatcaacattcggtcgacatttcttcaacaatttcacaatttaatttaaattgttccccatttttgcaggtatttcgacggtgaagtgatcattttcctgcaccgaattcgccgcctcttctccacggacgtctctctgcagttcaacattcggccgacggaatctcgagcttggaaaacgatggcacgtcacatttggcccctgctgaagaacggactcatcattctggtcaacatgaagcggacgcacctcgccaggatgcacaaatacgtgtcgccgatcgtcctgttcgattgcccagaacttgtccaaatcagcagcactgttttgcccgagagtccgaccacttacagcacgtcgcctgacttctcaacccgttgcctgtacaattggctgtacacgccgcgcccagatggtcgtccgctggtgttcaaattgaccaaatgggaagcgggatgggagaacttcgtcaacgatttgttcgcggtgggtgtggggtgggtgatgatcgacggatggattttttcgttctgatcaaattttccgcttttagtccttcagtcgtgcgatcgtcccggtcaagtacatggtgctcgcttcgttcgacgtcaactacacccggagtgaacaaatggttaacactctgacggaggaaaagctgacgctgtcgagcgatgtgcatccaacgccggatggtggttttgtgtcatctgtgaagattctacgttgtccagcggagttcacggaagcgaacgtgatgtcctggttgcgtctgccgcgtgtggccggcgaatggcacccgaatttggtgaccattggcttctcagatgacgaaattgggtatggacgagttgaacaaatttaagattcagtgttcttatttccttcattttcagaccgatgccttcgaacagaggaaccgatcgggctgagaactgagaaggataactgcggatcaacaacagatgagccctaagcacaatggccatcgaatgaaattatctctgatcattatcactcaaaaatatattgtatttgacttgctaaaggaagtaaagcaccgaacaatgctgtatttggcatcatgtagattgtggtccctccgcctacccatgattcgtcgggacccatgcgtttcggcgccagctcgtttttccactacagcttttttctatggcatctaaatccaacattttggtatcattcgaaagctcttaacatgctctattatccttaccaaaagcgaaaagattttgaagcctggaaaaaattttaagtaaaaacttcagaaatttcgatttttcgcaattttcggtagttgtctaatcgcgaacaatagcttagaaaaagcttctaaacatgttaagatttcgagtgatatcaaaaatttctatttggttgacaaagaaaaaaatatataaccagggaacggatttttaggttttcaactattttttttgcggatagcatatgctgagataagcgcaaaaacggcgacatgatgtttggtcaccaggaagtttgtgcaccagaaatttgggcaccgggaagtttgggcaccagaggggtgtccacctcgtttcggcgccgctcgttttggcgccagcccagtttttggactataacttttttctttttccgccaaatctaacattgttggtatcattcgagagcccttctgatgctctattattttgcataattctaaaaaatttgatcaattttgaacaaagttatggtcaaaagtacacatatggactggttttttgatttcttctactattatttttttgagcattgactgaaatttt

SEQ ID NO: 5683 - DNA, 2569 bp, Heterodera glycines
aaataaaatctcgaattctcaaaaagcaaacatttaaaatgaatttttttgtcagaaaaacgaaaaattctttaatttttgttttttaaataaacttcagaaatatcaaaaatatatttcaataatgagaaaaaaaaatttattttctagcgaaaaaaattctgattggaaatttgcaaagttttcggtgcacgaattggccaatttactcgcttaacccaaggaaagggaaatgcgcaaatggatactgtatttttaattggtacagtagggccgtaaaattgtttatcggcccaactttgcacttttcgtaaacattcacgcggaaaaacatggactaatgaagcatttaatgattagggttataagttgtgaaatgaagcatttaatgattagggttattagttgtgaaatgaagcatataatgacggttattagttgtgaaatgaagcatttaatgacggttataagttttatactttttttttctttgcatttaaaaagtgattttttgtgtttaaattatttggtttggttaaagtttttgtccgtataaatccattagagctcgacattttgaaaaaagcctggacctggatttcatgaacaaaaacccagaatatttattattattattattattgtttttaaatatatttaatctttttgataacttgccataaaaggggtactcaaaaaaacaaattggaaaatattatccaggaaacccagagttggacttgctttttctggataaaaacccagaaaaatccaggcccaggacaaacccagtttgccgaaaaatagcctggcctggaactaagcctaatacaccgcctaagaattgaattttttgaatttttaaaaatacaaaaataattcgctttcaaggaagtaaaaaatgctggtccagggttcgaaaaatggccaggtgcaaatgccatcctgggaaaacaacatctcaaaatcgcaaattataaaatggtggttattcgtaaaaaaatcacttaaaattaatatcagaaatttaattttaaaaacaattgaatttttctttataaatgttgagcgtttcaaccgcacaagacctttccaaacaatttcattgtttattgctttaaaataaaaaaagaaatttctattttagcaaaaatgggtacgttccaaaattaaaaattttaagattgcttaattgctgatacatttttcaaatgtcaacgaataacgaggtaaaaggtgaaatatttaattttaaggacaattcaggggaaagggtcatttcggcgccaacccaaaaataaaaacacacaataaagggttttaaaggacggtgaatcagattatgacacccatttcgaaccccgaacccggactcgtacgaaaactcgaaaattcaattttcaaaaaatccacatttatgcaacaaaaacggttagacctagttcgacccaaaaactcaaaaatttaactattcgaccttttgttcgaatccaggttcgggattagaaattggtcgaaatgaatgctatatccgtgatcagtgacctcgaaaacccctgcatacttgttttcaggacttttaaaccaaaaaaaaaagtttgaaaaaaatttgacaaaaaatatggacccaaataggcatagtacccaattttcgttaaaaaaaatttctagctggtttgattttttaaaattttggcttagcgccgaaacgtgggcgccgaatcgtgggcgccagaacgaccccgaccaaattcggcagaggaaaaaaattattggaaaaattaattaaaatataatatttttttatttaaattttccagctcattatactttgggattaagaattattttcaattaaattcagctgtacgatctttacaaagatgctggattggtgccaatcgaaattgtcaccaatggcattattgctgtcatctgtttttccggcatcactctcaacatgttgcttgtctatgtcaccgtcaaatcaaagtgaaatgccctcagatttttgatgccataacttaacaaaattaattgaaaaatgcaaatatagaaattaaaaaatatatatatatgatcttaaggacgaaaaaatttgaaaaacacaatttttggggaattttctttataatattaataaaaataataattttcaaaaaatttgtaaattcaccttaaaagtatgacaaaaatgcaaaatttcgatttttaattgattttttaaaatttaataagttttagccttattttatttttttccttctaaaataatctttaatacctttttagccatttttgataattttactttaagttaacgaattttagagaaatttgaagatttgtctacaatctgtaaaaattttgggtcaatagcagttcgtacaatgggcagttcgtacaaaaaaaaatttctaagaattttcaactaaaacttagaatttttcttgtaaaaaaatctaaatggattttctagcctagaaaaaatttttaaaacacttaaattttcaagaatttaaagaaatttaaaaaaatcagctgaaaagttggtaaaaaattttaaaga

SEQ ID NO: 5684 - DNA, 3003 bp, Heterodera glycines
aggtgtctatccgactctttaaaaaattgtaaatttcttttaaagatttatgggggacaaaccatataagagccgaattcttaaataacacatagataggcatgtacttaatcgcattttcttaaaattacatgacactgcgtaaaatattaattgtcattttagagattaatttaatgaaggccgaaacatttaacgaatttgacttttacgagccatcttcggtgtgtcaagaagaagtaatcatcctttcttaatttttttttctttgttttgtaacatagaacaaataaatttaaatgttatgtttatgcatccgtctttataataccgaatctgtgtgcagaatcccttctttttaccttaagaacggagtggcagttgttgtgcgtaagcgaccagattatgtgctgatgtacattcttaagctgggagaactctgtgttctgttgcggagacatgccaaagttgggaggttctcatttttaattagtttcaaaaatcaaaaaaatctgactttagcatagccgaatttgacgcaaagttcgagttggctgagttttatgacatttcctttgtcccggtggcggaacaaaaggaatttggacgacggaccatccaatggatgtgcacggatgacgattttcagctgaaccaatcggattggatggaatcacgcgtttttttgggcggttttgttcaggttgagtatttttttcggctccgattctgggatttcgaattatttatccgtgatcaaagctcggaatttttttcgggggttgtaaaattcatatatttaaaaaattagatgtgatggataactaattaacatgacaatacacaatttatacatcatattttacattaataaatcagttgtaggtctccgtttgctgcaatttcatcgacgaaaatctgacaaaattctccggtgattattggacagtatccaccggtttgtacgctgatgttctcattgcttatgtttttttgtataataattcaattgaagaaacccttctttttggcatttgttattctaatttcattcattttttagatttgggaccagttgtatgcaaaaaatccttctttaatggtattatatacaaaagctttttaattgacaatgtatagtgttatcttacaattattaatccgttacagaattctatggcactgctgtggttttgtgggtcacttttgtcaagagcaaagaaggatatcactggaaagtattcgacactgacaaccatggtgtcatccccgaggtcatttcgcacattcctttcccatcattccattttttgtccaaaatttgttccgattaaatttgccaggcaaaagtccaaaagttggtcaactcaatgtacgacagtttgcacaccgaaacaacgtccactcctccccccttttcttcgctactccctcatttggagcatgcgttcgaccaattcttcgacggaatgtttccggtgggttttggcacgcccaaatttcggcattaattttgcctgtttcttagcgtcgcgaccattcggctcaaatgaatgtgtacaacggcaacttcactttcactgtgcaaatcatagcgattttataaataaatgattttttggatttcaggtcgacgtcagcggtttccgccccgaggaaatcaaaatggaaatggacaaaaatgtgatcgtaatcagcggggagcatcgcgagcagaaataccgtatgtttcgtccttttttgcaatttaattcaacttcagacatcattggtcaccgatttttcaatgcatttaaaccaattttgcgttgacaatacgtacctaaaaattttccacgaatcaacaaaatgttcctgtataggagagcaaattaaaaaaaaatttccgtcaggcccgtatccagaaaaaaatttcagggggccgggcggcatccgtatagctttttttcaggccaaaatttttttcgccggtgttttttcaaaactttagcgccatgatacgggcctactaattaggttctacattaaatatttaatttcgcattgtccttcataaacaggcgaatcggtacaccgtcagttcacgcgtcgtgtgctcatcccggagggcatcaaatcggagaacatcgtgtgcggggtggagaatggtcggctgtgcatcttcggcacaactgaacgcggacgcacaaatgaaacagaaacggatgagttggccatgggacagccgtttatgcagaaacattagagcgtcttttcttattttattttatttttatattcattgctgctggttactgtgtttttacgatccgctgttgccattaattggttactgtatttcccatttttacgaccgtttccattgatcactctgtctttttgttttttttatgatccattctttgctataggtcatactttttaaaattaatcctacgtataaatcgttccaaattgacaattgtttttcgaaaaatttctcacaggagtcatgtgttttaattattttcagcgcctcttatttgccatcctaaaattagaaaatcaaatctctaattctctcgccatttctccgtcccattccctcattttttggtggctaattggcgcgtaaaactcttctgacccgccgccgccattcatctgtctgtttctttcgaaagatcgctttttccctccgttgcttttctcattccttttctctcgcatctctctctctctaccctttgatcaccgactgactctaatcctcactctctctctctcttccttcctctctctcatccattacatatctctctctctctcccccccaatcattaaaattgctgatgggacacatttcagttggacaaatattgttcaacacttcgcatcccttaaaatttgataattttttcaaatgttcatttgttggtttgtcgacgttcacaacaaccactttctctccttcctttccctttaattaaacccttggcaatttcattagcaaaatattcaatt

SEQ ID NO: 5685 - DNA, 2581 bp, Heterodera glycines
  unsure (1)..(2581): unsure at all n locations
ccgccgccattcatctatctgtttctttcgaaagatccccccccgctccgttgcttttctcattccttttctctcgcatctctctctctctaccctttgatcaccgactgactctaatcctcactctctctctctcttccttcctctctctcatccattacatatctctctctctctccccctctccactccctctctctctctctctctctctctctcccccaatcattaaaattgctgatgggacacatttcagttggacaaatattgttcaacacttcgcgtcccttaaaatttgataattttttcaaatgttcatttgttggtttgtcgacgttcacaacaaccacttctctccttcctttccctttaattaaacccttggcaatttcattagcaaaaaattcaattaatttttctaaacttttcaattttctgagaaataaatttcattttctttcctcaaaatgagagttttcttttgatttttttaaatttctattgaattcctttcttatttatcatcgcttttgttctacgcttttttttcttcgtcggttttcttccgccgtcgccgcttttgatcatttgttttgttctctcacactttgtctccccaaattcctttcttctctctcccttcccgcactctctcagtctttcctcgtctctcacttctatcccattagtttgcttttttattctttttttttctctcgccctatcattttatttttgctattaacttcattttctctctttctctccctctatcccttcgttgatcagcatttcctatcctccattttctctctctctctttgtccttatttccttcaccctgatcctctctccccttaccacattcactttctcccctttttctatgtcctctctccttttaggcacccattctcttcactttcgttcgtttttctcttccctctcgccctctgcttttactcatccatccaacacttctcttctcttccctccctttttgcttttgcctatctcttccccaccttctcttcattttttccttcccatcatttgtctcatcagtgtgaattgtttttcctctgactgtccctttattttcccccgtatccctccgagtgaatgccattctctctttttcccacttgtccaaatataaatcccttctcaatatcattccatcatttcctccctctctcatcctcgccgatcttttcggtcttttcctgctgtctattagacatattttccatgattgttttgttgataattatgatgataattatgatgctaatgatgtgctgggattcccttgccgccgtcgttttcagtcctcgccgctctctaatgattgagaatgaattgaatgctgttgatgatgaaaggggaaggcgtgtgcttgtgctgcgtgtgatgtgatgtgattttgttgttggtggtggcgtgtgcggccggcgaccaccactcgcttatttcgctcgcattcattcgcccccggcagtttttatgtgggcagctgcgccgccgacagccaatcaaaagcaaacggcggcggcggaaggagcaaaaagcaaaacaatgcgatgcgattgagcggcggcggcgatccccaaaaacacacacacagaacaaacccattaatacgtcgtcaaatcaattgaccattaacaaaaaaacggacatatccggtgaaaaatggacccaaaaattccattgatcactcattcttcatttattcatcatttacgaccggcgggtccattttgaatcatttcttaatcaattctatttatcacattcaatcctttattaattgataggcaaaattgatttttgaatgaaaaatgtctgggaattacacgtgctcctttcttttcttccttaccaattcattcgctgctttttccacttccgctttttctcatttcttccgctttgtttctgttgcatttcctctgtgtttttctcatttctttccgtccgttcgcgcattccccccccccctcgccccctccgctccctctccgttaattgttctgttttattcgttgcttgttcaccaccggttgattaggtaatgcttttgtaatgatctttttaatgagaatgctaattgggcgtgcattttgcatgtgttccttttactttctaattgtatatacaatataattattgtatgtgcatttattacttatagaataacacactaacgaatgattgattaatcattagtgtcttttgtgttaatttatatttatttactccttttgccacttttccaccgtctgtaaatgtctattttttcaaatttcactttttgattgcttttttcatgccaattaaatcattatttcaatattatattccaccttcaaattatgaggcatccattgctcattggctttgcgagactcttgagtttttgtcctcatttcttgagtctcggaagggtaaaacaactcatattatacatttttctttcataatattggtgattcatctcttcttatcatcaacattaaaagaagcacctctttcgtctgtccgtcttctgtctgtccgtttgagtcacaangggtta

SEQ ID NO: 5686 - DNA, 1254 bp, Heterodera glycines
aaaaagaaaccctttctttcccaattccattttggccttattcatcattgattacttaacaaaaactccccattcattttatattggttgagcatttctcattttacaatttttgtaagaaattccatgccttttatcacgcgcaattacccaaaaaaaagaagaattccacaaggcaaaccctccccgatggaccaactgactgattgagcgccgcgaaaaatgaatggggggggggggggggaacgcaaaacgttgcagcaacgaagcagcagcagcagtatgcttaacataaatgttgaaatgggtgtgctgctgctgttgctgcgctgggctttgctttgacgctgatcacttctgacggcggacgaccgccgccgcaaaactctgacaaattaaaaggaaaagaaaataaaaataaatatttgcaaattgcgtttttgctctctctctgctgattgtgagttgagtgtgtgatcgttgtgttgttgtgtcggggataataagtgatcggccggacggcgatttgtttttcgagtgatttgatcccccccccccccccttctcccatttcgtacaaaaatctctttcggcgaattgcgtacgccacagaaacaaacacacacagcgaaattgcgcgactcttttctacattagtgcgctatgggtgatttatgaatgaatgtatcatttttggttgtcgtcgctcatttgttattattaaaagtaattagtacgggcagagtggaaaagaaaactgacaaatgagagggatggatgtgtgaatggggtgcttatcattaattaccatcatcagtcaccgttttcttccctctctttccctatttctttttttatgtttcgtcccattttcatcacgatttgtgatcattcattagtgtatcattacggatgaaaaatgcagagcggtcggtggccagaacagaaagagaggggaagaaggacgagagtcttgactgttgactgatgaatggacgtgatgggtgggacacacaaacagaaggagaagcgaaagagagaaggggagaggaacagaagtaagagagagagagagaggagaggaaagggagagaagtgagagaggaggagaggaaagagatagtgcgtgtttgtgttatcttatgttctctgcttttactgctgctgctactgaaggagttcatccgtcgcattcattattcggtcgcttttcaagcaattatgagggaaaataacgagaaaaattccctctcc

SEQ ID NO: 5687 - DNA, 3976 bp, Heterodera glycines
tttggtcgtttgccatcgtcgtaaggcattaaaggcaattaattaatgaattgttgccgaaagatacatgctcaaaagaattattgataggatgaagctggctggctccatgttgctcatcattctgccggcatttattatgataatgtccgcgcctgttgtgtccattttccaccctaccgtaaccaatgcgttcggttcccgcgttggcaatgattacggtagacaagataaaggtcaaacagcaacaagatttttttttcattttgaaatttagccctaaatctcagcaaccgacgagcatcggcaacgggtgtccgacgagctgcggaaagtcgccaaaatattgacggagtgccgatgccatctcaaaatggggcaggtaatgttgccattgggtgtccattagctaataaaaaaaaatcctatttttagtaattaataatgctaaaattagggtcagattacattttagtgccaataacatttaagcagagccaattaatttaaaatttcttttgaataatttctgagaaacaaaatgctttcggtaattgtgattttaaaaaaatcattgaaaacgcaagcaaaaagcaaattatcgttttcaaatcaaatttttttgaaatttaacaaaatagtaaaattctcggatgataactagaatgtttcttttaactggggatatgagaaaaattatcatttaaataaaattaaataaaactccaatgcacaaaaattgccactcccaaagcgcaattggtcataaaaagcaattaattaagtaattagcaaaacaaaattgttccccattcccaccagcagaaaatagtgccgtcgttgatgcgccacagcttgaagaagagttgttgctcaccggctcatccccatccgttgaggaggagcagcaacagcaactgcagcaggaggaggaggagaaggaggtcgaaatgctgcacatccacggcatggaacagccaccacatcagcagcaaattgttgctggcactgcttcaacttttgctgctcatgctgctggtgccgcttctgtggatgatatggggccggccgccgcttcaaatcggcaaaaccgtcccgcgagtggcagcacgctgccgcgcagccgggcacagtcgcaggacgccgacgcgggcccgccctacgcgtcaacgccgacactgtgcccaacggacgaaaacccgacatttttgcgtcatttatggcttccagaagagcccgagggcacggagcggactgcgaattttgtgcgcaaaatggactcacttgaggtgcctacaacaagcaggattatcattagtaaacttagcaacaaaaaattagcaaagctcgagccctttttaacccaaaaaggaaatttgtctctcaagtcgagactcgtgactttcgagagcactaatgtcagggtattcgagggaattgggtgttactttcccattattatagttggtccctcttccctgtcttatttgttaggcatgtgctcggctatgtcgtgacaacgttgagccgtttgggggacggcattttgcgtgccacggcttcacttacattggccaacgaaacgcgcgcaatgcatgcgaattctttgacgaccatttggcggcggcacttgagaagaagccaccgctgggcgccttccaccaacagggccaactgctgagggccgacatggcaccgcaattcccaaaaaattgtaattagccgcaaaataatggaaaatttttcaggggatttaaaaaaaattgttgcaaagattttgagcgcatttgccttggccttccgtcccgttgcgcgcgtttgccgttcgcttttgacgtgcatccccgcaaggcattgcacgtcccaacggaggcgaagccgttgggtgttgagcaggtggacgaccggaagcaatgcctgcagcaatgtctgaacacaaagggatgccgatcgttggactttgacacggccaatttgtaagcaaaggcaacctaaatcatatcggcttaatcaaattggagtttttaaattggctattttttcttgtgcctttttaggatttaacgagttttaattatatatatataaagtaaatcaattgattccgctgattctgagctaaagccccgcttatgactagcaattaccgcatcccatttttaaaaatatggtttcactaattgccaaattttatgatgtcttttccgtcatgtccgtatgaacggagtttgccattctgtccaaaatgcaccaagaagtttggcattttggtcaataaaaatggcatctcaatggatacctgttctgtcgagcatcccaataatccccgttccccgtcaattggcaggacctgctcactttatgcacattcgctgcacatggcactcggagcacccgaagaaagcacttggcccctgggacaattggtgaaaaacgtggacttggaccattacgagaacacctgtctgactggtcagtcagtccatttgccgttttggcattttccgaaacattttggcactctgtaagcattggaccgatgcggaagccgtcacctggcctttgttctaatccgaaatgccgaactcgcgggcttctcggtcggtctgggcaaaatgtccgtcagcgagtgcctttcccgctgtttggactcgccgcccgccttttgccgtgccgtccaattccgaacaccgggcaatgagtgctttttgggcacggagcgcccattcgcgccgctgccatccgacgacatggacatcttcgagcccgtctgtctgccggacccgccgcgcacatcaattttggagtgccacggcgaacacgtgttcgaacgggtgggccatcgaacagccaatttggggaaatgttttgagcgtgaccaattactgactttgtgatcacatttcagaaacttaaacgactatcgatcagttttaatcacttttaaataacggaaggattttttgtgctattttgaaatgcgaatattgctttcaaaatattaaaatgaaaagcaggtgccaaacatggaattgcgcatggacgaggctgaagacggtccaattgttggtggtgttggtggcatggaacaacaacagcaaagcgaaccgggattacaatatggaacaggtaaaattcaatgaatatatttttagaattgagaattatcttcgacaattcaaaaacttgatttaataaaaatgacttggactgagtccaaaatgccgcttctttgcttaaaaaacttgaggctcggggtctagatcatggcaaatcccaatcgagatcatacgcaatttgagactggtaccattcccatttagacatgtcgggactgacattggagcgctgcttggatgcgtgcattcttggtcaactacattctgtccgtcactcggcacattttccctgttttcagatgagtcatgtgtgtcgctcatttttcgtccattttccggggatgacaacgaacaacggaacggcacaggcgcagtccccggcgccacttccatgtgccgactgttcccatttggcaaaatggacaatcgtgggtttttattttgattttaaatgttcatttattcgcgtgccattttcgaatcaaaatcaaccgaactttgaggagaggcccaaaattttacattgaagagctcttaattaacatttctgagaatcgccataggagtcaaaatttaaatttttattttatccattttcggtactcaattttccgtacaccaaaacttccagttaccttagctattttaattatgatcagcccaaacatcttggcaccgtcgttcaggcactctctctgtcatccatccaaacgtggattattttgagctgagctgcaaccgtatgccattatcgttcggcgaatgctgcgaaagatgaatttaccggtgcccatccactgcccgccggccaccgattggaggaaaatgacaaccagctgaagaagaagcaaatgacg

SEQ ID NO: 5688 - DNA, 2880 bp, Heterodera glycines
  unsure (1)..(2880): unsure at all n locations
gcaatgcgcaaaatgattacggtgccatcactgcngccngcacaaatggagggaaaatgacaagcagctgaagaagaagcaaatgacgacgacanaagccaaggaaaagcagcagcaacaggtggacactgctgctggagagaaaggcaaaaccgaacagggacaaatggacacggtggtggccaatgacagtaagtgatcaaaccattggtgatcggggtcaatggcaactcgtacaaaggcaactcgtacaataaaaattttcacaaaattaagcctaagcctgagcatatacctagcctaaagcttaggcctaatcctaagtctaaagcttagggctaagcctaagcaattgtgttgtcatcacagcacatcggtgatcgaatgttaagccaagcggaaggcattttggagatttaaaaaagtaataagcaacaaattgtcaagaattgtccccacaattttaattaattgttgaagcaaaagttggagaaccgaaaaacaaaagcagcacaatgagagaggcagaagagggagaagaagcacaaacaccaaatattgtcacttcgaattggccaactttggcatcgtttggccaaacaacagcttctttcgcttttggcagttcgacaaccgcactagcatctgttgttttatcggaacaattgtatcatgccacgggtggttccgctgatcatccaaactcaacactgtcaccattgtctaccgtatgcattttggaattgaaaagaaaattaaatttacgatttattattaaaatctatttcttggactggaaaaaagggttttcaaaaaagaagtaagtaccttgaaccgttttcacgtgtagtgatatcggtttttgtaaaactgataattcccttccgggaaagcgtttttaaagagagaagtaccgaaaccgttttcttgtgccggtggtatcggtaaaaataccgtatgcatttttggattggaaagcaaaattaaatttacttatttattttgtatttttttaaacaaaatttgagcttttgtggccaattatttttttgtagttttccattggacaatttctttgttaaattttattaaaagtcccaaatatttccttcgctgggcctttcgctatttgccggcccccaaacccttttaaattttatacacttgaactttccataaattatgacgcaaagatacataaatgcaggaatcagacagcaaatgttctgcaaaaatgttgcacagtttgctgttggagcggggccgcacgctgaagttggagcagcgtcagcaacaccaccgcaacgtgacggacgcgttgcactgcgagcggttgtgcgccgacgcggacgatgtgccgccatcgttggccaccagcgcgtcgtcgtcgtcgttcacatgtctagcattcgcgtacagcggccggtcgcacgaatgtctgctctcgtccacacgaatcaaaggcggagcagcgggagccgccgagttggagctgttcagccaggcggacccggactttgacctatactcattcgttgatagtcaaatggatgaaaattgcggggacaaatggtcgacgacgacggcgagcagtacagcgagcgtagcagaagtgaatggtcagtcttgttattcaaattgataaatttgaggtgaggggtggttcaattcccagccgcagcctttcaagtaatccagtcgaaatgacaaatgccgatcactcggcaatggatagtattgtcggtcatgtcagtggccgcatttcgagtgttaaatatgaggcaataaaagtcaggattttggtcttgttcgtggaggcacaaatccgggataatttagcattaaattcaatcacaattttttaaattttggaaatctttgacattgaacgaccattcgcaacaaacgaatcggctgctgccgtcccttccttggtgacgacaactcaaaatgcaacaaccgaaacattcatggaaaatgccttggacaacttagacaaaacattgacaacggcacaacatttggaaaatggagttcagcaagcagtagctgcaacacaaccttcaccacttcaaccacgaaccgccaaaatggtcaccattttggcagaaaagagttcaacaaaatttgatgaaccggcgatggctcttcggcactcattgatcacagccccgacgaaagtatcaaacaaaagcagacgctcaacaacaattagcagcagcaccagcagtaggacaaccatgaggacaacgtcaccaacgacgttggcaagcagtaacagcagcaattttgtgcatcagcagcagcagaggtgtgaaaaagcatatgaaattttattccattaaaataaatctattgtacaattacgcgttacatttgattttcaattatcggattggtttgtttctgtctaaactgacccggctcagtcccggtgtcggcttttgccaaaatttccggctccgtaaatgcgtattcccccgtttttgcatgtcagcaactcgtggatggcgccgccggctccgatcagtgtggacggaaatgttgtgccgtctatggaggtgccaaatggtctaaccagcggtggtggtgctgctgctgctgatcgtctcagtgccgaacaaatccgtgccggcgtcatctgcgacccgcaagggcttaacgttacttttcgcctcgtcggacgggctgccgtggtcttggcaaaatgacattgtgcgcgccaatttattttttttgaatttcagcgatacactggcgttgtgtatgcagccgatcgcttcgcgcactgccgcctttttgtggaggaagcgaccgaatttgctttttatgtgaaccttaggagggtgggacagtcctaattggtgcaactccgttgaa

SEQ ID NO: 5689 - DNA, 1993 bp, Heterodera glycines
gctattgccaattttcggcttttttggctacggagccaaaaataatcagaaaaaatcgatcaaagttccgaaaaaccgataaatgtgggtcacagtactttttatacttatttttgaacacaaaaatttgaaacactggtgttgatcggttacttctttggcattccgtaatttccattcaaataatccatcccttggcatggtgcagaacgaggagttgaacgtggtgttagtgatgtccaatgacgaggtgttcccgcttgacgtgacaacaagtgacgacctgttcttccacgtttcctgtgacttccgcggcattggcgtgccaacggcgattggcggtggcaccccgccgcaacggcatcggttgagcgcatggcccggatcagtcaggcaaattcaatttacaaatggccaaactttggcattgtttcagtggtcccgagccgggcccactctttgcatcggcggcgagacgtcctcaaaaaaacggccaactgctgcagcgacgtccgctggccgacccagagacgggccaacgacgcgaacgcgtccatctgaaaattttgcgcgacggacgccccgtgagcagtgtgtacattggtgaacggcttagcgccgtggtggagagcaccgacgtggaaggtactgctgctgctgaatcctcttgactgaaaattccgtgagaattgtcgccgagcctagaaacccgatacttttttaaaaatttttttacagtgtaaaaagtctttcggtctcaaaaatcaagaccggattctcgagtatcttatggtaagcatagggatgtttggcctataatttcggaaacattcggtttcataattaagcctttggtgctgtccgaagttgtaattccagacgcttaaacaaagtgaaaacttgcgagctcgagagtctcgagcagcattcctctaaaactctgcttactatgcttacgtcctcccgccccgttccaatcgcagttgagcggcttcgggtcgcggattgcaacgcgacgcgtgtgggcggacgagtgccaaggcccagctccatcccgttgttggaccgtgccggctgctcgctgaacccgcacatcatcgggcacatgcgccgctaccccaaccgactggaagcaccgctgagcgcatttcgcatcgacggaagtgaccaaattgacattgtttgtgccgtgttggtgtgccgtagccgatgcgcgagccgagaggtgagtgacactttacagagagcagagagtacagtacatggccaatgagtacgataacacgaactgtgactgattatactgagggcaaataaagtgatatcttaccgacttttaagaccaaaaatttagccggtaatttaccattttttccccttccatccatcgacagaatcaatgccccgccgaactcgaccatcgccacaccggcaccggtgctgccgctgcgtctctgcgcgtttacagggcgtcgtcgtccgctggccgtgccaccggtggcaaaataacgctgcaagagcgcagtcttgcggatttgccgtccgtggccggcgattttttgacggtagaccaacgaattcgtgtattggttagtcaatcattactgttgctgatttgatcacaatgatgagtgatcagcagcagaacatgctcatcagcagatcacctttttgtcaaaaggtcagcgaggaagaggaggagatggagcggacgctggcggtagcggacgcggaagcgattgacgaacgcccgctggcgccgcgcgccggtgcgggcggcaatgttttgtccgcttcggttgccgacggacccgcggcagggcccgggacaacggacattctgctgggtggcatggcatcctctgcaggtgcggctgtgggcagagactgggcttgatcaagcgttttacgtgaagggcgccagcctggtttttggagtataacttctttcattgttgtcctaattgaatgaatttgatatcattcgatagcc

SEQ ID NO: 5690 - DNA, 3490 bp, Heterodera glycines
  unsure (1)..(3490): unsure at all n locations
tcagcatctgtctaatttattaaatatttttgtaaatttatatttagctttgattgaatttgcgatggcattnacgtgaatgtcaaaagaggatgatagtatttatttaggagtaagtgtggaaatggcgaattttgaagaggggataatcattaaataaatttacacatcttacaataaaattgctggaaacaaaaagccacgaaagtagttttttattttaaataaaaatattattattatgaatgctaagttaataatttattaagaaatttatttaatattattttgcatttttttatacatttccattttttattttataatttttccaatgttacaaaatttgaaaatataaattttacttttactaaacataaaattatttttattttttcggccggagaaaagataagtattcaaggtaattaaaaaataataaatatatttttttaaatgttaaatggccaatttaggaaaacttcatattcaaaaatatcttttggatttggcatcagatgtctatttaaatttgaataaacattcatatgaaaaatttcaaacacaagctcttcaagctttctgtagtgaaaattttttgaatgaaaatgaaatacaaaatttgataaatcagaatttttataaaaatggcaaaaaatgatagacattttttgtatgcagatgagtcaaggaaaaaacatagaaaattttgaaggaacgattcagaaattgggcattgaataaagggcaatccaattataattaatcaaaacctaatgttttcaaaaacaataaaattataccaaaattggatgaatccgaaattacttcaccgaagaaaatgtcaattgaaaacaaaaataaacttttacaacatttttatttgggagtcaacgaattttttagagcatttagcggtaggaaatttaaaaaatcaaagaaaaaattattatttaactaatgtaaatttatttgaattattgttagcatataatttaggttaaaggagatcattctgatagggcaagctctaaaattattattatttttgttgaaataattatttataaaaaaaaatattttctaaagctcttgtgtatcagaatgtctgcctatccctttcatttaagcagatttttagagttcggtataccaacttccaataatttattgttatcggaaattcccgacttttttcggcatctgttgacatccctattgtattcaaaactcttaaaaatattattaaatatttttaaagaaaaaattaaaacttagaccatcaatcggaaactttggctcacaatagaagacgaagaaaaaaccgcttcaacagcctccacaaaatttgcaacctgctgatttagaacagcgaaaattcaaattttgcacctttcttttcattgccactctcttcacactaaccccagtaatttacttcattaacaaaatgtccacgggaccgagtgacgtcaatgtttggtgttttttggccattagcattgaaaatttttccctttatgcgcctacccatttgtgcaaaaattcaggagaaacttgacatgccggtcttaatcctacaaagggtctgcatcaatgtttaaagcgtaatttttcagtattttaggacacagaagtacgatggaattcgatgtttcaaatgcttaatcgtttcttacaatgcaaagctgccgttcaagtatttatgacatcggatgaagcaaagagaaacaacaaaggaaaaggcattccaatcattagcaatatcgaatggaaccaaattgagcaaatagtggatgttttaaaaataattaacgatgcgtcaaatgaattacagtcaagaacagccacaattggaatgataatgccatattatttcggaatttaaaaaaaattcatggagggaaatccaaacaccggtttttgttctatccgcaaatggtatttattttcaatttagacacatttgacattcgaatcgcaattattgggaagttggaccaaataatggacaaggaaaaaaccgaaaacaacaagttgcttaagaagtaaaaaatttcaaaaaaagttttttttagatctttgatcattgcaactgtccttgacccccgttttaaattgaagttgtttgaacaaatgaaggaacaaattcgggaatggatgagagcggatttacaaaaaatgttttccgggtttttaaacacgacgttggttcgccaatcaagtacatcgagtagttgttccacggaaaaacctgttttttctggtcttttagaagttttaattttaatattttccataaagattttaatgattttagtcatccagtgggtcatccaatctctcaattaccgatgatcaatcgaaatcacaaaatgaattttacgatgcgcttcaccaaatggacaaatatttgagagagccgcgagtaaaatacaatgttgatccttttcaatggtggaaaaagaatgaagcggaatttccaagcttgggacggcttatgagaaagtatcatagtgcgccgccgggaagtgttgagtcggaacgcctgttcagctgcgcaggatttattttgaatgacctccgaaaaagtctctcgcatgaaaatctcgaacggcttatttttcttcatcataatattatcctttacaattttgattattgataatatgggaattttctaattatgcttttacaaatgtgcgatccgcggcattttttgcgcgatccgcggcgttttttgcgcgatccgcgaccgcggcaaattgaatccgcgaccgcgggattttttttgcgcgatccgcgacagcggcaaattgaatccgcgaccgcgggatttttctgtgcgcgccccacccctgttttgaacattggacttacaattagcctattttgtataaaaattatgttttattcgtgcaaaatttcaaaaatttttacctcggctcagaagtgtctgccttttttcaaaaaaaaacaaatttctctttttaagtttgaaatgccatgaattactatatttctgacttaccgtatttgctctttttatccccccggggggattatttttcaacctcctcagaaacggggggattattagatacggggggaaaaatggagaaggggggattatttttcgacagatttatttgtctaatatttttgaaaatttaaacatatcgacaaaaaatatcatcgcgtcaaaaaaaagatttttatttcatttttgttaaagaacactctacttttcacaagtaaatatttaatatttccattggaaattaaatttctttttaaatttcattttcatattctcacaaaatcatttacatctttctaaacatttgttttcgtaagaatacaaaaaaaaaatcttttgcccatccaattcatccttctgctgctgctgattcaccttcatttttgcatcttttttcttaccgattcacatttttgtgccttttcatctccttttttatgaataatgttt

SEQ ID NO: 5691 - DNA, 916 bp, Heterodera glycines
atgccggaatgaagtcactcaatgatggatgatgtccgagctcacgctgaaaataccaaaaataatgctttccgacggcaattttttactgcaaattgtccatgcgcccccttccatgccgttgctcattcactcaattgccatttgagccctggagtagacattccaaaaccgagatctgggaaacgtgcgaggacagtacgatgtcttcgttcccagcgtgagaataagctgcatgaacaggctcacagttttcttcatcatcgcttgcagcgacgtccaaatcattcctggttgaagtgtcttccatttgttgttctgcgtctgtcctctcagcattcagtacgctgtcttcatttgttggaattcggggccttttaattggcttttgcagactctcaagtatttcgcgtacagttggcatttcttgctagaatctgaattacgctagaaaagaaattataaaaaagtgaaaggaattcttaagctttgattgatccaaaaatggttggaatgaacaaatatgaaaaaagttaggacataagaaatgatgatggtcactgattggacgtataaactggaatagggctgtatctgatattaaaacagcatttttttactctttttacttttttttctttgattcttttaactattttttaactatttggcgaaatgtcagttggcaaaatgtcagattttggcttagtaggcgaaatgaatgtttttggttgagttggcgaaatgaatgtttttggctgagttggcgaaatgtcagttggcgagatgtcagttggcgagatgtcaagttggcgaaatgtcggtacaccctaccgatagtccccccccctttttggaaaatttttttttctgttctagaaagtcgtgaaaacacgtttatggtgtccttagggtc

SEQ ID NO: 5692 - DNA, 2799 bp, Heterodera glycines
  unsure (1)..(2799): unsure at all n locations
gcgatccgcggcgtntttgcgcgatccgcgaccgcggcaaatgaatccgcgaccgcgggatttttttgcgcgatccgcgacagcggcaaattgaatccgcgaccgcgggatttttctgtgcgcgccccacccctgtcacacggtctgcacaaataagagtcattacataaaatctaaaccaaaagaaaacacctaattatcatttcgaacattatgccgttgtgctgcagcgcaacgcactgtcaccgttgacgtaatgtgtagggctgggaattttaggttttaactattttttttgctcaattgttttgaagaaaggaggacaaaaaacgcatttctgcattaaaaattttcgattatgttgtcactatcggtcactagaaatcactattttggcgtttcgtcactattttttaactatttcgacattttttgggaaatttcttaacaaaaatgcaataaaaccaaaaaatacacccctaagaatcgacaaaaaaatttcaaaaagcactcctaagaaatgaaaaaaattttctcaaaaaggtattttcgtggcaagaattttaattttaaaaattatttttttatgtacctattttgtttttttgcccttaaaaatcccagccctactcatttgcaatgcaatcagtgaataaaaattatttttgcttaatttttggctgaaaattatgtcactattcgtcactattttggactttttgtcactattttggcatttttactcactattttagttaattatttcgagatttttcgtcactaaaagtcccagccctagtaatcaatagacagaacaaagtgatgccagcatatcaatcgattgttatacataagtcacaaacatttccgatcaatcaattccattctcactttcaaatcgtcttacaaattgggccagccccgctaatccgtcgttgttcagccgccgccaaatcagattccacgcatgaatatctgtcaacttcaagatcaaaatgctcctttgcatttaacggcacaagccatttgccctgcgcgttgcaattcagcgcgataaaattggtggcagtggcgtcatagacgctgtagtcagtacagcgatttctgagtatgacatgtaaggcaatctgtggaaaaaaatttagtcggagttagtaagcacacaaaattaaaggtcttgaaaatttttaatttagagactcgaatcgagatttttatttcagttttactttaagttggcctttttgttattatggaaaatcaagtcctagggatataaaaaagtcatggtctcgagtttcgaaagacgaggcagagacgacaaacccgagacttgagaccgagacccgaaaacgcaatacatttctctagtcgagactttatggaataatgtttaattcaacttttttaaactagcataatgttaattcaacttctttgttcaactcttagggatataaaaaagtcttaagtcttggtctcgagtttagaaaatcgagacagaaactaaaaactcgagatttgaagaccgagacccaaaaaacatgagacttctctagagtcgaaactctcgaacagtactgtcatctgttacacctcttcactcaccacttgaccatcaggacatcggagcggcagtgttgagcagccattagcatctgtgaccaccccggtgattgacggcgacacagcccttgcgtcgaacaggcaaacaatgtccgtgttcacttccgacacttggacccggggtaatgaggcgggatcgcatgaggtgcatcgaccaaccgactgagccgcggttgaggtcaccgggtcacctgtgtggaaagaaggggacgggtcgtcactagcgtggcgcgattttttgggatttgcaacttggggacaagacgtttggggacccgacttttgaggacccaaattttagggatccgactcttagggattccgcatttgggaccgatttacgacacttagggattccgacatttagggacccgacatttggcgacaaaccgacttttggggattcaggtgaaaaaatatattattttttaaaatattttattcagccccaaaattcgactaacttacatctgctttcgttaataaaaaaaacagaatttgaattcgcttcgctcatagaattttttttgtcttaaagattttttcaaattttgataatgattgataaaatctttttctatctaatgatatagaaggtcttttcagaaacaagtttgataaaaatttattcaaataaaaatattctatcgcctatatctttgctcttgcgcatcaatttacttaaaaatagtttggtaaaaacttcgtatcatcaatagctttcattgagaatgcttagaaaaatgcatctcttcttttttcaaaatcaagcgcaagtttatcgaattttgaggttgaatacttaatattaaaaaaaaatttttttttttcatttaaagccccaaatgtcggaatccttaaatgtctggtccccaagttgcaaatccccaaaagtcgggtgtagccgtcactagagcccgaccggcgcgggacgggaccccgcgcgtgattttgcggatcccatccgcaaaacccgaatttttggaaattatatctcttcccggaaaaaaatgttgagttccaatcgcgcagcgggatccgcaaatttgaaggaagagagacccagttgtaacatgagagagttagttggcgcatcacatttttggcaaaatgttataaattctcaaaaatttgaattttttgaaccctcatcaaaatatataagaggtgtgt

SEQ ID NO: 5693 - DNA, 5803 bp, Heterodera glycines
  unsure (1)..(5803): unsure at all n locations
tgaaccgctgctgagagagcgcggnaaaagtcancaaaaaatcaatcgaaacgatgtccaaaattattgaccagccaacgtacatacacactgcatcaccagcngaagcggcgctaccgccgattgccaacattggcgcccggcttgcatactgaatggcaggccgatttagctatttttgaccgacttggtaaacaaaatcgtggcttcaagtacttattagtctgtattgatacccttagtcgacaggtgtttgttgagcccgtaaagaccaagacgagcgctaacatgatcattgcctttgatcgtatattcaaaagatcaaaatatatcccgtggaaggtgttaacagatcagggaaaggaattcactgcccgggcagtacagcagttcttccgcacaaaagacgttgaacacttttgtatgctcacttctccccaatttcatgccggaatggcagaacgtgcgaatcgtagcatcaaagagcgcctttaccgctacttcacggagcgcaacacgtacaaatggattgatgttgtgcaagacattgtttgcgcaattaaccactcgacaaattcgtgcattggaatgcgcccagtagacgtgaactttaaaaacgcagaagcattgcgacaaaaattacatgatgcagctgaaaatgttgtacgacgcaagccaaaataccgtgtgggagatcgcgtgcgcattgaaaagtacaagcacgtgttccaaaagggtcacctcccacgcttcaccaatgaacttttcacggtggcagaggtacactctgagcgttcgccagttgtttatcggttacgtgatgacaataatgaaattattagtggttggttttacgcaaatgatttatgcaaaacgctagaagacaaacaacaaaaaatgtttgacattgaaaatattttgaagaaaaagaggcagaacggtgtggaatatgtacttgtgaaatggaaagggtacagcgctcgctccaatagttggattcctgcaaattcaattagcgagaaaaatatataaaaagcattatttaataaaatttatttttaaaaaaatgccttcaaattctttttatgttgttcttccgtcaaacaccaatattgaaggaaataggacaaattctttccgagtgcgtttaccgcgcaaactacaattcaattcggaatgggaggtgggtcttgccgttattgtatatccccactcttggccctcgataggcaccgtggagcaacaatttgtacagattgagtggcagacagggaatacggtacgtatcgaagttccgccatcaaatgtcaccaacccccatgagcttagcaaaaatttatacaggctactgggtgagggaagtgatccgttggcaaaaaaggtacgatcaacacagaattctttcatgcttacgataaacaaggctcgccgctgggccagagaagaatacattaagcgaaagactaaagaaaaacggggcgtccgtgacgaagagctgctcctacaggccatgttggcagatactggaacattggttgacctcaacaacgtggcccaaggccttctgtcacgcgaaaagagtgctgcaacgagcaatctacagttgagaacgtcagctgacgataatgattcgtatcagaaaaaattggatgactacttttcaaaattaagtgacaaaaatttgaccgttcttgatgaattgggcatgacaaaattgaccgccgaaatcaaaaatttgacagaagaggaacgtacgatcctcgaagccacaaaggaaatgggaacggaagcatggattcaggcgtaccgtgagatacgtcttgtttgccaatttaactatgacgtccatagaaatcgctttgttctgaacaccgacccacggtacgttaaaaaggtcgaagtctcgcctcaacttgcctacattctcggtttcaacaacacggagtttatgcagcccgcaaaggaggcaaggttttcgccggacatcattccacgtttacacgccggatcttattgaaccaatgatgattggagatgtgacggccccagtgttgcgcatagtgaccatacgcggaaaccccgaccaagtagttgaagaacaattttttgccatacagtatcacaagctcttatcaaaagaggtttctgaaattctgattgagatccgtaccaatagcggcatcttgatgccattccaatacggaacatgtacattaacattacactttagaaaaatgtcctatttttaaatgatgaacacgttggaaattgacaaaacattgacaagaaacaacgtgactcgccactactatattggctgttttgcggcagaccaaataccagccggggcaattgccaaatttccacactgtatggtggtgaatcttgaccccagcatatctcatggttctcattgggtgtgcatttattgcgcttctcctttgcatttggagtattatgactcattggggatatggccaccgcccagttttcacattgttgaccatttgtcacgctacaaacaaattgaatataattctcttccacttcagtctcccaactcaagtgcgtgtggtcgacatgtcattttctttttgtactgtcgatgtgttggaatgacctttgaaaaaattgtcagctttttacactttggaaagctgcaacctgataagctcgtaaacaattttataaaaagcataattttcaaagaatataaataataacaaaacagcgaaagtatcaattaaagatgcatgttgattttgatcctctacaagtggattggtccacattctcgtccgagtgtgtgcaatttggtggatacaacatttatcgggggttgccctatcagcgtggagcgggagttggcgcagtgttcagaagtcttatgagatatttgctgccgattggaaagcaaattggctccgcaattgacgtcagggaatggaaagcggaaatcgagtactcaccaatgtgctggagggaaaagacctcagagagtctctcgttagtgagagtaaggcaggactaaagaatcttctcgaaaaagcagccaacaacataaacactcagaagggtcaaggttttgattttaagcgatacaaaaaagactcggctccaaaaattggaaaaataaggggaaaaaatataaataaacttcaatcgtcaatcggtccaccaatggttgatgagaccaaaaataaacgtctgcgtgttgactcattaggaacctattaaaaaatgacttgcctacaaaaaatcagcgacagcagtcctctagcaattaacagtggcctaaacattttctcagttccaccgaccaatgtgtccgttgttcgctcattctttcgtcaggtgcttccactcgcaacaataacgcaagaatcgccttatctatttcgtctttacagtgacaatttgtggactgatttgtctcgggtttatctttatctcgaagtgtccattgaaaaaccaggagcaaacgataaatgggttgcaatagaggacggggatactcatgtctctgccattcaagggattggtcaaacatttgtccagcaactaaaagttacggttggcaacacggaagtatacgatagcggaaacctatacccattcaaggcttatatcaccaatgagttaagctttccaataaatgccaagaaaaattttcttggttcaacagggtattatcacaccgtaaaccaagatgactcaacagacgaggggttcaaagagcgttgtaaaatttttaagggtggaaaaaatgcgcaattcctctcccgtctcgactttgatttgggaaaccaagagctttatctcttaaacaatttggatttgctgttcacaatttataaggctaaagatgtctttcttttgcaaactttaaaagcaaatgattcaaccaaatatcgtttgacagttcacgatgtcaagatttatgcaaaaatggttgaggtccaaccctcactaaacatgagcctttacaaaacccttgaaaaacaacccgccacatacgcagtacgcaagaccgaaatcaagtcgtcattcatcagtgtcggtcgatacgaatttgagtacaatgtattcagtgcaaccattcctcgacgtgtgacaatcgcgttagttggaaattcagcatttcatggtgactacaaactgagtcccttcatgtttgagccgtttgatttgcgtgagatttcggtacatgctggtggcgtagtttacccagctgttccttataaactaaatttttcaaatgatcactttgtcagcgcctttgttgacatgtatgaggcactcggaatggccaattcagaacgttcatttgacatttcaatggcccagttcaaaaaagggtggaccttttttgtcattccattgacttcaacgcttgacgacagctgtggatttgagctgttgagaagcggtacgacaaacgtacgagcaacattcaattcaccaattccgcttggtggtgtagagatgattgtcttgggtgaattcgaccaaatgattatggttgattataaccggcacattgtgaccgattcaaagcttggataaattataaataaataaaaatattattatgtaatgttaaaatgaataacaccaacacaacaaaacacgacatacaaattttgaattccccagaagagcctaatgaaactcttttgcatgtactgcttttttctcattatcttcttgcatttcctgtgtttttgcttttttggttcgttttaattcggtggcttaaaagtcacggtcacctctcgcccagcgaggccgagacagtaatggaagagatgaaaaatatcccccgacacccaccaatattttttgcagcaaaatgatgcaagattagagaaaactgacactgaactctctcttcagtatgacaaaatcgataatgactcatgctgatggagcattctcaaagctactcattctttttcatcattcattttacaaaaatgtctccaaatgaatgttctgaccgtccctttcaacaacccgacaatgtacaacagccgcatcaacaaccagatgaagacgccgagttgcgcgcacaaattgaagacgcggaagaggatttgctcttgaattggtggcgtgaagatccgacaattgtaagcttgtttttcaatttagcatttttaatttcttcacgtttcagattcgttttctttttggacatggacgagcccctgccatagaagccgcgcttcttcaacgcgccgaacgtgaggcagaaattttgcgcgaatatgccgagaatcaacaacaatgagaaggggccattcagatatcatgtcgtatgttatttttcttatttttttttttttattatgatgataaaaaattttacaatgcagaactgcggaggagaatggaaatggatgatgggggggggactaaaactcgcgcacccttgaccgatttacttcaaattttacgggcagtcaacccaccaccccttaagctgaacggcgaaaagaattttgcctctagcaccattttgagctgtacattcccgacgccccgccccctcgcgcaccccaagacttgcgcagcaaaactcgcgcaccccttgtccgattgacttcaaatttcacaggcaatctacccaccaccccctaaactgaacggcgaaagaatttgcctctagcaccattttgagcggtacattcccgacgccccgcccccctcgcgcactccgagacttgcgcagttaaactcgcgcaccccttgtccaattgacttcaaattttacgggcagtcaacccacaccccataaact

SEQ ID NO: 5694 - DNA, 1556 bp, Heterodera glycines
atttaattcttctcaaattgtttcttccaattgaaaatggtccattgactaattttcaatatttttgaaattttctcgtcactcatttttggattttctcctttcatttgccaatacattttcattttttccattttttctttctccgtcattctttcacccattccaaattgtttcttccattgtccaattactccttggccaactccaattttcttacaaatttctgcataatttttgtcccattcttttgtcgaatattttcttcctttttgtttatactcatttttcattgcattaaatttttgcacaatttcaattttttgttcatccgtttttgatttgttgtgccatttatatattcccaattctttgatccatttgtaaatgtattttcgatttgtccccaatgttttcgctattttatcattaattttattccattcttttgttgaatattttcttcctttttgtttgattttcgctttaattttgttgaatttttcaacaatttctctctttttctgttcattttctttttcttcccatttttctccaaatatttctttaaatgttttttgttgcaattttttcttttccgctccaatttcaatttgagcaattaaaaataatacaattgaaaagaatattaggcacagtttcatattttctaaaaatttcaatttgtattttatttaatagacagaaatgaaaagcaataaataatgaatgatattattatttctcaaaaacgaattcttatatttttctcttctaaaacctacacattttaaagtgaaatattgacagatttctctctactgattggtcgcaattagtaatattattatttaataatattaaaaaaaatattttcacgattaataaattcccatccaactgatcacaaaaactcaaatttttaattattttttttcatttttacttttgttatgaccaaccagaaaaattaagtgtgtttttcgtgaatattgggtcgaacttattcatcctaatgtatcatagaaattccgaaaaagaattttttttttgcatgaagtggaaaggttttaaaaaaataaaaaaatgttaccgtgggaaaattttctgtttgctcgtttttgacaaccataaaatcaatcaatgttttaaatcacatttaagggatgcaattttttaattaaattgtaaaaaaaattttaaaaatcacttcaatagaaaaaaggatatttaaatttaaaaataatacaaaaatggcgggtccggattcgggattggaatcttgcagcctgggttggattgccgagattaaaatcccaattttggcggaatttgaatcctgccccgggacaatcctgttttttgggatcccaatcctgacccttaaaataaattaaatttgtcgtttattctcgttttcgaccgagaaagtaaaataaataatagaacctaaaaagggcaaaaatatttggcggtttaatttatggcacagctgctaactcccgaaagattttttttaaagatttaaaaatgtcataaatttttatttttttttg

SEQ ID NO: 5695 - DNA, 2972 bp, Heterodera glycines
gcatgaagtggaaaggttttaaaaaaataaaaaaatgttaccgtgggaaaattttctgtttgctcgtttttgacaaccataaaatcaatcaatgttttaaatcacatttaagggatgtaatttttaaattaaattgtaaaaaaaattttaaaaatcacttcaatagaaaaaaggatatttaaatttaaaaataatacaaaaatgacgggtccggattcggaattggaatcttgcagcctgggttggattgccgagattaaaatcccaattttggcggaatttgaatcctgcccgggacaatcctgttttttgggatcccgatcctgacccttaaaataaattaaatttgtcgtttattctcgttttcgaccgagaaagtgaaataaataatagaacctaaaaagggcaaaaatatttggcggtttaatttatggcacagctgttaactcccgaaagatttttttttaaattttaaaaatgtcataaatttttatttttataaatggattaaagaattaggattatacaaatatcacagcaaatcaaaaacggatgaacaaaaaattgaaattgtgcaaaaatatataaataattcggaatgaatggaaaaagattaacggagaaagaaaaaatggagaaagtgaaaatatattggcaaataaaaggagaaaatccaaaaatgagtgacgagaaaatttcaaaaataatgaaaattaatgaaaacgctcagagatttcttgtgatcagtaggattggaattttaattaacgatgaaatttttttatttacactattttttaaaattattgtctagcgaccaatcagtagaaaagagaaaaatataaaaatatttttgagaaataaattattatttatatctctaattatattgaataaatatcaattttaattaaaaaaaatatcaacaatgaaactgtccatattattctttttaattgttcaaattgaaattggagcagaaaagaaaaatttgaacaaaaaagcatttgaagaaatatttggagaaaaatggcggaacagggcgattcattgtctccgtttcggtgccgccctttcattgccagccgtttcattgcagttgtcgtttcattgccaagatgggtctcactgccaatatgtttaactactgcctacttttctctttttctcattattttcattaattttgttattgtaattttcctatttcaaagcagatcattcgttttttgtcaacgattatggctactgaaattctaacaagcgtggaagaaaaacattgttacacgatggttttctgtatatcttcgaaaaaataaacaaacggggtgacgtcaggttttgtaaatgtgaatttttcggaacccaggacatcatatgcaaatgtcgtttgcacacagatatgaatgacaatattttggaggttcaaatattcaattattaatgttagatatgaaaatttttaggcaagagccgaaaaacatcaaagttcaaacacttacgacatcgctgaagaagcgtgcgcatgaaacgatggaaagccattctgtgttacggtctataacacttgacaatattacgactccagttttggctcggtttccggataaagaaacaacaaaaaaagttttttttcttatttttgatttgcgtagcataaacaaattcataggttgtgaagcgcgcgacacaggctgaaaatgtgccttttgcagtcccgactagcatcgcagagctccaaatccctctggcctacagtcaatacgagtgatcagaaaacatcacagaaaattttctgttggacgattccggagtatatgcagaaaacggtcaaattcaccggtaaaatttaactattttctctgaagacgtgcttttaattttataggattcttatttttgggagagcgtcacacagtaaaagggcggcacaaatgactgatgttttcgtagatggcacgttcatcattgctccaccgttgttttaccaagtttacgctgtgttggcaaggtggagttagtattattccaacagacttaataaattctcacacttatttaggcgtcgagatcgatgagtctttcctgttgcatatgcactacttacgaacaaaagtgaggggacatataccaggatgtgggccttactaaaagaagcctggcctgaattttcacaccggacgttttcagtggactttgagatggcagcaatcaattcaattcgtaacaattttccggaagccaaaactcgtggatgtttatttcatctagtgaaaaatatgaagaaaaaacacagaaaataaactttcgcaggtctatcgaggatgtgtatttaataatcaatgtgtttttagcgttatcaaattgatccaattttcgcatcccagtcaagctggatcacatcaatggcatttatgtcaattggagacttaacgcacgctctatctcattggaaatgcatctgttacctgagcttcgaccaattttttgttatagatttaagtaaacagatttacaggttcgccacaaactacactggacgtgttcggcgtgctgaagggactcgaaccgtaccaatgtttcccccccccccccccaattatggagtgtctactctaggacgattaatggagaagatcgcacgaacaatttcgcagaagctgcacacaggcgactgcaaagggattttaactgctctcatccatcaatatggcgtttcattgagacattgcagaaacaacaaaagttacgagattccgaaatgtccaaatgcgttgctggattcgacccaccacaaaaggcaaaaagatatcgcgaagcagaccgtcgaattctcacattgacacgcaattaccatccagtgaatattggtgatcctgctcatgtcaacgttgataattttaacccacaaactatcattgattttcttgctggtgtctcatacaattgttcgatggacccctgattttttg

SEQ ID NO: 5696 - DNA, 1671 bp, Heterodera glycines
aaaaatattggcagtgagacccacctttggcaatgaaacgacccctgcaattaaacggctggcaatgaaaatgcgggcaatgaaacggcgacaatgaatcgcctgttccgccattttctccaaatatttcttcaaatgctttttggtcaaatttttcttttctgctccaatttcaatttgaacaattaaaaagaataatatggacagaaaaatattgaaaattaatcaagggaccatttgcagatggaagaaacaatttggagaagtaattaaggagaactgaattaatgagataaaatttgtttttttgaccgcttttttctttacgataattgtttctttgcttttgtacatattttttaaaatatatttttcaatttttttataatttatttacaaacacaagtacaaattttaaatcatgattggagctacgcattattagagccctggggccgagtaaaagaaggaggttatggttaaataaccacaaccatcatggtttacccgtagcaaatgagcaaccacgggttcatggtcatttaacctggtcatttgaccatgatgttggtggtttgtgaacgcacagtaaaagaacatggtttatggttacctaaccatgtaaccatggtaaaacgccaaccctgccccgaggacgcacttttactggcaccaacgaatgaattagaatcagatgatgaatgtgaagaaaaagatgatttttgagttcctacgattctatggaaggatgcttcccatttgttattggaagcaaatccaaatttaattccaagtctgagaaacaaaaataacacaaaatgagaatcacaaacataaacaaaaggccaaaataattgaacatttgcaagtggtctccactttttacacagcgagtcttacatctatttcgaatcccgaaccaaaaaaaaagtcaatctcaactttaaaatgaacttttattggccaaataattcaactacatttaaatgaacattcatttaatttcgcttctttaatttaaagtctgctggccctggcttttgtccatatctttatttttggaagatttacatttaaatcagtataaatttcgtgtcaagtttttttagtattcttttaataattcttaatcaaaatgttaactgttttcacatacatatttaagcttctattcacatttttataattaaaaattttgagtccaaaaatgtttgaaacggcggaccgggtcagtttagtcgggctggtttagtccggccggtttagtcggagggtcggtttagtacggcaagctggtttgtccaaaatagattctactcagatttttttcgaaaaaatttttaaaatcaataacaatatatttatcaatgtgttaacaacgaaaaaataacaaaacattgaaaatgattacgggcacatttcatagtttcgagaaacaccaacgagacgattatctgctgctgtctgaacaacgacggattatcggcggactgtcgccgccaattcattttattttatttttgtgcatacatacacctttgcatttgttgttaggcccgaaaaactcgcatcgccaatactgaagaccatcgtcactgaaatggtgaagaacataaagtgaaccctcatgttccagcttctgcttgtttcgctttgtctttatttcctgat

SEQ ID NO: 5697 - DNA, 2097 bp, Heterodera glycines
  unsure (1)..(2097): unsure at all n locations
caaaggcaaaaatcagctgtggtgtccctccttttccctttctcggcccgtgccttcccaaatggtggggggagggacggacgagccggtggaagcgaaggcccgcaagagtgagagactcctgcggggaagaccgacgaagcggtggtgggtcggacaacgacgacggcgagagacgagagcagcagaatggggaggggaaaccgtcccgaccaaatcccccgaacattcacgaatataaatttattaaagcagcagaaaaaacggatggatggaaattgtggaagtgagcatatgtgagagaaaaatggtgccctttttataggccgaaaaatgcgaggaggcggggcacagggaaaaaacttaattggactatcactaacaaggcgtgggaaaaaacagcgggcgatcgataaaatctgtcgctgttggcgacagaactcccccccgcggcaatcatcgaatttcttcgcggtggtgtcggcgctctttcttcgccttgtgctttccatccaccgacggcgagcggtgagttctccgtgaacagccacgaggtccacggctgccttggtggcggttgcgctttggccacaattcccgcgtcgtcctgggcgggaatttttttgattgcgacaattggccccatgcatttaagaaattaccggtgggcgattacggtccgccttatcggcggtgatctccccttcctcgggggagtcgcgccgtgcatttgaagtcccggggcggctggctgccgctgaccgctccctttgtggagctacatagagggggcaggcctttgccccgcggcgatgcccggagagttggcacgccgaacacgtcggcagacgttttgaggaaggctcctcctttgcctccgcgtcgatgaagtcgcggacggaaaatttccgtccgcttttcgcgtcccgctcaggcgttgctgcggcaatgttgaacagttccaccgcctttttgcggggcggtggcggcgactggcgatccggcgatgatgatgatgatgatgaataggcggacgatgacgaggagggcattttgatgggtttcggcattttgggaagggcaagtgatggtgggatatgccttatccctgcccttatataggttccgctaccattgaaggggcggagtcctcggatcagatttgctttctgatcgtgggaaaatggccatgggaaaagtattcgtgaaaatccccattgattttcacgtgccatgtccgccgcttcaagcggctgatggcaagtccttgtcgaagggaattcctttccctccgccaaactgccgaggcacaaagccaaggccacaatgaataggccgttctgccaacggcgcattggacggttggggaccgcccttcgtgggcggttctcaaagcttccgtccggtgaatttgggcggccattgtcaatggctcgctctccgcgttgaataggcgcttggcgggcattgttttccgccctatcgccaatgttcggattgtctcttcggaagccaatggcctcgaagagacgccgagacggcggtcccctgttgggcccctcttggtcatttggagcctcctccaatgccaaatacgctcttattcggggaggacgagggggctcggccaccctccgatcagctccgatttggaatcggacattgaccatgtcgattgggaagtaatcgacatggattccttgttggctattgctgaagcctccatactcttggaggcatggcaaattcgggtccacctggaacccgcgccgtcgaaagtgttcccggacagtccgtcccggaaacatttgcgtgttagccggtccaaaacgcgaaaacccgtcgaaacggacattcgcgaatggaccaaggtgtgccgcaaaaagcgtgacaccggtgcgcagttctcggcggaggtgttcctccgcgtcacggcgaatggtagccgtctcgtaccatgntggccgtggtgtcgctcaacccacgagttgagtctctccgtgtggtcacggggcgatggttcccgtcagggaggagcatgggctccccaatcgcctcgttgttcgccaatttggcgattttgggcccctgttttca

SEQ ID NO: 5698 - DNA, 1699 bp, Heterodera glycines
  unsure (1)..(1699): unsure at all n locations
aaaaataaagcgattaaaattcctcaaatttgtcncatttatttatttatttgtttatttatttttgctgatttctctttcatttctctcatttcttctctttttccatttttcccttatgcttcttggctttgctgctgctttcgatgaccattttcagcactttccgtggcttttttcggctctcttcgcttggcttcttctcctttttcttcttttggagctgtttccttccttttcagccaatttatctcttcaggtgttttaattgatgtaaataaattaattaatttggagagaaaaattaacgatcgatttattggtcaatatttatttattgatttttagatgaaaatatcggtagagaaaatttgcgaagggggaccagccttaaattgagacttttctttctttttatactattttttggctagttttcttcaaaaaacttttggctgcctgcaaattttggaatttttgttcctttttttacagatttttactaaaatatcgttattattatatggttaggtctgttcccctctgcgacattaatattttggcaatcattaagaattggtgtcccgaccaaaaaaaatattaaaaatttgtcgggtattttttctaggctaaaaaatgtgctgatcacgaatctgagctcaagttttgaaaatctttgatttttatctatgatttttcatcaactacatgattttttccaaaattttaagaaaattagtcggacataaaactgatactaaaaagagctttcaaatgagctattaaatgtatggagaagtcaagttttcaatattttcaattttttacgattttttgaaatatattattaatccctaggggtcgtatgagacgggggcctggggttcgagtccgcttggctgcggtttatttttttatgacacttgatgaaaatcatagacaaaatgaaggttcatgcataatcagagcttagattcgtgatcagagtattttttaacccaaattcattgctaaacgttttaaaaaaataactttaaaaatcgaaaaaatcaagtagttgacaaaaaatcttagataaaaatcaatgattttcaaaacttgagctcagattcgtgatcagcgcattacccaaagttaattatttaacaaattttttaaactgtatttttttaagtttttagtttcggttgaaaatcaaggtcccgatctaggcttttctggccccggtaagatacagtccattttttcctaaatcccatggtagagaaaaaggagaaaatacaaaagggaaaaagtaaggcacattttgatgccattttcggttatcgcctgttgcaaatgcttcttcagttggtaagccctcgccgtgctctgatcgctttattccgtgcccccaacccaaccgaacattatttggcctttctcgacatattccgaatcggtgccatctgttgggtgataagcaatcatctcggcagtgaaggcggtctcgatgtgcttttgngacttccgcacggcgaacatttcaattaattgcaacaattaattaaatcactgacttattaattgtttagacagtccgtccattcccttcccatctttggccccattttttggttgtttagagcttttgaaactataattcgttttatacaattaattcagagcaatgatcattcagcagttgtttttgcatact

SEQ ID NO: 5699 - DNA, 3552 bp, Heterodera glycines
tgtgcgtaaattgccctttccattggaattttttacgtcgtccataaaaatgaatgatttctcagcttccatcaacaaatagcagcgaattgcactggagctcagttcttctctttcgcgctgcttctcaacaattggagtcgtcccaattgcttcggctatttgtggcactttggccttgattggcaatgccatttaatcgctccctttctcctccatttgctcttccggcgacaaagcgtcggtttgattgtcgtcgccgttttgatcatcggttcgatgtgtcttcgtgctttcaaatgcgtctccaatggaatatgcaataaaagtgacgtggacattccggtgggttcactgctttggacattggcatactcattgtcagatagcataagactcaatgttatgtaaagaaaattgttatcgaaaatataccaagaaatcggacccattcgcttgcttaaaccatctcttcctcttccaatgcgtcagttcgtctccgtccgtcctgagcatgtgtcccttgtccaaatgtacatgcgtcccatgacaaaatgtggtccttttcttgtcggccttctcctcggtgtgttttctttgtctctcaccgattcatcgccgccaaaatgggccgaaaagctcaaaactcagcaaaaaaagcttttctgtgcgggtttttgtcttgcggtcggttgtgtttatgggattctgccggagtattggtacccaaacgacggagtcactctgtacaacactctctacacggcatccttccgaacactgttcgcttgtggcatcggactgatgatgctcagctgtctcctctccataaaaaggtctttaatatgtcgtcgagtttcccgtgccccattttttatttttgttataaaaatctgtgagctataagaggcatcggattgtttagcattaacccagccattaggtcaatcagacccaatcaaaatctaaaagcagactgacccaacgcagagatctagcagcccctcagggtaattgggtggacttaggacattgggtacagaccgaggagcaaatgacagcaaaacaaaagggaggggacgaggaaacgataaaatatgcaacaaacagcaattaaattcccttttgttcattttttccctttttgggcttattttggaggaattatgttcttataaatataatattacatttttatttacgtagcatcgaaaattttttatttcattctaaagctatttttaataataattaatagtaaaatgtccgctgtcatgatgtccatttgtccacttctgtccaaatgtccgttttctctttcttttcagcttttttcggcctcgtctcatccatcgaattttcgctgtgttcgcccgtctgactttctccgtcgctctcactcacatgcccatcgtttttctcttcacgcgtatcactgccttccaagagacagaatcaccttttagcttaatcatcgcccttccccccgcaattttaatgagttttacggtcgccacaattttctattgttttatccactggccaatttcacaaattatttcccgaataattaaataaattatttaaaatttccatgccgcagaatttcgaattctcttaatttttaaccaacttcaatttcaaagcatcagaaaatgtgaaaatcagaaagtatttttgcttttaaacgttcgttgatcttcttaatttcggccttcgtcttttctgtgacattctttcgtcggatttcactcgcttctcgcctccccttataaaaaggcaattgccacaataaatataatttattagtaaaactgtataaggggtttcggtacttttcagttttgggcctacacctcaaaattttaaaaaaatatcagcaatgggcgcgattaatgtacattttttgacaatttccatagcataaattaaagtagcgataaaggacctctcctcttcggcgttgctcataaattattgaatgtgacttttttaaaattttgagttgtaggcccaaaacggaaaagtaccggggtttcaaggcggaaaattgatgcagttagaattgcctaattatttctatatggagaaattttatggtacttttccgttttgcggccaaagtttgatgcaaaatgcgcgcctctggacaatcatttttttgtaggaaatttactgcggtaaattcatttgttttttttctgaagaggattataaaattatattatcaatcgtggaggaagaatgagggggaggacatttattcataaaaatggtgggaaagcaaatgccctttcgttaatttatgcaatggaaacgaagattattacaattctacgcgcccgctgttgatttaaaaaaaaaaaccgcttttcccaccttttccagtgttctcggcctttccaatgcgtaagccaccagcaaatgtttgaagccaatttgcagactttccatggtcgcccaacttatctcgtcgtatcccttccatttgatcaaatattgaggcgcttccttccccgaattctttcttcgtcccatcactttttccacttcgtacattaccgcgttttcggcccatgcctttcgctttctgacggcttcttcaaactccaaaattgcttcgacgtttccctgaaatgcaatggctttctttcttccgctgcttcgtccgcttttcctaccaacgaaattcgctggtcccaacttctatttgggctttcattgcttctcactcccgcttcatccggccataacaccaaatacgacgctttttctttgtttctgtccaatttgttcaaaactttggccgctttgacaacgacttcagcagttggggaagacgaagttgggaatttatggctgattgtgagaggaaattggccttggtcattgccttcggatggatcttctaaatcctccattggtctctttccttcccccgtgttcttcgtatccgtccagaattgtatatccttaagcgatttgttcttttaataattttgcatacaacaataaagaaagttccgaaaactttttaggcattttcaatatttgggtaaaggatttaggaacggagtgtttgttgtccagttttggttaaatttttgtttgttggagtttcgaattcaatagcaattgcctgtaaaatatttggaaatcacttccattggattggatttgaactcggaccccccccctccccatattatttaaactgtaatttcttagggaatacaactatgtatacaaaatcttgaaatatttgtgttgcttggtactttatgattattattgccatttaaaattgtttaatatcacctattcgaggctggtacgcatcggccccccgacgatgaggcctaaattggcgtcgtcacatccgtcgtaatttctggcacttcattcgcctcttctgtgtgttcctcctcatctcctgagctcgataaatgatgttgttggtgttgtcattttttgctgaagttgttaaaaaatgttttgttgtttttgccgtgaaatttttgttcgaaattttaatggacactaaaattaaaa

SEQ ID NO: 5700 - DNA, 1474 bp, Heterodera glycines
ccccccccccccccccgccccctccccctggccaattccctcgccttcgcatttagttgctcaaagcgttccaccaattcgctgtaatccggcagcaaatatttgaccttctcccaagtgggcactcgccagccaacccatttgaccaaatagcgcagttcgccctgcaccgttctgtccaaaatggcctccacttcgtagtcggtgaattcccacgcttttttcgcgtcttttgcgattgattgctcaaaaactttggccaattttctgcagttctgtcaccaaaattccacgctgataaaaaccaacaactacaattttttgctaccggtgacagcttattggcccattcccacgtcgtcgaaggacccttttcctccgcacttccgcaattccattgcaccaaatagcaagaagcacggtcttcgtagtcaatttttttgagaattttgactgcatgacgcggagtttttggaccaaaaatcgcattcattagtaaatcgatggaaaaactcacttttaattttggcgattgaacacaccgacccaaggtcattttccagcggtgagaaagggcgttttcgattcttttctctgtgaatgctagcatttctgcttaatggagtaaggcccaaatgttgaacattttggagcggggaaggcaacggaacactcaaaggcgtaaaactcaaattctgaacatttatcttaaaatgattaacataaattaaaaccgttatgcatttaaaaatgccttatcaaattgtgtaaaactcgacgaagtttggacacttgacgaaaaactcgttgattgaagcggcgacgacagatatttttttatccatgaatcattcattgtgaaaaaatatcaaaaaaaacatttttaaaatatggaaaatacgaaaagcccagtctgatttttttctaattgtttttttaatcagatttgtgacaaatagcaaaatgggctctattgcagtttacatgatcataaaaggaaatccgaaaaagaaataatgcattttcgatcttttttgttattgtacaggttaatgattcggatttgcctcttggttttttatttaaatttgaataggtaggtaattttaaaataacgcaaagaaattttggctctattatgccttgtcccccataaattttttgaaatattacaatttttagagtcgggtagaacattttttcttatgttttcggggtcgctgatcaagaatatggcatccatttcgacccatttcaaatccccaacctgaattcgaacaaaaaatcaaaaactcaattttcaataaaaatcaaatttattacacaaaaccgattcaatgccacgaaatagccgttcgttggccgtcgcccgcctccaattccaaaatttaccggctttctccattgctgtgcattttgtgcaataaatatgaattttattgaaaattgagtttttgattttttgttctaattc

SEQ ID NO: 5701 - DNA, 1021 bp, Heterodera glycines
  unsure (1)..(1021): unsure at all n locations
aaaaggaacattatccatatagcgcccgaaattttatgcaaataatgtttagatggtttaatataaaaattgaatcatgatcaacagcattttcattgtaaattcttctcagtgagttcatcaatgttttattatttcagtcaaagggtgatccatcatttaatccgttttctttagtgatgttatattggaaaagcactacaaatcgtcatccatcgttcaatttgcgattatttttttgatgtccaaaaacaatcaccaaatgccgaaaacattcctccggtcattgcggcaccgcaccattacctttacattgtccaccacaacagcctgtatttcatagcaatttgcgtcacagaaagtatgaataagtctcattccaaaaaacaaaaacattcagctcctccattaatggttattgaggttctgcacaggataattgctattttcaccgaatattttgacgaatgttcggactctgcgattaaagaaaatattgtcattgtttttgaggtcagtgtggccatgcattatttgttgcttcatcttttacacttttgagttgctcgacgaaatcctcgattatggttacccattgtgcacagagttaaatgtgctgcaggatatgatcaaacctccgaattttttacgttccttaaaaaaccaagtcacaggacggacaaacatttcagaaatcctaccaacaggccaattatcagtgattctaacattgctataaaatttggatttggtatttttgcagaatgttccatggagaagagctgctgtaaaatatgcaaacaatgaaggcgagtgttaattttgggtgggtttgttgtcaaagggtagcgaattggcccaaatttaattccttaaaataactcaggattactaacacagaaaatattaggctttattacattttatgtatccaatcaaaaaattttttcatgaaaaagaaaatgtaatgaaatatgataattgtatggcgaaaaantgtatttaaaaattttgaaaattt

SEQ ID NO: 5702 - DNA, 5502 bp, Heterodera glycines
  unsure (1)..(5502): unsure at all n locations
tccattaaacaccatcttttttgaggcagacaatcaatgaanctcacacctttcggttgtaattagtggggctgttagtggaatagaaatgttaaattttttgcctatcaaatattcgcaataaatgcccatctatntaaaaaatattctattctattaaaatgttctgtattttgctatatattaagaatagccgtacatctaaaggcgtcagtaattgaacaaatttctcaaatttcaagaaaggttccggcagtcgccgtaaaaattgtctatataaaaacaatggcgatacgcatttctgcactaggtcctttttcaaaattgatgtgcttttattgaaaaaacatgtttaacgggccacaaattaatagacaaatttaggcacattcttaaaaaattctgcttttaattagttcatttaatagattatgcttttgctttgtttttttaaattctacgcccgcgattatctgataggacaatgatatcaataaattttcttctgaagaagcgaagagttagcccaaacgttttccttcctttctatttaatgatctatcatttcagatataacagtcaaaatttaatcggccggctaaaaatgaattcggtaggattttatgaaaataatttgaaaaaattgaaaatttctttcaaagatttaatggaagctagtagaaggatacctttttgagtaatattccagatgttgccaattgtttaatggcaccccatacctcaaaaaagcattattctttggctaaaaaatatcattagaaaatagcgggcgtacatactgaaaaaactgttcttataattttaattttacaattagaaacgccaaaggttacaattatagtaaatgccaaataggttgtaagaataggctcatttgctacaatttagaacagaatgtaatcggcaagaaagggtttttaaactaatttcaatgaaagaacttcataacaaataaattaatgacttctctaaatgaattgcctgcaataaaaatgctaattttctaaattcgcatgtgccaaccttgagcaccttccattaaacaccatcttttttgaggcagacaatcaatgaaactcacaaccttcggttgtaattagtggggctgttagtggaatagaaatgttaaattttttgcctatcaaatattcgcaataaatgcccatctatttaaaaaatattcaattctattaaaatgttctgtattttgctatatattaagaatagccctacatctaaaggcgtcagtaattgaacaaatttctcaaatttcaagaaaggttcaggcagtcgccgtaaaaattgtctatataaaaacaatggcgatacgcatttctgcactaggtcctttttcaaaattgatgtgcttttattgaaaaaacatgtttaacgggccacaaattaatagacaaattcaggcacattcttaaaaaattctgcttttaattagttcatttaatagattatgcttttgctttgtttttttaaattctacgcccgcgattatctgatatgacaatgatatcaataaattttcttctgaagaagcgaagagttagcccaaacgttttcgttcctttctatttaatgatctatcatttcagatataacagtcaaaatttaattggccggctaaaaatgaattcggtaggattttatgaaaatagtttgaaaaaattgaaaatttctttcaaagatttaatggaagctagtagaaggatacctttttgagtaatattccagatgttgcctattgtttaatggcaccccatacctcaaaaaagcattattctttggctaaaaaatatcattagaaaatagcggggcgtagatactgaaaaaactgttcttataattttaattttacaattagaaacgccaaaggttacaattatagtaaatgcctaataggttgtaagaataggctcatttgctacaatttagaacagaatgtaatcggcaagaaagggtttttaaactaatttcaatgaaagaacttcataacaaataaattaatgacttttctaaatgaattgcctgcaataaaaatgctaattttctaaattcgcatgtgccaaccttgagcaccttccattaaacaccatcttttttgaggcagacaatcaatgaaactcacaaccttcggttgtaattagtgtggctgttagtggaatagaaatgttaaattttttacctatcaaatattcgcaataaatgcccatctatttaaaaaatattctattctattaaaatgttctgtattttgctatatattaagaatagccgtacatctaaaggcgtcagtaattgaacaaatttctcaaatttcaagaaaggttcaggcagtcgccgtaaaaattgtctatataaaaacaatggcgatacgcatttctgcactaggtcctttttcaaaattgatgtgcttttattgaaaaaacatgtttaacgggccacaaattaatagacaaattcatgcacattcttaaaaaattctgctttttaattagttcatttaatagattatgcttttgctttgtttttttaaattctacgcccgcgattatctgataggccaatgatatcaataaattttcttctgaagaagcgaagagttagcccaaacgttttccttcctttctatttaatgatctatcatttcagatataacagtcaaaatttaatcggccggctaaaaatgaattcggtaggattttatgaaaatagtttgaaaaaattgaaaatttctttcaaagatttaatggaagctagtagaaggatacctttttgagtaatattccagatgttgccaattgtttaatggcaccccatacctcaaaaaagcattattctttggctaaaaaatatcattagaaaatagcgggcgtagatactgaaaaaactgttcttataattttaattttacaattagaaacgccaaaggttacaattatagtaaatgccaaataggttgtaagaataggctcatttgctacaatttagaacagaatgtaatcggcaagaaagggtttttaaactaatttcaatgaaagaacttcataacaaataaattaatgacttctctaaatgaattgcctgcaataaaaatgctaattttctaaattcgcatgtgccaaccttgagcaccttccattaaacaccatcttttttgaggcagacaatcaatgaaactcacaaccttcggttgtaattagtggggctgttagtggaatagaaatgttaaattttttgcctatcaaatattcgcaataaatgcccatctatttaaaaaatattctattctattaaaatgttctgtattttgctatatattaagaatagccgtacatctaaaggcgtcagtaattgaacaaatttctcaaatttcaagaaaggttcaggcagtcgccgtaaaaattgtctatataaaaacaatggcgatacgcatttctgcactaggtcctttttcaaaattgatgtgcttttattgaaaaaacatgtttaacgggccacaaattaatagacaaattcaggcacattcttaaaaaattctgcttttaattagttcatttaatagattatgcttttgctttgtttttttaaattctacgcccgcgattatctgataggacaatgatatcaataaattttcttctgaagaagcgaagagttagcccaaacgttttccttcctttctatttaatgatctatcatttcagatataacagtcaaaatttaatcggccggctaaaaatgaattcggtaggattttatgaaaatagtttgaaaaaattgaaaatttctttcaaagatttaatggaagctagtagaaggatacctttttgagtaatattccagatgttgccaattgtttaatggcaccccatacctcaaaaaagcattattctttggctaaaaaatatcattagaaaatagcgggcgcagatactgaaaaaactgttcttataattttaattttacaattagaaacgccaaaggttacaattatagtaaatgccaaataggttgtaagaataggctcatttgctacaatttagaacagaatgtaatcggcaagaaagggtttttaaactaatttcaatgaaagaacttcataacaaataaattaatgacttctctaaatgaattgcctgcaataaaaatgctaattttctaaattcgcatgtgccaaccttgagcaccttccattaaacaccatcttttttgaggcagacaatcaatgaaactcacaaccttcggttgtaattagtggggctgttagtggaatagaaatgttaaattttttgcctatcaaatattcgcaataaatgcccatctatttataaaaatattctattctattaaaatgttctgtattttgctatatattaagaatagccgtacatctaaaggcgtcagtaattgaacaaatttctcaaatttcaagaaaggttcaggcagtcgccgtaaaaattgtcatataaaaacaatggcgatacgcatttctgcactaggtcctttttcaaaattgatgtgcttttattgaaaaaacatgtttaacgggccacaaattaatagacaaattcaggcacattcttaaaaaattctgcttttaattagttcatttaatagattatgcctttgctttgtttttttaaattctacgcccgcgattatctgataggacaatgatatcaataaattttcttctgaagaagcgaagagttagcccaaacgttttccttgctttctatttaatgatctatcatttcagatataacagtcaaaatttaatcggccggctaaaaatgaattcggtaggattttatgaaaatagtttgaaaaaattgaaattatcagtcaaggatttaatggaagctagtagaaggatacctttttgagtaatattccagatgttgccaattgtttaatggcaccccatacctcaaaaaagcattattccttggctaaaaaatatcattagaaaatagcgggcgtagatactgaaaaaaactgttcttataattttaattttacaattagaaacgccaaaggttacaattatagtaaatgccaaataggttgtaagaataggctcatttgctacaatttagaacagaatgtaatcggcgagaaagggtttttaaactaatttcaatgaaagaacttcataacaaataaattaatgacttctctaaatgaattgcctgcaataaaaatgcttgcacgtgccaaccttgagcaccttccattaaacaccatcttttttgaggcagacaatcgatgaaactcacaaccttcggttgtaattagtggggctgttagtggaatagaaatgttaaattttttgcctatcaaatattcgcgataaatgcccgtctatttaaaaaatattctattctattaaaatgttctgtattttgctatatattaagaatagccgtacgtcggaaggcgtcggtaattgaacaaatttctcaaatt

SEQ ID NO: 5703 - DNA, 3033 bp, Heterodera glycines
aaaaagttgtcagtttaaaaccgcaaaaaaggcagaattttcaacgttttttatttttatctttttttatagttcgaaattttctgtaatttttagtaggctaatagagcctgtgaagaactttcgaatgatatcaagattgtttgattcggtcaataacttcaagagttatattgactcaaagttggctcagacggagttggccagacggagttggccagacggagttggccagacggagttggcccgttccgcatattttggagcttttttggcacatataaatccgttccatggcaattacaacaaaaaatagaacaaaaaaaacaaccttcaaacattaatgcataatacttttaactcttacataagcaacaaattggaaaatgaatgaaatgccgaataatatataaatttttaagaaatttaaatttatcaaaacctaacaatgaatggccctgaaagcttaaattcccagtcaatccgtgacaccttcactttttctcttgaattcagatttatatctttctaaagatctttttgtaatatttaaaatttccgcaatttggcgatcgttgagctttgggttttggtttttcaattgataatattgttttattttttccgttttttccgcaaatgtataatgcttctgccctgtaatatattaaataataaaaatttttaaatttaattaataaataacaatttgtttaaaaatttcaccctttgaaagaatttgatttaagccaattttcttgtcccatttttcaattgtctgaaaaatcacaccaaacttttgtttaatttttgctctaaattctttccattcttttcgtgaatgttttccattttgcataaattctttttttaatttaaaatatttttccacaatttcaattttttgctcaaaaattctttgatttttcatagttttcccattttttatttctttcttccatctattcatacttctgatatttgtgcccaaatgttttgctattattttttggcattttgtcctttttccttccaatttttcattaaatttcgtttttaatttgccatatatttgatcaaattgctttaacattattcttttttcttcaactgaataatttttgttcttcatcattccaaattctcttttccatttgtaaattttctcttgactgacgcccaatttttttgcaatttttctttcaattttcacccattcttttcttggatatttctttcccatttgcttaattttctccttaattttatgaaatttttccacaattcctctcttctgtttgtcatttaaaattcgaatttgatcataaatttgttcattatttgttggcattggcaattggtcgcccaattcatcataatctgtggacatttcttcactctcctcttctttcacttccacattttcatcaaaaatctgatcaaattgtcgaacattttgtccaaattggttattctgatcagcaatttctccatgaattatttgatcattttgacagatgttttcttctgctccgtcgtcccatctttggccaaatatttcagcaaaacttttttcttggattattttgccagcctcaatttggttaattgcttttttgaatattaatgcgcataataataaaaatattaataatattttcatttttttgtaaaaatataatgaattatttttataaaaatatttttcgcaatgaattttgtaattattaattttatagcatggcttaatttttcttcaatcaatattaaccacatttaatcattatttcattaatttgacaacatttttataataattcaattattaaattttccttttatcagcgaattgggtagtaattaatatcagataactataattatggaggtttttaaggtaactatcacaaatatcacattttcgttctcatctgatgtattaattcactaatttttttagcacatattttggggattttttggaaattttatttttattttttacgaaagtagcttttttgcactcaaattcttggcaagatatccaaaaatgttcaaaaattttcttttttttctttttgcactttttgaccgttttaatggcttttttaatttttaaggcaaaatttgaattttatcaatgaaaacagaaaaataaataaatatttgaagcgagaaaaatatttacgtcacaaagaattgaaatgtttttgattagaatcgtactagcgaaacggataaaaaacgtgattttttcgataaattcacttattttttcgacagttttttttcaatttttcggcacatatcgttggcctttttgagctttttagggtcgggggtcgttttcgcgtgggtcgttttcttggtgggtaagactctttttttggagtctgaaagcggatgcggatctggcccgtattctagaaaagtaccattgtttttcgttcgtttctgaccattaagcaaacccctaaaatctatccctagtaatgatataaaaaataattagcttacctatatgtattggaatttgattttgaaacaaacgaagcttttgaaatagcaggctaatagaaaattatatattgattctattcggttttttcctcgaacagattttttcaattttgcatttatataaaaagttctatcaaaaatggcgaatgttgatttggcattggatgaaattatctcgaagtctcgccctcctcctcctcctcccgcaccacaacagagaaactttggtggcaagcgaccatttcgaatgaatgctaccaatcgtcccgggttcggtcgacgcaattctttgggtggtggccaacgttttatgcgttccggaagtgacaatgctgtttggattaacatcgtcaaccttcacgacactgtgcttactcaagaccttcaggtgcatttcccatatacctaaattacatttccattctgtctcatttaaggaacttttcgaagattacaatgtttttggaattgtgtgcattacgacaaatttggcgctcatatgggaactgctga

SEQ ID NO: 5704 - DNA, 3550 bp, Heterodera glycines
attttaaataaaatattctgttatcctgttagaaaataaatatatgaacggattgttaagatccgtacaaacaaaccttttttcactagataatcagtaactaggtttttgaaccaactcttagagggttcataattgtacgaaagtaattttttacacagtgactccagcctgagcatatttctacaagaaaagtacaaacaatgacggagttagcccccaaaaattcgattactctgaagggttccgcacaaatggtccagcaattcttccattacggcattcacagcattctctaccagcgcggcatttacccatccgacaattttacgcggttacccatttaattatgcaaaaattgtttttaaatttttcttttagtgacaaaaagtacgggatgacgctgctggtgaacaaagacccgaagttggagcagtttttaaaccctctccttcagcacgttgaggtttcagacaaatttggagcgaatggaatttaattacgttttcgcgcgaagatacgccccacgcgaaaacggcctggcccggctttttagcacatattttcggtaggggtcaactccgtctggccaactccgtctcagcaatgttcaaaaagctataacttttttctttgttggccaaacttcacaatcatggtatcattcgaaagccctagatgtttagaagatatttataagctatttctcagtgattaatcagctctcaaaaaagttgtcagtttaaaaccgcaaaaaaggcagaattttcaacgttttttatttttatctttttttatagttcgaaattttctgtaatttttagtaggctaatagagcctgtgaagaactttcgaatgatatcaagattgtttgattcggtcaataacttcaagagttatattgactcaaagttggctcagacggagttggccagacggagttggccagacggagttggccagacggagttggcccgttccgcatattttggagcttttttggcacatataaatccgttccatggcaattacaacaaaaaatagaacaaaaaaaacaaccttcaaacattaatgcataatacttttaactcttacttaagcaacaaattggaaaatgaatgaaatgccgaatgatatataaatttttaagaaatttaaatttatcaaaacctaacaatgaatggccctgaaagcttaaaaatattctcagtcaatccgtgacaccttcactttttctcttgaattcagatttatatctttctaaagatctttttgtaatatttaaaatttccgcaatttggcgatcgttgagctttgggttttggtttttcaattgataatattgttttattttttccgttttttccgcaaatgtataatgcttctgccctgtaatatattaaataataaaaatttttaaatttaattaataaataacaatttgtttaaaaatttcaccctttgaaagaatttgatttaagccaattttcttgtcccatttttcaattgtctgaaaaatcacaccaaacttttgtttaatttttgctctaaattctttccattcttttcgtgaatgttttccattttgcataaattctttttttaatttaaaatatttttccacaatttcaattttttgctcaaaaattctttgatttttcatagttttcccattttttatttctttcttccatctattcatacttctgatatttatgcccaaatgttttgctattattttttggcattttgtactttttttatgcaattttccatttaatttcatttttaatttgccatatatttgatcaaattgctttaacattattcttttttcttcaactgaataatttttgttcttcatcattccaaattctcttttccatttgtaaattttcctttgatttactcccaatttttttgcaatttttgtttcaattttcacccattctttcgttgaatatttctttcccatttgcttaactttctccttaattttatgaaatttttccacagtttctcttttatttttattagtttcatttgaaaaacgatcacaactttgtccattatttgttggcattggcaattggtcgcccaattcatcataatccgtggacatttcttcactctcctcttctttcacttccacattttcatcaaaaatctgatcaaattgtcgaacattttgtccaaattggttattctgatcagcaatttctccatgaattatttgatcattttgacagatgttttcttcttctgctccgtcgtcccatgtttggccaaatatttcagcaaaacttttttcttggattattttgccagcctcaatttggttaattgcttttttgaatattaatgcgcataataataaaaatattaataatattttcatttttttgtaaaaatataatgaattatttttataaaaatatttttcgcaatgaattttgtaattattaattttatagcatggcttaatttttcttcaatcaatattaaccacatttaatcattatttcattaatttgacaacatttttataataattcaattattaaattttccttttatcagcgaattgggtagtaattaatatgagataactataattatgaaggtttttaaggtaactatcacaaatatcacattttcattctcatctgatgtcattaattcactaatttttttagcacatattttggggattttttggaaattttatttttattttttacgaaagtagcttttttgcactcaaattcttggcaagatatccaaaaatgatcaaaaattttcttttttttctttttgcactttttgatatttttttaatgacttttcttcactctcttcttctttcacttccacattttcacccaaaagttcgatcattttgtccaaattggctattctgatcagcattttgtccatgaattaattgatcaattcggagttctgttctttcgtcccatccttggccaaatatttcatcaaaattttgttcttgatttattttcccagagttaatttgctcaattacgttttcaaatattattaggaatagtaatgataatattaggaaagaagatttcatttttttggccgttttgacccaaaaaaccggaaaatttttccataaaagacattttttatcaaaattttgtcgtaaactagcggggtcagagcattcggaagaaagaattgtccaattaaaagctggcaaatgttcacagatatggctgaggtattttgatcaattaggcgccaaaatgatcattagctcttggataaattagtcagtgtacgcgtatgcatttgacgcctttttttatgatgagtatcaacggcataggtaacggcggaatgtccgagtaatcgcgacacacacgaacggtctcgggataatttgagaaatttcctaaaaattataaaaaaataaaggctaaataaatatttattttatgatattaatgtatatgtaattcagttataaagcattatattacgcagaacgaaaaaagcactccgattccccttactatat

SEQ ID NO: 5705 - DNA, 1710 bp, Heterodera glycines
aatcactagggactcaacccaacagcatttcaatcactggggactcaaaccaccagcatttcaatcactgggactcaacccaccagcatttcaatcactgtggactcaacccaccagcatttcaatcactgggactcaacccaccagcatttcaatcactgggactcaacccaccagcatttcaatcactgggactcaacccaccagcatttcaatcactgggactcaacccaccagcatttcaatcactgggactcaacccaccagcatttcaatcactgggactcaacccaccagcatttcaatcactgggactcaacccaccagcatttcaatcactgggactcaacccaccagcatttcaatcactgggactcaaaccaccagcatttcaatcactgggactcaacccaccagcattccaatcactgggactcaacccaccagcatttcaatcactgggactcaacccaccagcatttcaatcactgggactcaacccaccagcatttcaatcactgggactcaacccaccagcatttcaatcactgggactcaacccaacagcatttcaatcactgggactcaacccaacagcatttcaatcactgggactcaacccaccagcatttcaatcactgggactcaacccaccagcatttcaatcactggcactcaacccaccaacatttcaatcactgggactcaacccaccagcatttcaatcactgggactcaacccaccagcatttcaatcactgggactcaacccaccagcatttcaatcactgggactcaacccatgggactcaacccacaagcatttcaatcactccagaattcaatctcaccaattcttcgaaacccaataaccggaaatgaatgataaaaccgaaagcggctcgaccgcttagcggcctcgcactcttcttttggcattttcttatggcataacagttcttccttgtttcttgacattttcttacgacacaacatttttcttctatacaaatttttcaaacaaaattctcattcattcatttaaaatttcattaccatttacataagcaaaacaaaacctttcatatcaaaatcaaatcaatttataacacaaacaataaagaaagaaaaagaaacatttttaagactgtttttttacacaaactgacaaaagaaaaaaatgtaaaacaaaaacatttcatttttcaaagcattttatacaacacaacagaatgttaatattataggattttcttactgagcaaactaaggagtgcctctttcttttattaaatattttataaaataaaagatggcatataaaggtgctagcgcgtttgttaaaaactgccacccatacgcgtttgttaaaactgccagcgcgtttgttaaaactgccaatgggtttgaaaacaaaaaatgggtaaaataattaaattaatagcttggctcaaattcaaccaaattaatatttcgtggtatcattcaatagctttaattgttctctttcagaatataattttccaaaatttttaacctaagtataaaagaagttataaagcattgaacaggctatgttttttgcaatggtaatgcatatataataataaacatttaaaattttaaagtctttaaaatgaaatttaaccaaaattaatttatatttcgaaaggcctaagaattctctatttatatttaaaattttagaaa

SEQ ID NO: 5706 - DNA, 1260 bp, Heterodera glycines
  unsure (1)..(1260): unsure at all n locations
gcaaaatgatgtgataatcagcagtgttggctaccctaagtatcaagcttcatgtcaaattggacaattttcattcaattttcacgaatatactgacttacaaagccttatatgggattttttttattctcgtctgattatcaaattcttatttttctctctcaaatttttacaaaataccacacatcaaaacttttatttaatatcctatgaaattgttcaacaattacaaaatgaacaaaaaaatatataaagttataatccttcgctaaattggatcatttgaagaacaaaaaatgattcgatgcctttcaaatttcctggaaaacgtcagccgtatattcaaaacgtgcacactctgaaatgatgaattattttaaaattttattcaaattaaaatattttcgtttctattgaatgaaaaaattcgcttgaagtagaccaggaataaaagcataatactgatgaaatctgtggcaaaatacacaaaaggcatagcgcaaataaatttggaaaaaaataattacgggaaaacaccaaattggcatgactgtactttggaatgtgacttggtacgatcggggcccttgaaaaaaagtaattgcccccggaaatcgattggaggatttgtctcctaattttaataattctttcattattttttaaattaccaattcaattattaattacttcttcttttaaaaccaagcagtcaaaaggtcttatagaaattttaaaaggaattacattacatattttaattataaaaaaaccttttttaaattttgttagaataaatcaaatagcaaaattttaattattagtcttataaaaatccctttttaccgtttttgcaaattgactttttgtatagcctataattcttgatccgacatttgatgccaattttcgatcagtccccatcaccctctctcacctcatgcttattctgagatttactttttttttgctttaattaaagtctaagaaatagaaaaaatgaaagaatgtaaattaaacgaaatcaggcaaaaaaatgcccgaattanncatcggtatttataaattatttttactcatttttctatatgtataccaaaaataatatttatgcgttcaaattttttggttttgtgtattttnagtgcatataaatgcttattacatatttatggatgttttgttcaaaaaatgacanaattttatgattntgagccaattttttaagagaataagaatttttaggaggcggcgaaaatc

SEQ ID NO: 5707 - DNA, 1508 bp, Heterodera glycines
agtgattagaagaggtacaaaatgattagaagaggtacaaaatgattagaagaggtacaacagtgattaaaagaggtacaacagtgattaggagaggtacaacagtgattaggagaggtacaacagtgattaaaagaggtacaacagtgattagaagaggtacaacagtgattaaaagtggtacaacagtgattagaagaggtacaacagtgattaggagaggtacaaaagtgattagaagaggtacaacagtgattaggagaggtacaacagtgattaggagaggtacaacagtgattaggagaggtacaaaagtgattagaagaggtacaacagtgattaggagaggtacaacagtgattaggagaggtacaaaagtgattagaagaggtacaaaatgattagaagaggtacaaaatgattagaagaggtacaacagtgattaaaagaggtacaaaatgattagaagaggtacaacagtgattaaaagaggtacaacagtgattagaagaggtacaacagtgattaaaagaggtacaaaatgattagaagaggtacaacagtgattaaaagaggtacaacagtgattagaagaggtacaacagtgattaaaagtggtacaaaaattgaatgcaatttattataaatttaaaaaaataaattagtcattccttttattaattaaaaagagaattttgaaatgtacaagaattgaatatttaaattaatatgaaattaatttttataaattcaattaaaaaaaatatgaaattctttatttaaagataattattattttttacataaattcttttattattaatttacaaaaaatctttaaatataaattgatacaacagtgattagaataggtacaacagtgattagtaaattcattaaattaaaatgaaaatatttttaacaaatttaattaaaaaaatacatgaaattctatcaattaaaaaaataattaatttaaacttataaaatttatttatcaaaaaaaattaaattaaatataattttttatttattaactcaacaaaatattttaaattaattaaaatcattgaaaataacgtaaaaatgcacaaaaaaataatgttacaccgtccggattcgaacctgcccccccccctcaaaatgatgcctcagaatccccaatcacacagggattctgaggtcttgacgatgtcaaacgtaaaatctgatcacgtattcgtgatcagcggcccaaataacccctaaagacatgtttttggaagatttttgtcgaaaaaattttttcactcaaaaatcctatgctcacccctttggtcccgaatcccaaaatcacttttatttttgtaacatctctcaaaaaagtgataaaaatgccaaataaaatttatattatagagaaaaaaattgcggatttttgtagtattttacttttacagaatgacttttcagaagggagttctgaatttttttctgaaaaatctaaaatttccagaatttctggaata

SEQ ID NO: 5708 - DNA, 2609 bp, Heterodera glycines
ttagaagaggtacaaaagtgattagaagaggtacgacattgaaaaagtgatacaaaagtgattagaagaggtacaccagtgattagaagaggtacaacagtaaaaaagtgatacaaaagtgattagaagaggtacaacagtgattagaagaggtgcaaccacggaagggaaaggcacaacagtgatttgaagaggtacaacagtgatcagaagaggtacaacagtgatcaaaagaggtacaacagtgattagaagaggtgcaacagtgattagaagaggtacaacagtgatcagaagaggtacaacagtgatcaaaagaggtacaacagtgatcaaaagaggtacaacagtgattagaagaggtgcaacagtgattagaagaggtacaaccactgtcgaaaatgtacaataattgttggagaggtacaaaaattgttggaattgtacaacaatggttaaaaagggtacaatcatggttttaaaattaaataattaaggaaatcgtttattaaaaagtaagattaaaaattgaatgtaattaataaatttttaaaaataaaataaatttccttttattaattaaaaagagagtttgaaatgtacagggattgaatatttatttaaattgaaattaagaaattaatattacaaattctaatttaaaaaatataggagttctttaataaaagtaaataaattattattatgaagatatttggaattttaaaagattatctgggatttttaggccgcttcgcggcctcgaacgggcgctttgcccccgtttttcatattttgttttgctttgacgggcgcttcgcgcccgtttttaaatttggttgggccttttcggccgcttcgcggcctcagacgggcgcttcgcgcccgttttttaaacttgttgagatcggacgtgcgcttcgcgcccgtttttcatattttgttttgctttgacgggcgcttcgcgcccgttttttaaatttgttgagagcggacgggcgcctcgcgcccgtttttaaattttgttgggccttttcgcccgcttcgcggcatagtacgggcgcttcgcgcccgtttttcaaatcttgttttgctctaacgggcgcttcgcgcccgttttttaaatttgttgagctcagacgggcgcttcgcgcccgttttttaaacttgttgagatcggacgggcgcttcgcgcccgttttttaaatttgttgagctcagacgggcgcttcgcgcccgtttttaaatttatttgggccttttcggccgcttcgcggcctcagacgggcgcttcgcgcccgttttttaaacttgttgagatcggacgtgcgcttcgcgccctacaaaagtgattagaagaggtacaacagtgattagaagaggtataacagtgattagaagaggtgcaacagtgattagaagagtgatcagaagaggtacaactgtgatcagaagaggtacaaaattgttagaagaggtacaaaagtgattagaagaggtacaactgtgattgattagaagaggtacaaaaattgaatgcaatttattataaattttaaaaaataaattagtcattccttttattaattaaaaagagaattttgaaatgtacaataattgaatatttaaattaatatgaaattaatttttataaattcaattaaaaaaaatatgaaattctttattaaaagataattattattttttacataaattcttttattattaatttacaacaaatctttaaatataaattgatacaacagtgattagtaaattcattaaattaaaatgaaaatatttttaacaaatttaattaaaaaaatacatgaaattctatcaattaaaaaaataattaatttaaacttataaaatttatttatcaaaaaaaattaaattaaatataattttttatttattaactcaacaaaatattttaaattaattaaaatcattgaaaataacgtaaaaatgcacaaaaaaataatgttacaccgtccggattcgaacctgcccccccccccctcaaaatgatgtctcagaatccccaatcacacagggattctgaggtcttgacgatgtcaaaagtaaaatctgatcacgtattcgtgatcagcggcccaaataacccctaaagacatatttttggaagatttttgtgagaaaaatttttccactcaaaaatcctggtaccaccctttggacccgaagcacaaaatcacttttatttttataacaattcgcaaaaaagagataaaaatttaaaataaaatttatattataaagaaaaaaattgcggatttttgtagtattttatttttccagaatatcttttcagaaccgagttatgattttttttctgaaaattcgaatttttccagaaattctggaataacttttttccttttttagatagaaattccaaataaagtccataaaattctcctgatttttctctatttttaaggctttattcctgtaaaattgatcaacccttctatttgttatgaatttttaaatattaggccaaaatcccgagggccaaaaaattgtcaaaaaataaaaaatttttaaaaaattccaaaaattctgaaacttaaaatagacat

SEQ ID NO: 5709 - DNA, 2140 bp, Heterodera glycines
cccaaatttccaagggccaaaaaatctgccaaaaaataaacattttttaaaaaattccaaaaattttgaaacgaaaaataaacatcatattcgtgcccagcacatcaaaataccccagaaaaatatttttgacccccattttcaacccaaaaaaaattttcgaaaatttctagggggcttagctcgaaaatttttgaaaattttacatcatgtagtacactattcgatagcatttaaaatgctctacaaaaatgttctaagacaatttttcgctaaaatcaacccctgacgagttatgggcctgggactgaaatgtcccgctcaggccaaaaaaattttctatttccgggaaaaaattgaaattttttcaaaaatatcaccaatcgatagagctcgaaaaacggttgcttgaaagtggtctccgtttttctgggaaaattcgttaaaaaatcctaaaattcaaaaacccgaaaaccgttttttaggcctagctcgaaaaattttgaaaattttcgaaattttaaaatctggaaaaatcgagctcaccgagctctacaataagtctgctggccagcctgcgctcaagtcaaagcctaatgagttattcaacggggactgaactgggcaaagttggtactgaatttttgtagaagcacacagaccagggggttagagatagaggcctggaattttttttaacttttagccaacacttcaacttagggccctcacagcgagcattttttgatttgagttttaggaaaaaagttatgggccccaaactgcgagaaaaagtaagaaatccttccctgggactcagtcgtccgcgctgaatttttttctatagttttcccggatgcgccgtgaaaagttgtaagaccgatgcacaactttcagacccctaccgatagccgttctcgagattttggttttaaggatgagttgccttgtcaatataacatatatataactagcgggtgtgtgcatgcgagggtggcgcttgggaaagcgctgcgcgcttcttgagcttcgctacctagacaagctatgggttatgaagatatttggaattttaaaagattatctgggatttttaggccgcttcgcggcctcgaacgggtgctttgcccccgtttttcatattttgttttgctttgacgggcgcttcgcgcccgtttttaaatttagttgggccttttcggccgcttcgcggcctcagacgggcgcttcgcgcccgtttttaaatttagttgggccttttcggccgcttcgcggcctcagacgggcgcttcgcgcccgttttttaaacttgttgagatcggacgtgcgcttcgcgcccgtttttcatattttgttttgctttgacgggcgcttcgcgcccgttttttaaatttgttgagatcggacgggcgcctcgcgcccgtttttaaattttgttgggccttttcgcccgcttcgcggcatagtacgggcgcttcgcgcccgtttttcaaatcttgttttgctctaacgggcgcttcgcgcccgttttttaaatttgttgagctcagacgggcgattcgcgcccgttttttaaacttgttgagatcggacgggcgcttcgcccccgttttttaaatttatttgggccttttcggccgcttcgcggcatagtacgggcgcttcgcgcccgtttttcaaatcttgttttgctctaacgggcgcttcgcgcccgttttttaaatttgttgagctcagacgggcgctttgcgcccgtttttaaatttatttgggccttttcggccgcttcgcggcctcagacgggcgctttgcgcccgtttttaaatttatttgggccttttcggccgcttcgcggcatagtacgggcgcttcgcgcccgtttttcaaatcttgttttgctctaacgggcgcttcgcgcccgttttttaaatttgttgagctcagacgggcgattcgcgcccgttttttaaacttgttgagatcggacgggcgcttcgcccccgttttttaaatttgttgagctcagacgggcgctttgcgcccgtttttaaatttatttgggccttttcggccgcttcgcggcctcagacgggcgcttcgcagcccgtttttaaattttgttgggccttttcgcccgctt

SEQ ID NO: 5710 - DNA, 1712 bp, Heterodera glycines
ataaataaaaaatggaaattcctttaggcatattccatcattgtcaactatccaaaacggaccagcattctgtcatggcttggcattggtctgctggtgctttttcatttgggctgctgcttgggacgcctcagcaaacggacgacgtacaacgagctgaataaccaatgattgatttgtgattgatcactctgatcagaaaaaaacaattttgtttaattatttaccatattttttattaggattaacagaacctgcgattttttaaaattttaaacctgaaaattttttttcaaaatttcgatcagcagcaacatttgttgttacttaacaagactgtactaatagagatacagaaaaggcttttgcattgacaaggaactgatcatgcaaaatctgatcactcccaaaaactgactaggacaataaattattgcaattaatttgtgatcattctcaaaagttttttaaatgaattgtgatcagtcccaataagttttgggttgcgggtatgctcgcactagcaaaaatcgagagtcattgtgccgttgatcagtcttatcggtatccattcaggcaaaaaatattctcgaggatagtctaaaatcgaaaattactcattgctcattgttttaatttaacgaaaataaaattaaaaactgacccggaagcaaattcgaattgatgttgtctcagaaagtgagaaaaaataatttaataatttgcaaaaaaggtaaaatatgcttaacaaaaaatgaaggataaaaagtgaacaaaaaattttgttaaataaaatttgtttttccaaagggtcaagaaaatctttttgaattcgaaagcgcagcttcactctctgattttaccgggataaggtgtaaaaagcattttagtttgacttttatagccccattttgccttttttggcattttgtgccgaaaaggtttttagatttcttaacggaatacaataaaacgtaaaattggcacctcaaaagatgactttaaccattaaaaatgatggatggataaattacttaaaatcaccaccaaaacaaatttttcttatgaaatttgattttcaggttttttaattaaaacaattaaattgtgcctaggaaaaggctttatatgtgcttttaaagagaatttgcgatgatttcaaaatttatataaatcatttttaattttagccgatttgcagttgggaaattagttaaaaaaagaattcaaaactccgaatttttgctctttcatttcgaaaaaaactatcgaatttttcttttatttttaccttatttaagtgaattctaaattctttatcgatccttgttttggttaatgataagtcaaccaaagagaaaaaaatgcattaaaaattgactatttaattgctttcaaatggagcactttcgcttacgaccataccacgttgaaaacacgccatcccgtccgatctggcaagttaagcaacgttgggccttcttagtacttggaacggagacgtcctgggaatcgaaggtgttgtaagcttttttcttttttaattttcatatttaaagaaaataacttattttttgttgaatttatctgctcagcattatatgtttttattctgtataaaatctatttttcttcattattaacatttatttattgtctcagaaagtgagaaaaaatattaaataattttgagaaaaaggtaaaattgctaa

SEQ ID NO: 5711 - DNA, 5154 bp, Heterodera glycines
ataataactagggctgtgaattttaggttttaactaaattttttgctcgattgatttgaagaaaggagctcaaaaaacgcatttctgcattaaaaattttcgattctgatgtcactatcggtcactagaaatcactattttggctacttcgtcactaaaatagttaaaaatcactattttggcgttttgtcactatttcgacattttttggaaaattccttaacaaaaatgcaataaaaccaaaaaatacacccctaagaatcgacctaaaaattttttcaaaaaatacacccctaagaatcgagctaaaatttttcaaaatatactcctatgaaatgaaaaaaagttttctcaaaaatttactttcttggcaaaaatttttaatttaaaaaatttttttaggtaactattttgggttttttggtcttaaaaatcccagtcctactcatttgcaactgcaatcagtgaataaaaattatttttgctcaatttttggctgaaaatttgtcactattcgtcactatttcggactttttgccactattttgtcactattttaacatttttactcactattttagttaactatttcgggattttttgtcactaaaattcacagccctaataataactattaggtggaaatattccctaatctgttgtgcacatttgtgtcatttttagttgaatttgaaaaaagttacaacaaaaatttagtggtgcaggacttatttgtcacgctgtataaatttaaataaatatcacaataatttgaaattatttttcttcttttctcggccactcattcaccatcacatttaaagctcatcgtctcattaaatgtcaacattttgtcaccaaccatcttctgcttttcgcttctttttttcagtattttcctcttaaagctttgaaatcgcaccttaaaaagttcattggatttgttgaataaattacttaattaaaaaaggacaacaattttaattttgtggatttaaaaactaaaagaattattctctttgagtttcctttaatattttgccaatttttcactttttattttttttccaacaccaaaccaacgaacattgggcagttgttggacaaacgatttgttcaccaccggtgtcattttggccaattgttccgcgccggtgtacaaatgggtcatgttgaacaaccgttcgtacacacacaacaaagcgccaaaatcgaaggcgggccaaaatttgttgaagaaaaagtgcgggaatttggcgagtctggccaaatcttcgacgccaaaattgcaaatgccatgacgaaaatggccagagggacaggaagtatccggagcccacaaagtctccctgaaagcttggtaatggggttatgttcggcattttttagagactgtgagtgatccaaatgagaatgcgaacctcgtcaaatattttgtgggccctgcctttttttggttgaagcatgtctgcgtgtatccgcccggcgcgttaagctgatcagccgaatgcaaagtgacgagcattgtttcatcccgtccatagccgatcagattcattcgtcggacaagttcggtcaggttcagcttcaatcgaatgaattggaccatggcacgggacagactgatttcaaaatagccttttgaaagcagcaaatgtggcgaaaagccatggacagaagcagcagccggaacagcagtattcagagtgacttttatgtaaataatttgaagagtaaaatttatttgttatttattgaattaggttttatgactttaattatccaaattggtgttttgtaaaatgctcttaatcaaacaaaaatcaataggtttccaagccaaaaaaatttcttaagaaaaaacttcaaaaatttcgatttttcgcatttatgtataaaattgttaatttagctaaattgaaaattaaaaaagcattgtattcttaagaatttatgtaccatttttgaacaaattcagtgcctcaaaactccagtccattcctgtaattttgtcaactcgtccaggcggtggcactaaaacttgaacatcgtttgctccgtccatccaagcgaaaatttgtgccatttgaacacgcgttttgattgctgtgtcgtgattctattaagaaaataataaaaaataatgattaattgagttctgggttggtaatatgataataccttctgtttttgggtcatagatttcataaaaatcagacgagagaattaacacataattaaaatcaaaaattatttttgtgatctgttgaaaccctgtgctaatgtgtcttgtcatactgtacatgcacatataccgtagtacatatattatataagttatggccaatttattcacttgcaacagagtgacatattcccatttgcgttttggcgtgtccaatcgctcaaaacagtccaacaccgcttccatcatgccctccccgtcacttttcatcgggcgctcgtctcccataattacattcggaaagcatttggccaacgcgcgcacgcggcgcttaaacagcgcgggggacgcggcatcgacgacgaaacagtaccaattgagcggggaaaatgtggcggcgaattccaactcaaccaccacatagtcctggggagagaatggaatagggaagggtaataattagtgatggccaataatgacagttgccgagattaagactgagaattggaccagaaaaattgagacaagaaaagcccgagagtaaagagaattttaaccctgagagaatcaaatccaactaagaagtacaagtcctgctgacagtagcgcgaataattagccgggcatttttcaaaacgaaagggattggttcgaaatttgagttgtgagccggaaatcgtaacataaagaataagcatggaaatgtaagaccaaattgacctttgatccatttacacccattgaaaattgaattcttttcgaaccaatggccgaatgggtttcagactatttgaatattcacatccaatattaatcccaatttcaccatttcttgccttgtacactgttcgaatttgtgccattgggtaattggcatgctccttctcatccttctccccctgttcgtcatctttggcaccgtgccaaaatctgtttcggctttgaattgccgtgcaggacatatccaggtcattttcagccgggtcctcctcgcgacgaatgcgtcgtttaatcattttgccaatgtattcttcgtcattggcaaacagacgagcacaatccaacggcgcacttcccttcggcagagcccaccaatcgaaacgtttttggggcgcctaatttaaatgattttttaaattatccaattagagatatatataattttcaaaatgttaacagttcataaaaataaattttgaatttttccgggccgcgcttctggcaacgccggccacgcgtttaagtgatctaaacctgctccttcatgcccgttgcgttggtggtcaggcaaagcagaaaaacggaagacaaaagcagccaaatgcgtgttaccatggtggtagtttagcaccgtcttaaaaacaggaaaaaaagaacggtaaatcgagaagaatcaaggaccaaaataaaaaccaaaagtccaaaaatccaagaatttctcaaaccgaaacactgttctcaaattgcgctcgctaatgccaatgccaactgatgagaaatgtttgtggcgaattgccttttaaactcacttcactatattttagtctttggctttatttgcgctcattcatttattcatatattatgtatttttctgaatcagctaagcaacattccaatgcaagcctcttaatttagcattgctttttttacccaattaatttatatattttattttattacttaattaactaattttattaacatttgccaatgcaacattccattacaagcctcttaatttagcattgcttattttgctcaattaattaattaattaaatttattttgttgacatttgccagtacaacattctcatgcaagcctcttaatttagaactgtttgttttgcttaattaattaattatatttttttaacatttcccaatgcagcattccaatgcaattctctcaaattagcattgcttattctgctcaatttattcattaattatttttatttggttaacatttgccaatgcgacatttttactgacttcctaatttagcattgcttaattgtctcaactattaattaattttgtttttcttttattattttattaatactcactgaaatttgtgacaaaaaagctttagtaatttattcaagtgaatttttcattatcatatatcgttatgttcattgcattttgtgggctcatttactacaaaactcagctgaatcattagtccattttcaatttgttctcactgatcggctgaataatttttttttaaatttaccacataatattagtaaattgctttagaagattaaaataatgcacttttccactattaatttaatctatttcataattgctttaaatgtttcacatggcaatttgtcgccctgcctgccgtaagtttgaaatttaatatttattaaattttttctaaattttaaagtattcgtctgacaaatggcactgacggcggtgtgcgagtgatcaaattatgcacatctgctgagaaatgccccgaaaacaatggaacggatggagccacgaaaaaggcctatggaattgaatttcgactttcacaaaacagcggaaattgtgacgatgggtgggaagagaaattacaataacaaataaataagcatttttaaatgcctctttagacttttgatttgttatccggcattgcttcaacgaggcaatcacttggacattgcagccaatttcaaagtgaaaagaacattcacaattggtgatcaaaaggcaaattattcaaaaaatatgaacgcttaattatttattaatcaatcaaggacaatccgattacgaacgaatgcgcggaagtgatggccaagaatggccataaaaatagttcaactcattggcgtggcattaaactgcgcacagtgccaatgccaaagtcagcagccatcggtgcgacaattttgatggaggcatcaattgcttcaaatcattcgtttatatttttcttattttttaattaat

SEQ ID NO: 5712 - DNA, 1318 bp, Heterodera glycines
ccattgttgttcactgttgcgtgtcaccgcccaaatcggaggttgtctgattggcataatttcaaaaatttcaaatttcaatttccactttttttagtttgctcgtttccatgtcgcccgttcgatgatcagtgggcccagcaatttccgtcatgcatttgaccatttgatcaaaaggttttctctttttttttaacgagatctcatggacaaattttttccaacccaagaaaaaatggcaaaagaaacatggcaattttgtagcattttggccggtgcctaaagcaagaaaatatgggaaagtcttcaaaacctccgcgtttctaacaaattttggcatttacatagagttagggggctaagaaataatggaattttccaacttacaattactgggcccaacaagaacacgccatttggtcatgaacaaagttattgaagctcattaaacaaattgcaagtcacaaggcccactccccttatacaaacttattgttttgcctcgtgtccactaaactggaaaagtaaaaatgccaaaaatttgtttaacgggtccttgagtctaaaaaaaactggccaacgagtccgggcaggacaccggtattaaaaattttggactcaatttgtaggcctcggcggcccgtcaatcccaatattccggcctcttgaatctttgaatttgccccttcccaaatgcttttttttgtttttgcatcaaattttaaaatttccaataatgccatttcttccaatttatgcttcagccagcagcggcgccactacgccagcggtgccatgccaaaatacacttacaacaacaggaaagctgacgcccttctgccggacaaatggggcgccattttgttttttggcgtgttctcaatcccgatgatctacctaatctttggccgcaccgacgccacagtgtggtggaagctggaggatgacgacaaatgagaaagtggactgatcgatatacatacaaatgatccaactcttcatttacaatttggaaaaattttcttgtaaaaattatagggaaatataaatgaataatgacttttcttttctttaagctatggtattcaggtgtccagacatttgcgtgccggacatttgcggcccggacatttgcggctcggacatttgcggccccagccaaatcggacatttgcgttccggacatttgcggcccaacatttgcgtcccggacatttgcggtgcatttcttaagggccattttcggacatttgcggcccaaatttttgctgaattttgcggtccaagccataagcctacagtggcgtctttgacctac

SEQ ID NO: 5713 - DNA, 1365 bp, Heterodera glycines
aaaaaattttttttttcaaattaaattttttttttgatgccttgtctacaaagaggatgtgctcaagtgcggaggcaaaatcgccgcgcagcatgaagaagtagccatggaccaggcacagatggtccatcaaccgttgccgtcccatcaattcccggcccatttcctcgctgaccaccgcgtgcatttggcgcaaaatggtggccatgcgaccgatggcggacggagtgcaccaaacattggtgggcagttgggcacagagcgattgttgctgctcattgttggcatgggcgggacgcaacattttgagaaagtgcaccttaattgaacttaatgtaccggcgggggtggggtaattaagagcaattatttgtttccaaataataacaataggttgtttttgaaaaacacaaaaaatttgaattttttcgtcatattttcaaaaaataaaactctcaacgagtcatcagtatgaccaaggaattaaaaaatatattatttatctgacatacctttcgtccaatatccatgatcttaaaaataaaaattattttttttaaaccgagaaaatttttgtctgcgtaattgacccattttcagacttaaagtaaaattttttttagttaaatgttagacaataagaaaaaaaattttgctgaaaatttcttaggtttttggtaaccttttttaaaactttctcacgggaggggactcactcagaaaatggcggatcgcaaataatcaaaatcaaataactgaccatgttgagaagctcctcgcagccgtaaaacggtgctggcaatacgtcagtgtcaagctggacagacaaaatcaactgctgctgctgtgaagcccatccaattctgtcctcaacaacagcaccagcatcatgcagatgctcccagaaatattaattttttaaaatgacgctcgttgggccttgagcaagccattggaaataaaaaatttatttctgtgtattaattgatgtattgaaaaagttaaatattatgatgaagagaataaaatatcttattcttaaattgataaaatctaatagtaatatttattcaaaattacataaaataaatttaaatgaaatgtagggcaaagccgcaaatgtcgggccgcaaatgtccgattttggcttgggccgcaaaattcagcaaaaaattgggccgcaaatgtccgaaaatggcccttaagaaatgggccgcaaatgtccgaaccgcaaatgtccgggccgcaaatgtcgggccgcaaatgtccgatttggctggggccgcaaatgtccgagccgcaaatgtccgggccgcaaatgtccgggacgcaaaagtggggtaaccacatcgacacacggggcag

SEQ ID NO: 5714 - DNA, 3730 bp, Heterodera glycines
aaatgaccggccaataaatccattagatctcgttaaaaaaagaaaaccttttgatcaaatggtcaaatgctgacggaaattgctgggcccactggtcatcgaacgggcgacatggaaacgagcaaactaaaaaagtggaaattaaaatttgaaattttgatgttatgccaatcacacaacctccgatttgggcggtgacacgcaacagttgaacaacaatggcgaatttcgaggaatacgaagccccaacatttggtgaggatgaagaaaagtgacgagaaaaatgcccaatcaaatcagcaccaattgaataactcgggattttttgcttaaaattttttgagcaaaaaataaggcgcaaaaaagtgggttttatataaccgtttaagaaaaaaacttttagaatttttttgttacattttgtatttcctgctgttgctggatttgaatttggctgcgataacgaggagtgtcgttcccttcgtcttttagtaaaatttcattccgaaaagacggaaatccaagaagaaaaaggtgccaccgttttttgatcaccccctttttcacaaatgaattcattccttttttagcccaaagccggagcagcggtgccaacgccacaaacatcggcagcggacggaccaccgggagcagcggaagcgccctcatcagtgaaatcgtcagagaaaagcggcggcacaaaaaaaaagtggacgaacgaacgactttttgaataaacaaatttgctggctttaaggaccagcaccgaaggactccaccatgtcgcgatcgctaacctacaaaacgcatgtggtatcgaaggacctcgccctccgtaagcaaacgaatccgaaatggcttagacaaatgattcattgctttttcccccatttcagaatccgagccgaactatggaacgcttgccggtttggacaaggaaattttcgcgaaggaacagcaggcgaaaggtgggggtcggaaacgaacggcacggcgcaatcgcaatccattgaaatttgtccacctcccatttcaggaggaatgccaccgccaccgatgggagctccacagccgcaacagcaggcgcccggaccggcaatgactccaagtgaaataaaaaaggcgcaaatctcaaatgtttgactttccatcccaatttcagcaactgatccgaactactggaccctcaacaacttggacgccgacatcttcacgaagaacgcgccagcaaaaccggcagcggcaccaaaggcgggaccagcgccacacggaggcggcggacaggcactgacaccaagtgaaaaaaatgccgaacattttcaaattttacgggcttttccttcccatttcagcgactgatccgaactacgggacgcttcagaacttggacgcggaaatttttgtgaagaaatagtgccatcgacagcgaacaccccggcaaggcgtaccgatgtgtgatattatgaggaaattggattgattgatgttaaatgtttgcctgtattgcttattgtaatctgttgttgccgtatattcgctgttgtacatatgtatgtatattgtgttgtacacactgtaatgttctcatcatactataaatgttttggtctgtaaaaatgttcaaaatttcgactttttgcaatttatgttatgacttttatgataattgtctaatcaccagacagtagcatagaattagcttctaaacatgttaagcctcagaatgataccaagatttaacatgttttttttcggaaaatgcccaaattggtcaaccgagttttcgaatatgtaagcactgtttttgataatcaaatgcagattatgacataattctcaattttctatttcccagccagcgaagccctataaaaggaggcattttccaccgaccgacccacacatttccctcatttgtcacaagtacatttattgtgcctaattttatttgtgacgtcggcatttgtacatattacgacagttcgtcgtcgactgctgcatattattatttgttgtcttcaccacacactcgtcaagctgctggttgagcgcaatgtccaagagacggcttcgacaggtgtcactcatttggggatgacgttgtttttcaatttgaaaaagtcattcttggcggcatctcatgaatccaatcaaaatttgcgaatccgatcaaatttttgggtcaacaattaataaacagttccgaattcattggctatgtttttccatatgcaaattttttcggagtttatgcaactgccaaaaacgaaatttttcggaaattgtaattccgagggccaaaaattcgccataaatttgttttttcgagggcccggttcagtaaattgtctgtcactcaatcaatgctaatttcttttttccttttccaggaactcaaggacatggagaagaacccattgcctgagggatgcactgcacggccacttgatcaacggatcatgaccccctggacggttaccatccgaggccgggccggcacaccgtacgaaaacggcaacttccaactgagcatggcatttccgagggactacccgttcaaagcgccgcaagtcacgttcaccacgcgcatcttccacccgaacatcgacacacggggcaaagtgtgtctggacattctgcaaacgcactgggcaccgacgctgaccatcgaaaaaggtggcgtggatttggtggtggatttgatcatgttttaaatggattgatcactttaatgctcgtaacttttttcaggggcattaagatccgctttttttgtgtttgattagcaaattcaaaagatttcattgcgtttcatcagagttagcgaaaaagcgaatttttggaatttatggtcttaatcgggtacgaatttgatggcgttggttttgtgtggtatttgtgcagtttgagtagtgatcaattttttcacatacaatttttggctgcagaaatcgttaatttgtttctctgtctttacagttgtgatctccatcatcgttctgctgaatgacccgaacccggacaactcgcctctcaatgcggaagctgccagtttgtaccggactgaccgtgcggagttcaacagacgcgcccgtgagatgacgctcgcctatgcacgacgatgagatgatcagcacgtctttctgattccactaccaattatgtattactcattcattgtatatattattgtactgtatgttgtaccatatttatttgtgtgccactactgtgtgtctatttttgtgttgtatttgtgtgcattttcaaatccggtaaagaattttgtgctttttctattggcgtatccaaccttcaggaattttttttcgaaaactttccttgaaaatgggccctcccgcttgaaattcaccctataaatgagctgatcactgatgaatgtcagtcaactcagattttgtgaaactttcgctaacattaagcattcattacacatgcacaaaattcggtggggattctttcaaaaagatttagcaaattctgcataagtccaccgttaaaattatgtaattacttaatttcccgtccaattatattcattagtcgcagaaatttgaattgaatgaatgacatgttctcattcattcactgacatataacaatcgattggggtcatctcacagtgcaaatgtttttgaactatcaaggaggatgtgatgatgatgatgagtgagtgacaattgcaaatgtcacggctcagaaatggctg

SEQ ID NO: 5715 - DNA, 915 bp, Heterodera glycines
tatagattgatggtatttatttttgtgaatcaacagtaaatcagtgaaaatccatcaaaaaaaaattcttgacgctaaatcactttaacaaaaagcatagattagatgatttatatgacaatctgatgtcagattagtgatcagcgccctcgataacccccgagtagttcttagaatcgaaaaaacaaccttttttgcctttttttttaatgggaccaatgatgtgaaccagggttgttccgggtcgagaaaaatatcgggtcgggtcggccgaaaaatcatcgggtcgggtttcgggtcgagaaaaaggccgggtatcgggtttcgggtaacccggaacaaccctggtgcatgggtgcggatgccactgcaatatttgcagcgaattgcgccatttataggacgatggaaataaaaccaaatggaatcagggttttcagccatttgctttgcttaaattcaagaaattcatacaaaatatctttagaaaaaggataataatgaacaaaaacaaatacaaaattttcgattccattgaacacaatcgtttcaaaaaaaattctcaatttccttatctaattttcacccaccttcacacagccggagaagtccacaatttgttgcaactgctgttcaagtgcaattgaaaatgacggacactcgaaaggaagcttaaaattaaaacgtaaaaacggcaaatttttggggtgataaaagttggttttaaaacaaaaaatctgaaaacattggagttttttggatcaggaaaatggcatgcatttcagagaatgccgaactccaaaactatttggagaaaatcaaaaatttcagttttttttaaaagtttcatttttgctccgaagttttgacccgaggtccaaaattcccttttttgcaagaaattgtccccccgcc

SEQ ID NO: 5716 - DNA, 3591 bp, Heterodera glycines
  unsure (1)..(3591): unsure at all n locations
ccattgcccgaccgtccgttgcccagcaaaatccgttttattcgccttcagattgagtaattcggaatcagagatttatggcaataaaagcattcatcccatttttaggtacatcgatcactccgtcatcgcttttcttcgttcaaatcatcaaattttcgacaaaagaggcaccaatttatatttgtggattccatcaccacacaacacggatggccaactaatttgggacatttttgttcgtgaaatttggccaattttttctgaaaacattcgccacttgggctttaacgatggtgatcatttggacaatttgcgtcttcgcacttcgccgacaattctcactgatcttaatcagttgaattcaatctattcatttggtctgtcgcccgctgcgtttggtgatgattttgatgggccaaattcaacaatttctgctggccaagcattgtccaaatggttgcactctccgagaaaagatggccaacccaagcgattgcgttgcgaagattacaacaaacaaacgaacttcgattggatcaacaatttcaaggaggtgtggcccaacatttttgtgatttttgtttttccaatcaaattgtttagcattttcttcgtgccaatgccatttcttccgtcagttaccaaattcatttttctgttcgtgcgccgtcaatgcaaatggtgccatttgaattggtaaacgaatggacaaaggaaaagctgacattggccaaagtgaaaaatgaatggaacaacaattggataatgaaacgatgcaaatttggggagacggcggcggtcaattggaaagactgaaattgggacaacaattgcaacaatgtgttcttttgcctttttagtggcactaattgcatcgggtgagcaattagaaaagacatttaattttgtttaaataattaaaattgcgcttaattaaggccattgtctcctccaccagcagaagaaacgggacaaagcatcacaaaagggcgaaatgagtgacggacaaaagaacaaaaacagtgatcagccgcagaagaagaattgaattaattgagaagaatgaccgactgatcataattaaatcagtgatcaaatgcatttatgatcaaaaacctctcaattggtaaatcaatcggatgcataaaaatggcttgctatctatcgagtgtatgaatttctctctgcttgaaaattgtgacattaattttcgggattttgacgcgggattttttccttttcctctctttctcttccgtctctcctccttccccagtgctatttccttccgtttccacctcttcccttgtttctccatttttgctgttatccatcttcatctccattcccaccaaaatttgcttttgttgttgctgctgtactgcttgaacttcttgcttttgttgttgttgtttctgatggtgttcagctgcaattttccttttcctctgcttccgctgctgctcctttttctcctcccttttcctctcttttccccccattttctcttccttctcctcccaattcgttgtttcctttttgctgttgttgttgatttggtgttttcttccgattgtttggcgccggcactgatagtccaccaccagcagtggagccagttgaatgttttgatttcgccttaaaatgccatttttaaatgtgtatgccatggaggtgttcggcaagccataaatgccggaatgtgtaattccgtcgcaaaaactcccggaatgcggtcccaccattgacggtatccggattccggacaatccgtcagtggataatctttcggaagacaattctattagtgacggacaattcatcagtgaagaacaattcgtcagtagactgacgttccgtcaaaggacatttcgtcagagaattaaaaaaaaaaaatttgttgacggattgtccactgacagattgtccataaccgacggattgttttactgatggattcccactggcgcacatccagtagcaactttttccaaaaggcccaccgcttactgtatgccaactagctacagtatattattgttacaaaaacccatcccaagctacagtacccttcccctgctaccgccgccgtcctcctgttggtgttgttgtgctgtcctttttgtgccgcatgaagtcgatcagtctgtcctgcacaatgtccggctcggaagcagcttcatcttcctcatttcgtgactctgtcgaaatggagcgaccaccgccgccgccagcaagcgatcgaatctttttaaaaaaaaattttctagttagaaatattaacaagttttttataacttttttgtatttgttaaaaaccttaacttttattttagacttgtacgctttgctatttttaatgctaaataactttttttattataacttaattataaaaatttcttaattaaaggattaatatctaaccccaaaatctatccatcgctcttaaaaatgcattatcccatttttaaatattttcttttatctccgaatgctaagatttggaaccacaatttgaagagggctgctgctgttggccagcccctttgaggcccagaaaattgggcatagataatttgagactagacatcgagactcagaccgagattgaccccccgaaattcgagactagagcctgggagggatcgggaccccgctaggatttcccgggaccacgattcaggcttttttgaaaaagggcgggggggggggggggatcgagatcccgacaaaacggggatttgaatgaatttcggtcttgggattcaaatcccgacaaacccaggattttaatcccgctatcttatcgcggcctgatgccagtcccgaaccccgatcccaactatatcaatggcactcggttgagtcctttcgcccccggattatgtgcgctttgccatttaagggccatgtaaggaaagatgaagcagaaaatttgtgccacaccgttcggtcctaatagatggagtgtgtgccgtatcaaataaatcctcctccctcctcccccacattccctcactgtttgccaaatgcggatttgtggccgatgcccgcacaccgtcgaatgccgtggcggatgctcgctgatccttggccaactttgcgtcgtacacgcgctgctcccgcggcactttgctcatgtgggaaagtgagcggggcgtggaggagccgaaggcgtatgccgaccccactgctcgtgctgccccgtcccgggcttctgtgccaatatatcaataacactagggcaaaggcaaaaaacataaataggcaattcgatcggcggaacttgaaacttggcaccgtgccaaaaattgctggtctaaaaccctccaatgaaacatagcaacctcggccaatggaataatgccaaaaatccagggctgcacgtaactggattttccaagtacaggaagccgtaatccgtaattacgaagctgcaaaaactatataatttctataattagcagtcccggattttcaaaaaaaaattttattttttaaaaacaaaaatcttcaaggcggcgagattttggggtgcacccgnntacgggtacaaaagccgcgtaatttgcgtaatgccgtccc

SEQ ID NO: 5717 - DNA, 3544 bp, Heterodera glycines
  unsure (1)..(3544): unsure at all n locations
atatctatccccaaaatctattcgtcactcttaataatgcattatgccatttttaaatattttctcctatctccgaatgctaagatttggaaccacaatttgaagaggcctgctgctgttggccagcccctatgaggaccagaaaattgggcatagataatttgagactagacatcgagactcagaccgagattgacccccccgaaattcgagactagagcctgggagggatcgggaccccgctaggatttcccgggaccacgattcaggattttttgaaaaagggcggggggggggatcgagatcccgacaaaacggggatttgaatgaatttcggtcttgggattcaaatcccgacaaacccaggattttaatcccgctatcttatcgcggcctgatgccagtcccgaaccccgatcccaactgtatcaatggcactcggttgagtcctttcgcccccggattatgtgcgctttgccatttaagggccatgtaaggaaagatgaagcagaaaatttgtgccacaccgttcggtcctaatagatggagtgtgtgccgtatcaaataaatcctactccctcctcccccacattccctcactgtttgccaaatgcggatttgtggccgatgcccgcacaccgtcgaatgccgtggcggatgctcgctgatccttggccaactttgcgtcgtacacgcgctgctcccgcggcactttgctcatgtgggaaagtgagcggggcgtggaggagccgaaggcgtatgccgaccccactgctcgtgctcgtcctgccccgtcccgggcttctgtgccaatatatcaataacactagggcaaaggcaaaaaacataaataggcaattcgatcggcggaacttgaaacttggcaccgtgccaaaaattgctggtctaaaaccctccaatgaaacatagcaacctcggccaatggaataatgccaaaaatccagggctgcacgtaactggattttccaagtacgggaagccgtaatccgtaattacgaagctgcaaaaactatataatttctataattagcagtccgggattttcaaaaaaaaattttattttttaaaaacaaaaatcttcaaggcggcgagattttggggtgcacccgttacggggtccaaaagcgccgtaatttgcgtaatgccgtcccccccccctccatttgaaatttgcctgctctgctggacctttcgcgtcaatggactttgcctgcctcatgtagtagatgatgtcaccccggcgcttcgccgtgtccccaccgccctggtccaacttggccttcagccccttcttggcacattcgttgacatggtgggagatctcgcggggcgtgctggagccgaacacaaacgaaattggcaccgcttttctgcctgataatgctgctggcggtggtcgtgccattggaaaatggaataatttgttccaattggggaagtgattaaatgttaattggcaggtaattaaaggatatattggagttcacgagttttggaccacgaatatttcactctgtttattgcattgatctcagtcagtcaaattttgaaataaatcaatttttggtctcgagcattgtaatgaattttgggaggatcccgaaccttgccacaaatccttggtccccatggcatttgaattttagggggatcccaatcttggcactaaccctttatgatattcattcttgcttggcaatagtcgtcctctactgctgttggccgtgttttcacccaaaaataataggcgttgctaaatggttgcggctttcggccccatcggcggagtctctcctccccccggggcgccgccgttttcaattgactgaacacagcgaggagtacggggctacctcgagcagcagaggagcgagccaaaaaaccattcaccaacaattttgggcacccgagggaggcggggggaatttcgaaattggtggacggagaaaaaaggatgggacgggggacaaatgaggggcttggatggacaaaaatttaccggcataacacctccagcatagggtaagggcatggcatggaatggcattttgaatgttaggccaaagaggcaaagggtgtagccaattgtgggcctaatttttttttttaggggggggggcggggcaaattattattttttgatttacacccaatcaaattaaacattattggtttatcatttgatagctcattgccagtgctctattatcatgtttttgaagctaaaccgttataaatagtcggccaaaaaagtgatgtgcttggttagttttcatcaaaaccattgcgccgccgggcaaaggtacattaattaaaaaacggggcgggggggggcaatttagggccatggaaattgaaattttgtcaaatgcaattaattgactccacataattaggcgctcttctccgcttctttcgttgatggtggatacaatggtctaaattaagtgcaatttgaatttgatgatgaacactttaacaatggcaaatgtcgttactgctcacccaatgcaattattgccaccataaaaatggaagaatgtgccgttcaaattgttcggcggattctcgttagtccagcgaaccgtctccccaattggacaccgccggattatccatcgaatagtaaatccaaatgtgccgtctttggccattgtcagcttttcatgggttcgttcgttcaccaattcaaatggcacaattggcaatgaggcggacacatataattgaattgtgtagcaggcagaagacgaagtgatggcacagagaaatgcctaaacaattgaaaaagaaaatcaaaatttgtccgaatcccgacatttttctcgtcccggaacaaccctggttcacacgaccacaaaaaaagacacgaccataaaataattcgacaattttaatgcaccataacttttttaaaagcatccaaattaaagattcttatttgtttcgatagcgttaagagtcatctaatagcctgcaaaatttcaaaaaatttcgttgggtgggtttaaaaaaggttatgatttcaaaaaactggttttctaaatatttttaaccataacttttttcgtaaccaaaaaaaattctttgaaaagtacaacgaatttggtaactcgacggaagaaaatggcattcgggacgaagaaaaatgctaaacaatttgaaaacaaaaatcagtgatttttcgagattatggccacacctccttgaaactcggttgacccaattggtggttcacttggttcgttgtaatctatgcaatgcaatcgcttggggttggccatctttttgtcggcgtgtgcaaccatttggacaacgcttggccagagcgaagttgttgcatttggcccatcaaaatcatcaccaaacgcagcgggcgacaaatcataggaataaattgaagtcaattggttcagatcggtgagaaattgttggtgaaatgagccgacgcaaattgtccaaatgctcagcatttgaaatggtcaatggncaatgtttggcgcaaaatgggccanatttcacg

SEQ ID NO: 5718 - DNA, 6033 bp, Heterodera glycines
  unsure (1)..(6033): unsure at all n locations
tttggagtctctgaaaatggcgggtttttacattttatgaaggaacagtgttttattgataggtactaatattttgttagagatttgctaatttgatcagccatatatttttatttaaaaaatttgcctggcaacacaggttttcgttgaagcacattggcgaagtgcatttggcttgtttgggtggcgcttgggtgacacgatcttaaaaattacaataaattaattaaatttataaaaaaatttttaattaaattactaattgaaaaatcaaaataaaggaaatacagatttgaaaagattaaaattaaaattaatttgtactatgcattcttgattatcttacaaattttcagaaaatttcttcagcagatttcaacaaagttattacaagacaaaaaattcttcaattttttgataattaattttaggtaaataaaattatttttgaaattattaatttatttcaataaaataaaaatggcatttaaagtttcttactgtgatttgctttactgccagctcctccgccacacacctgggctcgtgacacaccgcattttgaacaagattttcgacaattttctgtctttaaattaattattttttttaaattaataatattttttaccataaaaaattggtttttgttacattcgccttgccgtgaccattggccacagtttttgtgccgatcttggcattctgcaaaaaaagtgaatttgaatttacacaccaattcgccatactgtggatgaaattttcttaattcacctgcggccaaattatagttgggctgacactgtaaaaataaatttgtttaaaatagaaaaatttttatttcaatttggaattttaatatattttcataaaattaggtgcaaaaatcgatttgaaaaaaagagaaagtctaaattacaattaaataaataattaacgggaacaaataaaagccaaatatgtatgtaatctgcaaaaaaataagtgaatttctcaaaaaaatctctcattctttttttatcagccaaaagtccgaaatatgttttttatttgcttaaaaactcgctctcttattgaaaaaaaaacaagtaaaaatgccattttttgagatttcgaataacatttaaaaaaagtatataaatccagtccatggtaattaaattaatttccaataattatgtttttggcacctgtgcacagctggctttacaccacaggttcatgtaggtcggatttcggcggcattcaccttttgtggcccatgtgccacaacactcgtgttcattgtagcatgacacccaaaattaaattaatttaaattaaattatatatttttagttaattaaattatttttacatggactggcgttatcggggagccagtcgtcgattttggtggttttggcgtaggcgtggcctaatttgttgaaattgggaaaaatatttgcgtttttttttactttctccgtttgaacacattttccggcacgacattcaccgttcaggcacacatcctctccttaattattcatcaattaatagttaattcgatgaattaattaataaggaaccgtgaataatctattctgagttaattgcgttatacaattaaaaaatataaataatttaataattaaagtatatggaacggattagttttttatgtaattagtggatgctaatttatttttaatattttaaatatatatttatatttcatttttttgtaaaattagaattataaattaattacaaatagtcttaccgctacggaatccagtgcaatttccgccaggtttcacctgtgccgcgcaatggggcgcgccatgggaacgatcgcaaaacaaatacctgggaaattttataaaatatattaaaatttatcccaaaattttgcaactttgatccacagttaggccccatcatgcagttcggtcgtggcgcatattcatacaaatccaagtaccggttgctcagcccgtcccgatttgtccaaggctgtcaaaaaagtgccatttttttgcatggaaatgccggatttgatttttttgaaagccaatgggaaagctttcgcgttttgtctcatttaaattttctttcaaaaatttcttacaaatcatttttggatttctaagattcgcattcagtttattataagaaacatgaaaatttataataaattccaaaatttccatgggctttacagtaggcaattaccgtacctggaatggtcgcatactggcagaaccgaagtgagacgcacttgcacattgcttaaatgtcaaataataaattatttattaattttaaataaattattttttaccgtattgtccatggggtacatttgttcgcgctcaaatggcgcttgctgttgccgtttcatctcccaaatctgtgagaaattatttttgctgattttaaatgaaatcttagattatatgggtataatttaagtaaatttatttcaaaaattaaatatttttcggatttattattttgtaaaaacaatttttcggtaagaaaatacaattttccgggtgttaatttattttaataaattttcaatttttgttaagtatattttgcttttttgtgataaaatttttacaaaaatagtgaaaatttaaatattttttaaatttttaaatgtacgaaataagcaaattttttatttacataaaataaggtactttaataattataattgaatttttaaatgtaattaatttgctaacaaagtccacgaaagaatggagaagaaaaaagattgggtcatttgctgccgtcgattgttcagccatatcgccaccgataaacagatgaatgttgccatgggtgtactgatttaaataattaaaaataaattcaaccataattaaataaattctttataaaactgttaattaatgatatcagacgatgacaaaaggcggcaccgccggggaaatttttttttattttagagaaaaatttcaaaaaaaaaattaccaaattttctcttactaataatacatatttaatattttgtaatttttcataaaaatatacttcgatcaggttgtagtttgttgtcactgtgcaacccttgaaaccaattaggcaatcaattaaaaaacgaattgcaaatggaaattaggtaatcgaaaatgacgacattacctgttgaggggcggaatagccaaagatcatttcaggactggtctgttgcagaaaccaattaattcttaattgaatcatccaaatttttaatgcaaaaattcaaaatgaaatatttatacaaattcatttaaaaatatttttgcttgcttactccgtgtccctaaagccatgcccatcagcgcctaatttgcggagcacatttgcttttccctaaaataattaatttaaaaaaattagacactttctcaagcattttcccggaaacactttttgcgggcattttccagaaatactggatggcattttccttatctcccgccgtaatttatccggcgggatcaatccgattttagggatctggataataagatttgtggtgcttccttaccgtcgttgttcgccatcccgcaaaatcgcccttcaccaaattgccagccgcgtccgtttcgcccataaactaaaataaataattatgttataaaatgataaaataaataaatatttttcgcttgcatctgttgtgaacatgtgcgaatctttgggcgtcggcagtcggtcctcaatcgtcgagtcccaatagggcagcgccacgctcgggtccacctggcgaagcgcaatttccaacctggcacaaatgaacggtgacgggtgattgatgaaattgatcagcaccggcaccggatgattgattgtattttgagtaactaaccccccccccccccactaattgtaagcttatgacgctgatcagttgtactgctcgagattctcggtctcgaactccgggaaaaactcgatctcgagcgcagcataaactgatcaagatatcagaaaacaagatataatgtaactgatttttgttgtgagtattgtggatctccaatgatgaaacccgtccaaaagaataatcaaaatatcgttgtgaaaatggttcgattcagtaaaaacatcacattttggaccgaaaaaatattaaatattttattttaaattttttaccgttttatatattcccgatgccatggcaaaaatgccggccctccgtgtgccccaccgccaatggtcggatcagcatgaattctggcaattttgtcgtattccccgttctgttttatcgttttcattgcagcatgctaaatttggttgaaaatattaaatattttaaacaatttatttaaaaataattattttgaattaaatataagaatttacaaatctcgatcgttccatgtcggacaacattctgtactctttgcggatcgctttgttaagctgtcgtcctgtaaaacagcttctcacattatttttgacataaggcatttaaaaatgttttttcgattatttttttgaaagaaattaaataaatttaataagttgacaattagaaataatttaattacgaaattaatggtcattgatctattatctctaattactttttgtaattagtatgtaagctaggcaggcacaaaaatttttgacttcttttttgaaaaaaaatttttttagtggggggttctaattcagggggcgggatttatttttcaacccccctcgaaaggggggctttaattcagggagggttctaattcaagaaatacgctaattggataaacttatatattccaattaagagattttaattttatttttttaccgcccaaatatgaggagagacactgtaaatccatgcattggtacggtgttgcggccactggcgctatttcggcagccaatgttggggctaaattgagctttttaaattaaaaataaataaattgaaaattacctggaagcccagggattgctggaggaagcggaattttgtcgtcaaccggtggagctgcctaaatttttgtgcttttaatgagcggagtacggtaacattagcacggtaattactagggctgggaatttaagtcataaaaaaattcacgagatttaaaaaagctgattttcttattcaaatttcgtagtggtcagaatgactttaaattttgcagttaatactttatgtaaaagctatctgcctgcaaaattccagatttttcgtacgtaaattttttacaaaatctccatgttcgtaaaatttgaaaaatcaaattcgtgacaccgccgtgaaatttccagttttaaaaacatgcagatttttgtaaaaaaaagactctaatgtatgaaattttatgaaattttgcaggcagatagcctttacattgaaactttaagctcataacttaaaattcccagccctagtaattaccgtttaaatgggcaatttttattttgtcgcaaatttggtaatttaccattttttgttttttaaaaacatttaaaatccaaagaacccaaggaaaccccattttaaatttggcacaaaatttggcatttcgtttttattttacccgcgcatttgtgtcccaccgatgcaactgttcacacagtattctgaacgcgctggtcggtgcacttgcacaattcttttgagcatttgtcaatgaaaatagtgccaaaatgagtacaaataataatttgaaaggcatttttttctaaaattttaaaattaaattttagtcttttgcataaaaaatatttttaaataattttttgcgaataataattatttaattagcctaattttaagctaaattaaaattttatgccaaaactaacccttttaaaacaatcttttcaatttatatgcagaaaaaaattgtggcaaaaatttaattactgaaataaattaatggggaaaaaattnnaaattcaccaaatttcagaaattagtaaggaaaacaaaaatggacaaaggtaattanatattcagagagcgacaaagaaatcaaaactaatcattctgatgatgccatttgc

SEQ ID NO: 5719 - DNA, 1962 bp, Heterodera glycines
cgagaatggtgtcgagaatgggttggtgaagaaaaactgcgttcaaccaattttcgaatttttattttgatgattcagtcacagcgccaccatttttttatttacctttctttttgatgcgcaaaagacaaagaaattgaagaatttcgttactttattaatgtgtgggacgacagattaaattgaatatatattaatgttgagtgaaagaaaattgaattaaaaaaaattaattaaactataatcattaaaaaattaataaaaaatgggatgagtttaaatgaaaaaaataattaaattaattaatattgataaatcttgtaccattaagtactttagtacaaaaggcacaaatccataagagcctcggtctgaattcgtaaatacagtttctcgaaaagtttaaatacttaaaattaccaaaatttgttaaaaaaattcgccgacccattttttctctttctcttaccatgagaaaaagaaactttttaaaaacatatttttattttcattattaacatgattaattaatagggctgccaaatatgcaaatgcatgttttttcctggcttctacatgctctaaatagcaggaaaaacactttcttttttgtgtttgcgtataaaaatcgggacttttagacttttatttgcatattttacatattttgggtttttatgcatatttcatgcatattttgtcatttttgtgcatattttcagatttttttgcatattttgccatttttcgtcaaatattttccgattttaatgtctcttaggaaaaaatttttattatgcctaaaattaaatccaaatctgaatggatgcgcgagtgggtaaataaacaggaagcctcactgccgaaaaccgagaaatttttgatttataattgcaaaaacaaccgataaagtttatgagaaaaaaaaatttttttaattaatttgcacccctaatgttcaagtttttttgtgcatatttggtgcatatttcacgactttatttgcatatttatgcgcatattttggccacttttcgtgcatatttttggcagccctattaattaaagtaacaatacattcaaaaaatatgaaaaatgttcatacaaataatcagcagcaggaatggcagttttaatttcataattatttttgaaaattattacagtaaatatttccaaattccaattcttaaattcgagttctgctccatccctgctggcatcattagtgatgctcgagtgtttctgcctcgagcatcactaattagtaattaccataattagcactgctcaatagtcagtctcagagtcaacaaaaatcgcaaaattcacgtcttctcgagcaagactaatttggctaattaggtatgtgaaatgaataaaaatatatttaaaatgaatggcattccgtatatgatccgtcatttttaccgcattataaaacattcacaactgctgggtgtgaatccgaaggcgaatccgcgaattctaaaaagtatttttttaattgggatttaattatttcaattcgaaaaatataaaaaccatttaagttttaaactctttttcaaatttaaaataatttaatcaaaaaatagggtgctatgtagtttcgtaaatccgtcaccttaggaatttcgtaaaatccggcattttagctatttttcgagaaaatatggcataattttgcttaaaatcaaactaattttgcatttttgatattgttcgatagcctatgtttttctctgtcagcctgtataagcttcaaataaattatcaatttaaaatattagttatggcagaaatagtctttgttttaacaactttttcgaaagaagttgaccaaatttaaatttgcacactaattgcgaaaaatcagggctatcaaacaatacaaaaaatgcataatatggttgcttttaagcaaagttatgccatattttgtcgaaaaaatagctaaaa

SEQ ID NO: 5720 - DNA, 977 bp, Heterodera glycines
  unsure (1)..(977): unsure at all n locations
acaatacataatactacagtactttattttcggaccccccgggtgacggattttccgggatnccgtaaattgacctcctaattaaaaagctgtttaaaaaactatttgaagcaaacagacgcaattatttgactctaaagatattggcagtcgggaccattttgactggcgccgaaagtgattgaaaacaatatttgaaagaggcattgcaattagcggacgttattagaccaatttggcacttttttcaaccatgaggacggatcaggcctaggactcaaaaaaaatggcgctcacttgtctcagttcccggaagttaacacaactctcgcaactgcgcttacaattctccaacatccacccgttcttttggcactcgcccttcatggcccattgacggcattccggatgataatcggaacatgctaaacggcaggcaattaaaaacccatttaaattggtgtaaaaaattgaaaactaattgcattaaattttaaaaaatagggaagtttttcgggatagttatcataattccgacatacatttcgactatttcccagttactaagctaatcaaacccaaatataaaattgaaaacatcgacgtttttcgggatcgctggtcattattcggacatccatttcgactaattccgaattcttaacccgaacataaccctgagttaacattgaaaacatcgaaattcgtctttttttttgttggtgttagagcttaggttagggattcggattggtcgaatgtaacagacacattcatgatcatcgactcgaaaatagccgaaaattttttttcttgactggaaatcatatcactaacgatacaacctttttttataaactggcgccgaaatatttaactaacaaaattaggccgatttacacatccctgacacggctggcattccaaggccccaaaaaagtttcggaaaccggaagtcggaattcaaccatcccgga

SEQ ID NO: 5721 - DNA, 541 bp, Heterodera glycines
gctgttgccaaccctgccaatcagccaccattggtaccaattaatgcccaaatcgtgccaaatttgccggctgttgctgcgcctgcgcctttagccactgctcggttgccgcagctcagtcttcctgttttttcgggcgaaccaatggaatggcccgcattttggcagagtttcgagagtgccgtcgaccgtgccgcccttgagcccgtcgacaaactcaactatcttcacggttgcttacgcggaaagtctgctcgtgccgtaaccgcctaccgtggaggggagaattatgcccatgccgttgccgcactcaggcgactcttcggggatccacgaaaaattgccgaggcacttcagtccgaactgatcaatcttcggtcggtggacgataacgttggatcactgcaacacttcctcgagactttggagcgtgtgtgccgccaacttttgaacctccacatgccggatgacagcccattcatgtaccaaatcattcgcagcaaactgccggcgactattctgtccgaactcgtcaaaatgg

SEQ ID NO: 5722 - DNA, 1734 bp, Heterodera glycines
tggaacgtgcggcaggtattgcatggagcactcctcaggtctgagctggacttgtcgaagttctcggagtcagagaagaggtcgaacgatgcctgcgcgaagccaatgccgacagacaaacacgatttcggcacgaagcaaagccaaatcgacctcagcgaccagaacgacacgaaaatacgcgagttttttccgttgctcagtccgtcagaaactccggtgaaaggcatgttccgtcttgcctgttctgccccggccagcattgggcctcagagtgcaacaaagttacagacgcagagactcgaaagcgttgcctcttgcaacagaaccggtgcctcaattgcctacggaagggtcaccaattgagggagtgccggtcaaagcaagtatgccgagtgtgaaaagagcggcatcattctgcaatctgccctagtgtcaaaggaacatcttctgctcgttcaaagcaacagaagccctcgcccaggaacaaacagactttcggaaacgagcgcaactcaaggccattggtgtcatccgcggttgccaatgaggctgactcaatccctgagccgaaaactgttaacacaatcatggcaattgtctccccatccgttcctcatctcgtcatgctcatggccctccgagcaatttattaccaaatgtttatttttaattgtttaatattattttcaattaagtaaatattattttttaataaaatacttaatcagtttaattaactaagaaaacccattttcgatatatccgattgttaaaggtttgtagaatttcaaacaaattttttttttcaaaatatcgttgggctttaatttaaatcctcacttttattcctttctagaattcggaagtctttaatgcacagtccgttcttttacattcccaaatacagaatcatagtcaaaattatttttattcttattatttttcttttaattatgctccataagaatttaccaatttgtcattataattaattttctaatagtatttcattttgtgtccattttaacatattcgaaatttaaaatgcttttttttttgtctttttatccttttaaaattgattaaataattactaaaaatattgtaaattatatttatttcattataataaatgatcgatttgagttcataattattattttaaaggttattcgttatgcattcagttttttattaatgtttatttttgtatttattcatggctccaaattatttatttgattttaatttcggtgtaaaataaatgaaaacgtctttgattaaagtaactttgactaataacaatagaaactttttttacaaaaagaggaaggaaaaggggaacagcaaatggaagaggaacagaaagaggagaagaaacaggaagagaaagaggaagaaacagagaaacagaaagagcaacaaaggcaaagaggaagagaaaggaaatgggaaatggaagagaaagataaagaggaacagaaagaggaagagaaggtgaaagtggaagaggaagagaaaaagcaacaaagggaaagaggaaggaacaaaaaaagaagagagcaagagaaagcgagagtgatgtagtgaaatgggaaggtagaaaggagggagaaaggggatgagaaagaggaaaagtaagagattttaagtgatcatattaaaaatttgagttttaagaaaacgaaaattgaattcccggccattaaaaaaatcagttgccttcttaca

SEQ ID NO: 5723 - DNA, 3959 bp, Heterodera glycines
  unsure (1)..(3959): unsure at all n locations
gatataattgtgatttaaaatatgtttgccggttttgttatttgattttgtgtcatttttgtttgtgatttgagttagttagtgtttagttttttttatgctttcgtcagttctattgattgtcgtcgactattaatttggaattaaacgataattgtatcttcggcattgggctgtattgttttgtgtttgctttgggctgttgtcttttgttgtgtgcaacaacaacaaccattatttgttttttacgacttggcgctcctggcaccggtgaatcagcagtggacaaaaacaattggacgtggcctcgaactgaaaatagggaaaagtaaatccctcgacaagtgtggacaaatcggaaaaaagggaaaacaaattcccagcaagagaagagccgaatcaaccaactgtgaacagctaatttttgtaaaagggtaaagtaaaacccacgaacagacgagccatagcgatagaagtgactgaaaaaacgggacacaaatccctcaaattttaacggactgtcgacaaaaaggggtgaacaaaaacccggaaaacgaatcaagaagcagacgaacaagacggaattttttttgaaaacgggaaaagcaaatccctcttcacttcaaatctcagcaccgggaaaggaaattgtgaaacaaatcacaaaatttgtcagttcggtaaaatccttcgacaaaactgactctcaaacagggaaactaatcccatttcgacatgcagcaacttctccaaaacaaaacatcggacaaagggcatcggatggaacaaccgcagaagcaagaaggacagcaaattggcgcgttggagtttgtccttacattggaaaaactccctgagctgaatggaacggaaggaagcaacaaaattcggaaatttttcagcaaattttcgtccgcaacagaaggttggccggaaagtcgccgcgtttcagcgctggaaagcaaaatcagtggaaaggcagagcgcgcatttgacgccgcgatgaaatatcggctgaaaaatttcaacgaaatttgccgcggaatggaagaaattttgagtgaatgggattgcaccgaactgcgtgcattcaatgaattgtgggaaggagtgaagcgaagaccggaagaaacgttggacgattcgcggaacgactttacgtgattgttgaatgcgcttacccaggtttgccgcccatctttatcagcgattttgcgataaagcacttaattcgtgctcttgaaaaccctgaaatttcggtgggattggaaatagctcgccgtccaggcatgagcttcgacagtttcgtcgctctcgcagtacgcgcagaagaagtgcaaaaggccacgaaatcggctgagtctggaaacaagcaccgaccaaaatttcaacagaaatcgacatttcaaccacaaaaaattttcgcgccaaagacaaaccgaattgtgtgctacaactgcaacaaaacgggacacatttctcgccattgtaggttgccctttgcgcggaagcaatccaactgtgcacgaaaaccgccacaacaaaattttgcgacgaaaagtgccgattttcgaaaaaattcagaaactgagaagaaattgattgatttgcggttgtcgaaccaaccaccggcacaaccaacgaacgtggaagctggaccaaaacggaaagcgtccaaccgacagcgcaattcgtcgtcaagttgcagcgtaaaagcaacaaaaattaaggaaaattcgccggaaattccaaaatggtttttgaatgctatggttgctgccttggctttgctcgccagcacattctcgaatgaaaagtcaaagattggacgaatttggaaaggcaaaagctcaacgagtggcagtaacgacgagaaaaaacggaaagcagatggaaaattggggacaattttttcgccgaaggccgaggagaaattggcggatgtcgcagcaaccaattttgaaaatttgttgaaaattggcactgctctgaactttccaagtgatgatcggaagtgtgcgcaagaagctgctgctgatgaatttatcaggccatgtcaaaagtcggagacccgttttgtccgttgtttttacaggtctgaccttgcaacgcgactccatgccgaaccgatccactgctgacacccttgccgcccctttcaacgccgaatgcactaccgatgagcccaaagcgctgagtacatcgcttcttagagggcgaggatgtgatataattgtgatttaaaatatgtttgccgttttgttatttgattttgtgtcatttttgtttgtgattttgagttagttagtggttagtttttttatgctttcgtcagttctattgattgtcgtcgactatttaatttggaattaaacgataattgtatcttcggcattgggctgtattgttttgtgtttgctttgggctgttgtcttttgttgtgtgcaacaacaacaaccatatttgttttttacgactttaggaaaagcttctacttactcatcaagagctttcgaaagataccaagattatccaatttggttggcaaaaaccttcaaaaataattcccaaatatcgtcattttttaatattttggacaaaataaataaaaatattcatgttgcacaacggactcgaacctcctccctttgtccctttactaccttacaaaaaccacttcgccacacatgcaaatctttttggaactgagaggccaaaattgaaacggtgtgtacatataaaagttttttggcgcgtagcgccctcttgagacagtgttaaatagcgaagctatttcaatttttaaaaaataaattaaaatcaatttaaataaaaatatcgcatttaaattaaattaaaaacaatatcgtttttaaattaattatttgttcatttccaaattctcataatcctaaactatgaggatcgcttagtggccaatacatgctttttgcacgccccaaattatatctcccactagagccagcgttgaaagcgcccccggcgctttcacagggcccgcagggccctggttcttaccaaaaaatttcttattttgtattatggctattctttttccttatatattttgacaataatctaaatgctttaacaatataaattaattaagttaaatgaattaatttttcataagagaaaattcgtctttatattaataagagctgtttttataatatctataataatttataattaaaattattattttttctcatttattcgccttggtcttaggtttaatatataaatattttctttaattcattttctattaaaagttaactactaaaattttttgtactttttaatctatattatatatttcaaaatattaatttgtatttttaaattttttcattaataaattttacagagcttcatacaaattggctcacgttatgtaatggattttataatgaaattattataatatttttttcttccaaaattgtcttgtatgtatattctccagtaatcgggtcaacggaattttccgcgtgatttttcttttcgccataaatctcttgaacttcgtttaaaaattaatctttcttatttagtatttaattagcaacattattctatttttggatttagtttaaaatatctaatagaattttataagagcagaatttatatatcatattttattaaagtattttttgaagctactttacattaaaatttttttatttctataattttattttctgatgattgactaatacactgcgattacacaaataataatattattttttcatgagtttcagcgccaggttttaattgtactctcgcggttacatttttttatcttaatatttgaaaattatttatttattattttttgatgggtgtcattttgctccttttaaccttggcccacgatatgcatttgaattattttgtcctccatttgtgacctgcagnnngcatgc

SEQ ID NO: 5724 - DNA, 4818 bp, Heterodera glycines
  unsure (1)..(4818): unsure at all n locations
ctcctcctcctcctctcccttttccttcttcctcctcctcctcctcttcctctcccttttgtccccctcctttcccccccccctccccctctccctttcttctcattcgatgatggcactcgtcgccatttccctcactccgcaagtgttccctcctctgtacattcgataatagcctttctcgcctgaacataaacagtgtaaatgccgtgctttctttgccattttctcaccccaattcgttccccaactgtttttaactgaaaggggcaaatttaattcagaaaaagcatcaatccgtcgaaggtggccaagcccaactcactgatccaaaagggctttctcgcttcctcgccaaatccgacgatcagaacaccgtggttcagccacgatggattgcacagccatttaggggggtgggaaatgccacggcggtaaaattgcattggcattgcgtttagaccttcaaaagctcaaaaatagcaaaaagatgacaaatgaatatgaccgatggaaatgggtccgttttgcaccagccattgtgccattttcgcctcgtcttttggcagttgcagcgagtcgtttatgtacgcactgatgcggtcgcttttcaaatggcatttttctttgtgcgcgtcgtacggatagtcattctcgcgctccaaaccgccgatgcgttcgatttccctaattgattattttcacccaaaagtcggcctttccttttgaaaagggctcatgaatggcattcccccctatttccgaccattctcctcacttgtacgcctgcagtgggaggcccccttggcatgccatgtccaatttgtcgcagtcctttcaatcgtttcaattttctttcttttttttcatttccatttttcaaactcccgcctcaccagcagttcctgctccgataactccaccaattcgccctttttcagcttccattgcccttcgatattccccgtcacactgaatgcccagcaacttccacacgtcccttggtttttgaccgttgtcactgcgcctttttgtctccaatcaaaactttcgggaagaatcccttcggcgattttgccaccatcgatcattttgccatgggaattcaaaggccatttgtaagggagataaatctgaaaaagcaaaaataaaagaacagccatttttgctgttgtcattttgagttaggcgaacaatgtccgaagggtgccaaaattggcatttttaaattatcaattcgattgagttgatttcacaccttttggaactctgtgacactcaaatcagaatatttcgtttctccaaattccgccgttcccttctccgccgattgaattcgcctggcaatggccaaattcttcttgaaaatgcggaatcgctttgcaatttccctcttcgtgctgtatttgggtccgtatctgtttgatttgttttttgtttttcgttgatttgtcttccaatcgattgatttgggtggccaacctgcgcacaaattggccaaatcggtcccattcgaataggtcgttggctttgatcgttcggttcagttgtgccatcattctccacaaagtgccgtcgtcgtccttttgcccctcttcgcttcttctctgctgctcctcttccccctcttcattgttttcgacttccttctgccattcttctcgccctttgtctctttcgcatttcctttgcacaaattcctcccctccgtccgcattttcgacaacgtccaccagacatttcttaaaaggaacaaaaaaaatgagttcgatcaaataaccgattaaatcaagtccgatcatatcaatttgacagatgagtacgagatagtcggccaaatcagtccgatcaaccggcctgatcactctgatcacaatacgtattgattagtacctttctcggccctttctcatccaccgcacaaagtccgagcagtattcgcaggtggtcctccttcgcatgcaaagtgtttgctttcatttgccacttcattcattaagcctacctgcttcagacaccccgtccgcattaagcttatctccatgcttttcttccgtgccccattttccaattcctccgtctcagtttccccaattattttccccaacttccaaaaatggctgtccccaatttcggcattcagtgcattaactgcgcgaatggcccggtgatgaagtgaagtggaagaaacgaaggtgacagcagataaaaggaagaaggagaaacggagcaacaaaaataaatggggaaacatttggggtgattaggaaataataaatgattagggggaaatgggagggaggcaacgggaagggcggtcaaatgatgacactttggggatcgataaagcaaaagagcgcccgaggggacggacggggggaaaggtgggggggggggaaagaaaacccttgggcggtatccgaacacagccgccacccccgccccncggcacaactgtccaccgaacggcacggccaatgtccgctgacagacttccgtccgtccgtatctcgcccattaattaattaatatcattttttgcatttccaaaacaacctgtttaaaccatgcacatcattttttcccctttttgacatttttttgtgtaataaattggaattgtcatttggcattttggcattcattccaagaaatgaatgccatttacgaagttgttattccgtcagagaaaatgacaccgttggcattcttccccccccccccctcattaattcactggtcggtccaaattgggcattttttggcgcactcagtgaaaataaataattgaccaaatattttggattaattaaaaacaaatagttgctgctttcccacttcatttcttttggtttctttttcttgtcattcattctttgctcaatgattaaacgaaagggtgccaataaaattttaatcggagaaaagactttgatcaccgattcaatcatcgaagaaaaaaacaatggcgaagaagacaatgccaacaaattcattagcgaagaaggcaatgccaacaaatgcgtgtgccgttttctgtggaacaaagaagtgcacggaatgacggcacttctgaaggtgaaatatgggcccaaaagatcggcaaattgagaacattgagtgcagagggggcgacaaccgtgaattgttgaaacacagggccaagccggtcaacggtacacaccaacagaatgtttggtggccaaccatttcccaaaatttggccaacccaatgtccttaatttggccaacccatttgtccttaattaggagaaccattgaccaaatttggccaatccaatgcccttaattagaccaacccaatgtgcttaatttggccaactcattgactctaattaggccaacccgtttgtcctccttttttggccaacctattacccccgccttttgtttagggtcccactgtgtatgtccgacttttttgggcttttgttatcgctctgtgtgttctggcgtcagtgataactgcattgtacactttcgaacactactttgaacgacatactgtcacttacaattctatcaaacggtaagtcattgactcgcgataggaattggccaatcggcgggagaaagtgccggggaaggggtggccaaagtggcaaaatgccaaccaacgaaaaaagggcatttattttccaaattaattcctttatcaaaaccttttgatttcctcgttaagcttgcaagaaatcaaattgcctgtgatcgttctttgtcctaagaacccggatgcgttgaattttagcaaagtcctaagggacattgaccaaagattgcctgtcgcttccctcgggcgccacaccctcaaacagctgatccgatttgcggtggccggtgccggctttagcaacgtggaaggctttgtgccgacaaaaaagggaaagccgaaaaaagacattgattacgaggtgcaattgcagagcatttttggttgattactcttcgtttcagattcagcagttgaactcgttgtttcatcgatggcttggaaatcgatcattgaaagaattttacaaaaacctcttcgaggattggggctacacatgccaacaagtcggttcggttggcactgtgccattttcgactaatcgcattaattaattaattacccctcccccattaagttcatccaaagatgttatttcggctctaaggtgtctttcacgttaatctgctcctctgttccattcttccgaccattcaggtgattcacaattgctgcagttactttgagccgtattttgtgatgctccgcggccgatgcatgcgaatgaatgtcactttgtatcaaaaggacccggcggactttggccgcttcgacgtttatatggtggggaatgaatgattaagggatttgcctttctaatgaatagatcattattattgttaattggtcccttcagaaccaattgccgagccgactgtccaatttaactccaaaaaatcaggcaatccttcatttatccttgtttagagtgccaccgaatgactcttttcctttccgccgtttatcagcaattttaagccccaagtgatcgcttatctgaccgacaccgaccgaaacgtcggccttttcccccgctattacatcaattttggcactgccgtatcaattcgagcgaaagcccgtaatatcagcatgttggcggacggaaacagccaatgtcaaaactacaaaacggaggaaaaagtggggaatggggagaatttgaagaaaaagcgatgggggggtgtttaaataggngacaaaatgagataaaaaaagtaagttagggacgaacacgtgcgactgag

SEQ ID NO: 5725 - DNA, 2866 bp, Heterodera glycines
gctttcgttcattcatttcgtctttttttggtgccttcgccgatttcattcgccacaatttccaatttccatgcgtttttcctcagttttgccaatttttttctcccattttttaataatttttttcgctgttaattcgctgaaaatccgagaattcgttgcccctccaccgaacgaagtggcaaaaaataaaggcaaaatgaatggcacagcaataacaacaacaattaacagcagcactagcaagagaaccaaaacgacactggcattttttaaagaaaaagggacaaaaagggatacggtacaaccaaatgggcatacggtaacaccgagaggtacagtagagccggttatggaaagacaaaggaacgaaacacaacaaaagggaagagaaacaacggcagaaaaagcaggcgaattggtaatgccactgaaagaagatggaaatggagagaaggaaacggaagaatatggaaaaggaaaagcgaagggaaaggaggaggcgatgggaggagaaagaagaagaggaagcgaaagggaagagaaacaggataaaggcacaatagcaaatggaagcgaaaacggggcagagaaagagacagaaaaaagaaaagaggaagagaaagagacggatgggaaagatggaaaagaagagaggaagagagaagaacaaagagaaaagacagaaaaaagaaaagaggaagagaaggagacggatgggaaagatggaaaagaagagaggaagagagaagaacaacgggtaacggagaagcagaacagagagaaaaaggagcccgaaaatgagggggaagaaaggaatgaaggacagagggaagagcaaaatacagtgaagaaagtgggaaaggaggagaaaaaggaagaaaaagggaaggaggaaaagaaagtgggaaaagaggagaaaaaggaagaaaaagggaaggaggaaaagaaagtgggaaaggaggagaaaaaggaagaaaaagggaaggaggaaaagaaagtggaaaaagaggagaaaaaggaagaaaaagggaaggaggaaaagaaagtgggaaaggaggagaaaaaggaagaaaaagggaaggaggaaaagaaagtggaaaaagaggagatagaggaagaagaagggaaggaggaaaagaaagtgggaaaggaggagaaaaaggaagaaaaagggaaggaggaaaagaaagtggaaaaagaggagatagaggaagaagaagaacaagaagaagaagaagacgaagaagacgaagaagacgaagaagaagaaggaaaggaggaaacaaatttaacaagtgtagagaaattttttgcaacatcagcaaaagcagaagaaacaacggagaggaacgacgggggagagaagacgacgacaattttagtaacagaaagagacggagagggaagcggaacggaagaggaaggaaaggaggaggaagaggagagaaaagaggagggggaggaagcggaagtggaaggaaaggaggaggaagaggagagaaaagaggagggggaggaagcggaagtggaaggaaaggaggaggaagaggagagaaaagaggagggggaggaagcggaagtggaaggaaaggaggagggcacggacgaaattggcattcccacaacgtccaaaagtgtggtgactctgccaacgattgcattgccaacggaatcagttgaaagaaaatgcgcggacacacatgattagtaagtacagtgacagaagggaacactactgtagctgatcaaacagtccgccccaattaattaattgctttcatttattgaacagttgtcgcttttgggctcggaatggcttttgctccaacgctttttacgcaaaagagcaaattgcccaattttgtcgtaagacatgcgcactttgctgaggacaataaactgagttaatttggtcggaaaatatcgattggtcacagatcacaattgattatattgattattttatttggtacaaaattatgtacaaaattctcggcaatatatataatgttatgaatgtgaaatcagcaaataaacaatttaatataactttttgggacaattggcttcgatgaaaggcacagacaaataaataagcaataatatttgtcgtaaaagatgatcaattaattaattatcaattaattagctgatagctttgccattccgttgctccattgaatgatcaattataattgtcttttcaaatgcccattttcattgtgccattctcttacagcaaaatgtccagcagtggtgcgcctgccgcgtccgcgccgtgcggcaacagtcgctgctgcgactcgccgatggttcgttgccgctggccgtccctcgcggcattttcctccgctgtttcggttgaggcggcggacgtcgcgcgtggaggggcggacgcggtggagatggagcgcatgctcgggctggccgaccccacacaattcgctcggcccgggtccctgccgagcatcgatcttcgccctgccggcaaatgaatgtttggcccaatttcaaccgcaaataaaaagggtaaaactgacatttggcaccaaagagtggcgtggacagcgtcgaattgcatctgcccgagctcatcaccgcgaggctgctgtgctgcagcggcgccgtactgctcgaggcgattcggaaagtgatcgaatgctgcgggggcgttccgttttgattggtctgaagggacggacggatggaaaaatgcagcaaaagcatggccaacaaaggccgcggaaacggcacccaccgatgccatacgcaaactgccaccgacgactccgccgaaagcgttgtccacccctcccacaaaatatgtgctctcccccgtgtatttggccctgcgcatcagctg

SEQ ID NO: 5726 - DNA, 6562 bp, Heterodera glycines
cagtaaagtaaatcgtttctaaatgtacagaaattgtacgggtcagtcattgtgggcacttcaaattcaaaggccaccattacgcagggcgagtgatttaaagcaaaatgttttaattttaatggtcataaatttcaaaggtgcgtgtcaagttgcgactcggatggctgcaatttcgcaaaagcaaaaaatatcactttcccatctcaatttttattgttttttgcacttataattttaattgtcttaaattttaacccataaattatcgaaggataatcataaaaaaacattatttctaatactctattcagtaaaactgaaatattctcttgaatggtaatttaataataatacacggcgattcaattttgggctccaagtacaattaagttggttttttcgtcttagtggtctgtgagttagtcaccaaaaagggggtctcaagttcaattcctccttgtgtttgtgtataaatttcaattttttaaagcaaataaataaaataataataaatacagaacgccaaaagaacaaatacaaacagtaaaaggtacacactatattttacccttgattttatgaaatttttttagcttataacttggccaataatagaccaaacaaaaccattttgtgctcattttgaagggaaaattctgaagaatatttcttaattagtcaaaagtttaaaaaattgtttattggcaaaaaaatgaaccatgtgttattttatatgttagagacatggaaatagtgcgtcaaaatgagagaaaaagaaaaaactttgtctagttgaatttttttttctacagttgggattttctttaaattttgcataggcccatattttgacctcctctatcgattctaagtttattttgtgaaagttaagtttttaactcgagatcggctcttctttttttgcaagggaaaatctccggaaaattttaagttttgcaaagttttggcgttctgattactaaataaaaaataagcataattgtactgggagcccaaaattgggccgctgtgtaaaggaacaaattgaataagcggaaacacaatgatactaaaaaagttacaataatttacatattccattaaatatcctataagcaatgaacgaaattgacgatggccatggaatcgacaattcagaagaaacgcggcggttcaaaggaattactacaaaataagcaatgatacagtatacaataattagtatgcaaaataacaatacactataatatcccaacacaccgattacgaagcattgcgggcgtgtcaggcattcgaagcggtccagcgatttcactctcgttgaaaaccggcgtctccagcacattattgccaacatccttcctattcgcttggaacatcgttgtctaaaaaagtaaatattacttgaaaaaatctgggaaaaaacttgaaattttcaattattattacttacatcgttgagattcggcgtacttttgacacaatcaaaggaaaggcccaacaacggagtgttcccatttagacttgcaaaggcccggttcgggtttcttggctgcagctgcaatttgcacgcatggagatggagttgcttctcacggtcagccagtcttcaaaacaatatcaagccttttcaatccttgagcaaattcagggtcatacaaggaatgattcaaaatctaagctctaaagtcgacgaagtttgtctagactgcttttgagtggtcatctaattgtaaggcctctctattgcgccaccttgcgctcttccaataatccattacaaattcctcacttcgtcttcaagttttgggcctgctctttgtatcgttccatctccgctttcatttggttacgttctttcaaagctatgcgctcgttgtccgatgatttgcgcagttccactttcagtatttggatgtatcttgcagcactttgcatctgttactttataaaataacaagactaaatcatttgaaactttgattactttagccttttcttattattactactattggcaaacttccgacaatgcatccatttaattattgtacttttccttatgtcacttaaaattctgactttttagttttgtgcaaccacataaatttaaaaaaatcaacgaaggggtggatggcaatagagcaacaatttggaggcgtaaaagcaaaacttccatcaccttttccatggtttgtcgttccttaaggcgcatgcgattgttttgttgaaagtccaccaccttcttcaattgcatactaaactccttgaaaaggttgaccggtggacagaataactgtttcaactcgggcttcatttggttgttgaccttgatcaatttaatattttgacgctgacagacggtacaaacagacgcactgccgcattctaaaaagaaaacatcagacggagagggggtggtagaggaaggaaattctaacgcaccccgaattttcataatatgcatggaatcgtgaaaattaatgattaatgtgcacaaagccgaaaaatggagacatcaattcagtgctttattgtaccgtggtgattcttttggagtttaccttttcccatctccacacaattgacacacaacaaatgtccacatgaactaaaatgcaaatcatcgtttttgagaaaacatttgctgcctgttaagaaaacaatagtaataagaaaaatatagcaaacaaacatacagcaaatccaagccatccctaatgattaatggaataatctatgaaaaaattgagcttttttatttgattttaaaaggtatcagtcaaataatagaatcaatcttgagaaccaaataggaattaacaaaaacaaatttattaaatctaaataaatgaaaataattaaacaacaatttagaaacaaatgagaaagtggaaacaatttaaatcttaaaaatgggaacaatttaaatcttatgtgggaacaatttaaatcttaagtgggaacaaattaaatttaaaaaagggacaaagggaaatcaaatggtgtacgaagaaattctctcaaaatcaggcattgactcgatgaggtgcaatccaaccggcatgttccagacaaagcttctgattcagatcagcgaacgtttccatgtcacgtggagcatcatagtaattgaagagattgcggccccgttttgcatattcatttgcgatgtaaacctgaaaattgagtaaagaatcgagtcgtaaatatgtttaaatacaggcgcaggcaaagaaactattgaattgatgatctgatggccaaagcacaagtggtaagacatttcctcgaggtccatgagactgaatttgttgtcgtcgtagactacggtgtattttggggtacgtgcagtccccttaaaaaatcttaatgggttttgcacatacaaaaaataaacctgaagagtacgatgagaattgagaaagaattcgcagtttgacggatgcactacagccgtgtcgatgaccgtacccggtttgatgttttgttcagggggcttcgcattaggttgaatctgttgaatttgagcatatcaaattttcagaggaaagaaagattacctgtttgctgaagaagcgaacattctgcagtttgttcgagacaattaatgtcagaccgacattatcacaaccggcagaacgcaaagcgcattgaatcagcggaacttcaaatttcaagatcttaaagtaaatgatacaccagaaagaattaatatccaaaaccattttgaactgtccctcgctgcatccgtttcggtaaatgacgacacgccttggcaaacttcccctgacttctttaaagtagcccacgcacttcccaacgatcgactcgatgatgttgaccttttcttcacgccgagctctctaaaataaagatttaatttaaaaaacaagctgcgacaaaacctgatacataaaatcgccaacgaaatcaaatgggagctttgtcggcccaacgtttgccgcaaactaaaattatggatagtaagaaaaaagcaaaattataataaatgaacaaaccccaacgaccgaaggaggaccagcaacaatggactcctcagacgaaacagaaagagtctcactccgtaatgtttcagcttcagccataggacgctcgccaataccgcctccgggatgattggtactaataccaataataagcatgtccgtactagtaacaaaccttaaaacaatttaattaagaggaaaatagcagcactaaaactcacggagatcgcggaagattgtaattgataccaccgagtttgacgttggtcttattcagaatattgtctacagtgagacgttgctgcttcgcagcgacatttctaacagtaccagccctaacacattggctgataatttggtagtcacgttcgcattttttgataaagtgatgtgccaaatcatccccatcggcatgaatgcaaagcataaaagcaattcctgattgagaagcctcttggaacagcgctgaaatgtccttaaaataaaaattaaaaggtttgtggtggccacgaattagattattacttcttttgatcggaaattcaccagtcgcaaatggtcccttggaagggctggaagtttaaggcttcgtctttttgcctggtcttcaagcagttggataaatttgcttaaataaattgataaataaaaacttttttatggaaacatactgaaggtctggctcgctaagaccgcgaccaccaagttgaacaaagcacgccaacatccaactgtaagtaccgtcagcaaacaccgattgagggaccagcacactgttgattcgccaagcagcagaaccttccaccatcggcctctgcatgttaccgtcgccagctttgacttcaggatggttgagctggtgagctctcttcaaaaaggtgaatgaatcgtttatcaaaacaatgaaaaacttacgagggcaattggctcggtagtcaatttaatccctgcctcatctagatattcactgtcccagagatgaatagacttcgcagtgttgtgaacctgacgcttgaagactaatggtggaatggcacacttctagaatacatatatgcacaatttactaataaaggaaagaaactttgattgactgctgaatcattgtcggagtttgttgctgagtggtgactcgctgattgtcaatgatgtccaaaacctcgattgggtagtaattcactcgcttctcattggcaaatctcgaattcattgcaatcaaaggaaggtttgggtagctaaagatattttcacttcaaccaaacatgtttttttcatactccagacgacgaccgtatttgttgttaaaatactgctcaattgtggaggcgttcccatcaacctcaatttgcatctcattagcgccttttctttccagccccttgattggaaagcgttgaatgttggtagcgttgtgattggtttggacgaaaaggccttaatccaaaaagcattgtattaaaaagtcagaaaataacgcacctttcaacccggtagtcaacgacgaaaccattcttcctttgtccatgtctaaattaccgctaagcaacgccatgaccttctcgaggagagaacaattcgcatgaaacggagttttcttagctgaattttattttattttaatcgaatgcttcttttattaacgtatgaaattacaaatgtccgtggggttcgaaattatttttcaaaaagaatatacgttggacgagcaatcccgcagcacaattagtccttcgagttcgtccagtgccctcgattaggtgggtcgacttgctgcaccccaaagccaaataagttttgttctcatcaaaaacaagggcgtcttcttctgagaacccaaattgttcggggctgtacgcataagacaagccagtcgaaaaatggacatgctcatattgtccttgttcacttaatattttaattgtttcttagtaaatctgtaacaaggagtaccagtgaaagaaaattttctgactcgttgcaatgtccaaaaattgaagaaggtcacgatttcccaatgcaatgtcgggtcgaagtgacgaaagatcttccaatttcaccacatattttccacgctcatcacatattggtttgaagctgactgtgattttgctaacgtgaagttcgctgaagaattgcggattctgcatatcactgccgttaaactcaaaatcgagctgagaaggcttcgatggatcattggtctaaatgaaaaataggttgggcatttcgaaacaatgggcctggaaccatcagtgttgcgaatggcttgcaagagagtggcattatcggtgtgaaggtcattgtagagacatcaggcatggagggcgaaggtctcgatgaacattcataaagcggggaatgactgcgtgtcaacagtcacgacgatggacagcgatagccaggaaaagtatgtaattcagttaatgtacgaggacgacaagtggctcatcaatatatttcttggtgatcaagcctcacgatcgttcgccgcgcacgttcgccgacaatgggcgcatagtatcggtagatatccagcggacccatgggga

SEQ ID NO: 5727 - DNA, 2249 bp, Heterodera glycines
  unsure (1)..(2249): unsure at all n locations
ttcagttaatgtacgatgaagacacntgactcatcccttatattcttggtgaacaagactcncgatcgttcgccaccacgttcgccgacaatggacacatcgtaacggtagatatccagcggacccatgctgatggcgtaaacgttggtatgaacttccaaatcgccttcgtggcctgcacttggtttttccgccatgacagcacgaccaacttccacctagaccaggaactaagaagaaaccattaaacaaacacaaacatttctgagttttagagccttctccgcttctctttcgtaaagagtacgttcacgaggctcgcttccagaaccagattgtgttccagtgacagaacgagcaagactaccaatggttgacattttaaattaaaacaataagcttaagtaatagataacgtagattggaaatggaccatgaaaattcgatttgatatagtttacccaaacaaaaataaaaccataatatctttttagattcattcgatatgattgatatataatcctaagtaaactttatgaatcaagaaaccagaaaaaaatgagatgaattttatggctgtctaaaaggcgcaaattaagatacagatgttacaactatacaattctaggaattcacagaatatttatggtcaatgaatgctgtttatgtattacttcagtctatttgattaaccaattactaaaaaaaataagaagggaaattattaaaagttggagatggaatacgcaaatgaatgtgagcgggtgtgggcgtaacttaaaacatgggctgaaacacggtggaatatgacatgatgttcgtactgcgataccgtacttgtcatttgaatttgattcaattgcccctctctcttgacttaattaatgcttactgtatggtgcttttcgtctctttctttttccaatgcttttcccctgttttcttttatttttttttgtttgccttaccttacaattaaaattgttttctttatctatttttcaatctcatttcaataattaaaatttgttcgaattcttcaccatttttcgggacaacattttgagtcaccccgcccatttcccctaaatttccttttttcaaattccgataaacaattccaaactttgttttcagtttctcgccttttcactttataataattcgcattttgccgctcttttccatctaaaacaataagtgatcatttccaaagagtgagaaatatgaggtcatttctgttctgcttccattgcaacttttatcaatcattgaccacgcccaaacgcgattaattcatcttaattaattatgacaattcgggaggggtcgaccgaccgtttccctccctttcggtttcaatgagcactcattaaatgttcaaatgatggaaacaaagttatgttaatttaatttaaggcataattacaattagcatacataataataaactttaatttttattttccatttattatttattatttttgtcgtttttgtgctttccccccccccttcgaaaaagagatatccatttttctgggataacctctaaatataaaaatcctctgtgaaataaaatggcgattgtgcacagccctccgtctcatacgcaagcgcttttgtgaggtataaaatttctcaaaaaaagagatagccatttttctgggatagagtataaatttaaaaattccctcaaaaataaaaggtctattgcgcaccgccctccctatcatgctcgagagcatttgtatgtgtataaaatttatcaaaaaaagagatagccatttttctgggataacctctaaatataaaaatcctctgtgaaataaaatggcgattgtgcacagccctccgtctcatacgcaagcgcttttgtgaggtataaaatttctcaaaaaaagagatagacatttttctgggatagagtataaatttaaaaattccctcaaaaataaaaggtctattgcgcaccgccctccctatcatgctcgagagcatttgtatgtgtataaaatttatcaaaaaaagagatagccattttttctgggataacctctaaatataaaaatcctctggtgaataaaattggcgattgtgcacagccctccgtctcatacgcaagcgcttttgtgagggataaaatttctcaaaaaagagatagacatttttctgggatagagaataaattttaaaattcccctcaaaaataaaaggtctattgcgccacgcccctccctatcatgctc

SEQ ID NO: 5728 - DNA, 691 bp, Heterodera glycines
gagaagacacagccaatggcaagggacggggctcacagcaaaggtcgcccactgagttttgggagcaacagtaccctctgcataagcacgcctttgatgggaacgcggagcgcatacggtatgatacggtacagtgacatttgtcccaatggcgccggtcttttgttggtggacaattcgctcctttaagggaactgcttgcccagggcgatgaccccaatgagcaggacaatgacctttggactccgctccattactgtgccttttacaaccgattggaggcgtgcgaaacattgcttctccacccacgcaccaatgtgaatgttgtcaatggcactggggcgacgccgcttcatttcgccgctctgaacggcatcatttacgtggccgagttgattttgtcccaccaattggccgacattgtccgtccttgatcaattaatattgtaatataaaatggcattccctgccttggcagaacattcgcgacgccgccggaaaaactccgttggacctttgcgttttggtgccgaagtccgactggcgaggggtcgcctttttgctgaagcagaaacagccggcgaaactgaccaaagtggaagtgcagttaatcggtgcaccatcgctgcaagtggaagttgacgatgcgcagaaagaaacggcaaaagagttgagaacgaaagtgtgcaaa

SEQ ID NO: 5729 - DNA, 4157 bp, Heterodera glycines
tccattttggatttgaaaaaaaggaagtgacgattccgaatgaatgtgccgaccaaacacttcctcatttaatcagtctcttttttttaccaggaacagcttaattacgtaataaatactaattggaattgcaccaactttcgcttaacagtcagtcgcccagacgaggttcttcccgagaaacattgcaatgccggcgatcgttgttttggcgccgaacaatgcgatgagcaacggagaacggccagcgtcgtggaatgtttggtaaacttcgctttgattggaagacattgccaaattacttaatttgcaactgaaattggagaattttggaatcgaaagaaaatggcaagatttaatgggccaattaaataaaactcattaaataatgagataaagagagaaaaccgctgaaattcttaatggaatgggacaacttttctctcctttcattttacacagtttttgttgaaaattggaaaatgctaaattaataatgcacaaatcatttaataattggcaaaataaaaactaattaaattgcttctatcgtcaaaactcataaaacaaagccaaaaagtcggcaaaaatttaaccggatgataaaccaaagatacaaacattagctgagaaatgagacaaacattaagtacattttcacactttccacctgcggtggcatttggccctttttggcattttcccatgtcatttattagaacaatttctcccattctccgtcatttttcttctgcttgcatcacagataaattcgttaatacatttggctaatttttccaatttattctaacagttaattttcctttaatctggttataagattttaaaaaaatataaaatttaaatttttgaccttgtatagttgtgaagcaaaatagcaaaagaattaatgataaatagcggcaaagccattggccaattgtcctgggaattccccccccccccggaacccattaaatttaattaaatttgaatgccgtatttccggggcaaaaggcaaccatttatcacatcgataattgcgttacatttgtgaaaaactgttaaatggttaaagatcaaattctatcattttttgggcataaattatatttttgattcattttcgttttttgtaataataaatatttctttttcgtattttcaaaataaaagcacctaaacacaataaataagtaaagggaattatgatgaaatgattaattattgtaattaatgaatatttaattgcgaatattcaaataaaaattttagtatgcaattgcacagttcataatgatatcttatcaattcattatcattagcatttcatttgcatccatcatccatttgcattgcccatttgtcagaaggatgcgattgtgagcaaagtgtgcgcgtcaaattcgacgcctttggcgtacattcgccgaaagggccgaagaagcgcggaaagattgaccacggcaccggaacggagcagaaagggcagcacgagttgcatttgcaccgcgtacatggccagcaccggtttggcggcgtatttgctgcgtcgatgggccaaaagtgccaaaagcagggaacagagacgggcgggggacagtgccgggcgcgggacgaagaaagcggaggaagcggacgcggacgacggccgtggcatttcaggacaaaatgggacagcaaaaaaaaagagatcggagaagaagggatggcgggtaatgatgaggttttggcaacaaaaaaaccaatcaaataattagatgaattggcactgatcaaaaaggggaattagtgcccccaaaaataatagtcaaaattacgaatgagtggcttatttttctgtttttaattggtttttttttattaaaaaactgaaaattgaagggaaatgacttctcctttaagcaattgtgtccaatttttactctgttgccaaaagaggaaaaaaaatgaacaaaacagaggtgaaaaagccaatgaatgcattcactaaaaagcatcggaaaattggagttgacacgtgccattcgcatttggaaccaatgaaatgccaacaaactgggacaaaagtgaaaatttcgaaagactgacactatggcaaaacaaaatgtatggcaaagagaaagttggttgaaagatgcagcagagcaattaaatgcatttaattggtttaattgccattggttaattaatgccctccgggcaagactcttttcctccccgctgggctttggcgagtgggaaaacaaaggcaatgaatgcataataaatgagtgcaaatagtggacaaatctcaactgaatttaaacggtctcccactgaaaatctttgccttaatgacgtgtcccaatttgctttctcccgtcgtttggcggcagaataaaattgtggcaccaccagcagtagccgcaacaattgcttctcactcggaatcatgcttctccctctctctccacattcgttcagttttccctttttgagaatttggcattggcaaaaaagggaacaattggccgagggcacgcaaaaatggcacacactttttaattgcattttgtctttgtctttaattggccctcaacaattctttgaacaaatcgtggggatttaaggaaaaccaaaaagaaacagaaattaataggatggacaagcttatccacaaatattccttttttttgttttatttttcattcctttttaattgttagagaataaaatataatatatgaacaaaatgatttctttaaattattaattattacctcattttatttttttttaattttgtgtcaatttgtaatttatagcagccattttaatagacattttatttaaacaaattgtttttttcggatattgcatttcttttgggtttcgacacttgtgccattctttttttcgatcagtcataatcgtcaattccgtgctgttcgtccgcattttccgggtttggcaacgtcggcttataaaattggaggagcggcgatgggccgcccgaggccgcgtcgtcgccggagggtgtcatttcccttcgctttcgtccactgatcgctccgatgggagggatcagaaagagccttcgcgcgatcagatcctccggccctttgccatccgtttgggcttcagcagcagaagtaacggagccaaggggacgaaatcttttcaaaaatttgaaaataattgagactttcttcattgcccacctctgctgcttctgatcatcttcagatgaagcggcagacaaagacaacacgtctatttccgcggatagtgatggattgtccgttggccaattgtccgatgatggtctgtccgtgtcgctctgtctcgtaaaagcggcgccagaattcttggttttcgattcaacaagttctttagggacgagaccgagaagaaagcgtgccacggtgtaatttcggagtaaattcgggtcaatttcgacaattttcagtttcgatgacggacaacgcgtgcatttatcacatttgtgctgatgccgcgcacattcgttctgcacacattgatctaaacaacaccagctgaacttaaaattacctcaaactggagacagaggccaaaaacatggaaatttaaagtttaacaaacaaattattgccaaacactttcggagacagtgtttaggacaattttattattcttgacaattaataaatatttaaatttttacccgttctaaaatcactgatcaagtgacgtctcactgagataatttgatcatcttgccactttattttctcataccctccactttgtcaccactttacactctcttgccactttactctctcacttttctacactctttcgccactttactctctcactttgctacactctttcgccactttacactctttcgccactttacactctctcgccactttactctctcactaccctctactttctcgccactatacactctctctcgccactttacattctcttgccaatttactctctcactttaccatactttctcgccactcatcgcattgccttttgctcaatttttggcatcgtttttgccgccgttgtgctggcgaatgcatcccgtcaaaattcattccatttgaaaagtcgttgaagcctccgccgccgtgctgagactttcgacggcccgttgaaccatcggg

SEQ ID NO: 5730 - DNA, 2023 bp, Heterodera glycines
tatcaatttttaatttacttaaagcagagctgtgatctcaaaattttgaaaatcctcatttcagccgtaaaaatgctcatttgccactaaaatacctcaaaaaatcctcatttggcatgaaaaatcctcattttttaaaacatcataaaatgcgtacaaaatcagttaactgtcatatttttcatttgaaacaatcaaattcatcaatttcttgtcatttataagcattttatggaagtctgagcacgaaaaatcgaagttgcacttcacttgggccaatgctttcactgtgtccatgtgtaatgaattctgttcatctgtccattgagacccacaaaaaattgttttttttgtggcgcggttttccaaacaactttttgggaacattggtccggcattgccgataggcctgccggaaaaaatttggaattttgagtgcgatttgttaacaaattttgtcaaaaaaaatgattttgactgaggatttttcgaaaaaatgtttaaagcaggggtgggatcgtccatgctccgttcccaaggacgggtatgccgatttgcaaggacataatgggggaaatacatgaaatccaaggacatttaaaatttgtattatatgcaaagaaaaatggttaatatttattcaaatggcttgtatttttcaccggaatggatttttccaatttcaaaattcattccatttaaaaagtcgttgaagcctccgccgtgctgagattttcgacggcacgtgttaattgattaatgagtcaatgctaacagttaattaaaagtgtttattagcgtgggaagaatctgtggaaatcaattaaacttaatcaacagtctgcaacagtctgttggctgaccgtacaatcggcacaataatggtcataataccgaaactgcgcttgaccaccgttgcgtccagcttcccaacgcccggagcccttctccgtcgccgtcccccgccgggaaaaaacacttcgccaccgttgccccctctttcaatcgcatccaacagttgctgctgctgttcaatgcgtcgtcccgtcgaaccgtccgggaaaagttcggggccaagcgcggcgtatggtttctacgcaagagattaaggcatgaaaatagttattttagtaatttgtttattttaaaattcataaaaaacaaaaaatagtttggaattttaattacaatttccggtcagtcccaaattgttgcttaatttaattatttgtgccggcggaagtttattaccgtattatcaaagtaccattaagccttaccgtatttccattttcttttttatgctcgcatatttccctttgcaattcccacctcatcggccacgttaattggcggtgccacagcagctgcctgttgagcagtgtttgcgataattcccgaaccaattgctgccgctgtcgccgctgcgccattgtttcggttgcgactgccgccgcaacaaaagcaaccgccgccacaacagccgcaacagtcgcagcaaccgcaataacacgaacaattcgaagatggggggaggagtgcgagcagtacaaggaacaactgcagcagaacaatgcaacgacaaaggatcatctgctgaagggagggagggcaaaagtgacgacgaaaaggccagcgaactgaatgacctaccaaatgggagaagaccgagcagacggaagacagaccctttggcggggtgaccgcccattaaacggacgaacgccggggaagtgggcggagggcggacaatgggacaatgcgaattgcaattcccatttggccacatttgcccaccattcattgtctttgctccggttgcagccttgttttattgtcgaaaatgttgaatacaacaaatgcaagcagtacagcaactcagcagcagcaggaggggcggggaggggaaggaggcgatgactcgtccgctggccgaccgatgtttcagttttgcgtcaattttgtctcccgcgcatccctcctccgattcgctgatatctgctgctgtccattcatttctttc

SEQ ID NO: 5731 - DNA, 2255 bp, Heterodera glycines
cgtcatctctttttttaattgttatgcatcgccatttaacaattacaacagccttcgccctgtgaaaaggtcgtcgtcgttggccccgacggatggttaacaacaacagcggaccggatcaaaagccaagcaaacaatgggagggccatgaacagaaactgaagaacagcagcactatgactggtcatgcgacggattctcttccccaaagcaatttttaagtaataaggaaacattgggcctaaaagtctccgttttggtcgtcattttgatcagcgattggttctgccgaccattcgctgcctttgccattctccgtcacttctcttctcctgcactttgtctctcatctctcccccaaatgttggcactttccccattccatcagcagctgctttccccgctgcccctcgccgttcttttgcctttgtttttgccagctttgctttttccatcgatgccacgcgttgttgcgcaatgcaagggcggcggatgcgaatgttgcggcggatgtggttgcgcggaatgcggcggatgccaacaattacagttaggcggtacgtacgtacaaattggcaccaattaattagtggttctctcgactcaggatttatttcctatctgatttaagccttttgaaattctttttcccaaagacattgttttctctacggcacaaaatgcttcttcaaacggcactcaaagcgatacacaaaacagcacaaatggtgccgttaaattgaatgagctagtgccaaaaatggttgttgaagcaaagaaagaaaatgtcaccgcttctgtcccaacgtggcgaagacgaaggaaaagcacaacgccaacagattgggggtgagagaagcaaaacacattttaaatttcccaaatcactcctaatgattttattttcgataccataatcctagtcatatacttacgaccactatttgaaaaaagtattttcagatcactctttcacagtgatcgggatactcctaaaatgttgaaaatcgggaaaatttcgcaaataatccctatggggttggggaatttctaccaaaaaatgagtagaaataccgtacagtaaaccgagagtacccaatttacacgatgaatatggtaagaaattgagttgtgtggtgaaggattggagttttcccttcatcgtttggcagagaaggcgtcattaaactcaattaacaaacaaattaatgcaattgctgtctaatttgtccacttacagctccgagaagttgttgactccgcaacagttggagggcaagttccagcagattcggctgcttcaacagcgtccgctggccccgcttcagcccgaacttccgcccatccaaccgcccgactttccgcccctttccgcgtccgcgggcgactcgccgtcgttcgcttacgccaacgaagaaacggcgggcaaatttcggccgcaagtgaccagcggaattggccaattcattcacgtgaagccgacagtcaacggcatcggcgacgcaatgggacagcgcgcggacgccgccgccgaatttgaggacccgacacttaaacacccatttgaggagccattttggatatgaagcagcaattggaaagggactggactgtttttatgtactttacatgaaaaacccattaatttgtttgaatattttcttaaatttttaaaagattttaggaattgattaaatcataattaaccaaccatccattaaggatgggaagttgcagcgcactttatgaacataagagaacggattacatttaatgcattaaagcaaataaaaaataattaactttttcatttgaaagtagtcaatttggcttaattttctcccctctgtaaaaaatccttccgtgaaccttttaatattatcattaatttacaaaattgacatgcaaaaagtaaaataaggaagggtccctccctcccttctcgatttgctctttctgtttccaaataaacgaattttgccatcgatgcccaaatttggcattgtgccgaagttagcctaattgaaatttttattttacatagaaagcaaagaaacattccaagaaagtgaagggatttcattggatttttctgatgaatatttaaggcggattataaaaggcttcttcttccccgaattcttttggaaaaaaggcttcatcccttcaacctccgttttaatttacaatttctctctttttcggtttttccatttccataaatcatttcttttcctcttccgtccgtctctgat

SEQ ID NO: 5732 - DNA, 4541 bp, Heterodera glycines
ttttgcaaatttttttgagacaaaaaattgtgaatatactttttattcgccataattgtactgttaatgtttaatgttcatattatgagtaaataaaacaaaatttttttcaaaaagggaaaaaaatttcaaaaacgtccttcttgtaactagcgccaaaatttttgctatctatcgatgtatgaatttttccttgaaaagttgtgacaattatttttcgggattttgacgggggatttacgacagccattagcaatattagcaccggcaacattaaagtgtcgatttgctgctgttcctctctcttttctcctcctcctttttgcgccgaatttttccttttcctctctttctcctccgtctctcctccttccccaatgctattttcctcctcttcctttgtttctccattcattcccattaaaatttgtacgaaataaaaaataatttttcaaaaaacgttcgaattcgggttaggggttcgaaactgcgcaaaaagatcaaattcgtactcagtcagcgcctcaaattacccttaaaattgctttatttttggggtttccctcttttttgtgggaccaaatgatcttggcgattgccaaagccatttaaggtataactcgtcgaacaatcaataaactcagcaatttgcacactaatcatttataaaaatttttacagaaattatcggtctacgtcagttcggccccgcacggttcggccccagccatgttttggactataacttttttttctttgtcaaccaaatctaacaatttttatatcattcgaaagcccttcagatcagggctggagcgcgaccgcgatgcgcgatccacggcgtttttttttgcgcgatccgcggtcgcggcaatttgaatgcgcggtgcgcggccgcggttttttctgtgcgcgctccagccctggtgtaaacgtagttttatatattatttgttttaatcttttaatttagccccaaaaatggaaaacaatcaaattataacgaaacaaaacaacaaaaactcgaacatgaaggatgcctctatgtcttccatatgttcaatgctgaccgtgacgtaaaattttggcgctgtgaacatcagcgtgatgaattcaagtgcaggggacgccttcacacagcgctcaatgatgtcgttctgaagacaattggcgaccacagtgtggcaaatgtcatcacacaaaaaatcgtcactggcataaagcggcgtgccgctgagacgatggaaccaccagcggcaaccaggacgcacacacttcagcaaattgccacgccagtaatggcgaacattccaacaaagaatgccacaaaaaagtgaaaatctaatcatttttttacgttcacatttttggttttaagctagtgaagcgagtccgccatgaaatcgaattgccgccgccagtgccgctaacgcttcagtcctccattgttttgtcccgaagaatgaagtgtgcatgagcgcacaatgaacggcaccgaccgcacaaataacttcgccgaagcataccattgcacgctgcaactttcgatcggacaaggacaccccccgatctggaaattcatcaacattttgcgcgagcatcagaaaataatcgacgtggacttcgaacatttcctcgctggaaatgctccgccgcaaaagcaaagcgttaccgtgaagtggacagacgaattttgaggattctggagcgctacaatgaggaaaaaacgcagccgcaaatcgacgatgatcaccaatatggccaaaaccaaaataaccgaaatttgatttattgaaatgctcaggggaatttcaagcaattaccaaatgggtaaatgaaactttgttaattttgttaaaactttattttttctataaatttttgaatatttcttgttgtcaatgtatctgtgaaaatgaaaatatagcatacagaaaacttaattaatccattttactctataaaaaatgtttgagacgcaactggccccttaagtactaagacgcaactggctagacgcaactggccccccccctaccgtggaaaaatatgtctcgagttgcggaaatgccaaaaaagcggtttttgaaccggttctaaactcgaaaaaatggagacggagaaattatttttcaacagaatttatttaatggaaacttttgaaattttgaaggtgtcccaaaaatgtcacgcgtcaataaaaaaattgttgcttttgttaaagaatctctgaaatttatattaaaaattcgaaatacaaaaatttttctatttttgatcagttaatcgaaaaagacaatcaaaaatgtatagtgcctgtctctaaaattagcgaaggaaaatgtttttcggtaatagtaaagctggtgccccccccttttttgaaaaaaatattttttgttttcaaaagacatgaaaacaggtttcctgtggttttcgaggtcgctgttcaggaatccagtatccatttcccctattccgaaccccggacccgaattcgaacaaaaagtcgaaaattcaatttttggaaacacttgttagtctaaaaatggttcaaattaccattttactgaagcagtgatgacttttagttcatttccgtgttcttaaacaaaataccaagaatttttaataagaaaaagctatggtgcatcaaagttgcaaaaaaaaagcttatggtcgtgtgaaccgcaatagagtcaacttttttgccatttttatacgtccgatttatttaccgaaattgagaggtttttcttcataaaatttcatttgatcactaatttgaattatgctcggtcggtcattcttaatattaattcatttcttctgcggctgatcactgtttttgttggtttgtccatcactcattttgtcagcagacgacgcccctttttcgctgctttgtccggattcttctgcgaatggtggaggagacaatggccttaattaagcgcaatttgaattatttaaacacttttttaaattgctcacccaatgcaattggcgcaattaaaaagcttaatgatcacaatgtcccaattattgtccaaattttcatctttctgctgcttctcctctttctccccaatttgtccattcgtttaccaattcaaacggcaccattggcattgacggcacacgaacagaaaaatgaatttcgtaactgacggaagaaatggcattggcacgaagaaaatgctaaacaatttggaaacaaaagcactgatttgtcgaaagtatggccacacctccttgaaattgttgacccaatcagtgttcccttgttcgttgtgatcttcgcaacgcaatcgcttgggttgactattttttctcggaatgtgcaaccatttgtacagaatttggccagcagaaatcgttgcatttggcccattaaaatcatcatcaattgcctcgggcaacagaccatatgaattgattgaattcaattggttgagatcagtgagaattgtcggcgaagtgagacgacgcaaatggtccaaatgatcaccaccggtaaagcccaaacagcgaatgtttgtcgaaaaaatgggccaaatttcacgaacaaaaatgtcccaaatccgctggccatccgtgttgtgtggtgatggaatccacaaatataaattgatgcctcttttgtcaaaaatttggtgatttgaacgaagaaaagcgatgacggagtgatcgatgtacctaaaaatgggatgaatgcttttattgccataaatctctgagtttacttacctaatctgaaagcatttaaagcggattttgctgggcagcggacaattggacaatggaaattccacaaatttggcattcatccacacagatagtttcggttctggtccgatgtccttgctaatttcgattggtctccaaattgtcaattcgcttttgccatcgaaatgtttgtccaccaacgcattgaaacgtggcgaaagaagtgccaatttgaggccgagttgggcatggtcaatcgatgggaaaatgtccatccgaacgtcgttgcaaatccaaaatgggtgccggattcgctgcaaacaaagtgctggacacattaaggctgctaaatttcccgacacgaggaccaagactgagaatcccgagcagaattactggacattgcaatgttaaattcatttcaaaaaatttttattttcgaatatacttttaattaaccacaacttttaaaaaaccaggtatatttaggctgcggtaggctgcgaagtaaaagaatttttactttttttctaaattagttattgattttaaaaaatttgagtccaaaaatatttgagacggaaccggccctcatcaacaattacactggccgaccgcgttatttatgttttccaattaataaaatttgcaattttttgggttttttggaattttttttgccgaaattttctgacactgaattgtcggtttttcaacgtacactgaatcgtcgtcactgaatcgtcttaacactgaatcgtcggcactgaatcgtcagcactgaatcgtcgtgtctgaatcgatatgcaccc

SEQ ID NO: 5733 - DNA, 2878 bp, Heterodera glycines
aaaaatgggccaaatttcacgaccaaaaatgtcccaaatccgctggccttccgtggtgtgtgatgattgaatccgcaattgtaaattggtgcctcttttgtcgaaaatttggtgattggaacgaagaaaagcgatgacggagtgatcgaagtaactgaaaaaggaaaagaatgcttttattgcaatagcttttgatttttaattacttaatctgaaggctcttaaaacggattttgctgggcaacggacggtcgtcgggcaatggaaatggcacatatttgtcatccatccgcacagatagtttcggttttgttccaatgcgcttgctaatttcgattggtctccaaattgtcaattcgcttttgccatcgaaatgtttgtccaccaacgcatcaaaacgtggcgaaagaagtgccaatttgaggccgagttgggcatggtcaaaagtggggaaaatgtccatccaaacgtcgttgcaaatccaactgaaatgggaaacaattaggctaaataagtgaggaattgtggctttaaaaaaatgccttaccgtcggttcattttttggcagaaataagcacaatttggccaaattctgaatgatgtcacacaatatatagcagaagaattaatgcgttggataaagcctggatttttaggattttcctatttttttacggatagtacttgatgagaaaaacacgagaatcgcattttttatcaaaacaattttcaaatctgttcgccttaaattgttgccaatgggctcgagggtagagaaaggctcaacatcatttttaaaatttcgataatttttgaaattttaaagcaatttttttcaaatgacttttggcgcaaaaataaaatggggagagagatagcagaactcatttttgcgttatcgctctacataaaattataagccacttaaataaattttaaaaatttgcgttggtatttgttttgatggcctaatgtttgttgattttattaaatatcaacatttagccgcgaaaaatctaattttgattttgaatgaaaatccattaaacaaaagaaaaaataagcacattcaaagagtaaatagcatcaaatcaagtccagcagaggtaatcaaatggtcggtcctttcttcttttctcatcaattgccataggttcacaaattggcgcctttttcgttgttttggtcggcgggcggagacaatggcctaaaatttgaattcgaagaataccgtattttctctaattaaggccctgtctccaattaggctacatgacatttcgcctactaagccaaaaacattcatttcgcctactaacccaaaatcggtcatttcgcctactgtcatttcgcctactattcatttcgcctactgacatttcgcatactttcatttcgcctacaagccaaaaacattcatttcgcctactaattagtaggcaaaatgaatgtttttggcttgtaggcaaaatgaatgtttttggcttgtaggcgaaatgaatgtttttgcttggtaggcgaaatgaatgtttttggcttagtaggcgaaatgaatgttttttggttagtaggcgaaatgtcagtaggcgaaatgtcggtaggcgagatgtcgagtaggcgaaatgtccgtacaccctccaattatgtccccctttctgaggatgttgaaaaataatcccccgtctctttttatccccccgggggataaatggaattattatttttttttaatcttatttttaataaaaattaattttaattaattctaaattgaaattcatttaaatgtttaataaacatgaaaaaataatacagaaaaatcacttactttactcaaatccgaacctaacccaccccggtgctatgtcgttattagagctcggtattttgaaaaaagcctggacctggattccatgttcgacctggacctggatttcctggacaaaaatccaggaaaatacaggtccaggaaaatccaggcctccggagaatccgattctgacatccattttgaagtgtatgatatttatttgccctaatttatttttctgcagtgttttataatgtttggttggatttttctcaattctatccgtgccagtaaccactgccataaaattcgattttttgttccaatcaagatttgggggtcgaattgcgtagaaatagttatcagaatctgattttccgaccctaaaaacccctaaatgagtctttccgagaaaaaaatttttgaattttttttttcaaaaagggagggcgcatacaaaagaacccgacgacgacgattgctgctgattttcaacggcggacaaaagtttttgctttttctcggaaggcggtgccattaaaattgattacaactcaaaaaataaaaccaattaaaacaaattagtgagaaatataagagagttcgcggtaacggtaatactgccgatggccccccccccgccctttgtaagaaatttttctgttttaaaaagtcgtaaaacaggtttatgggggttttcaggatcgctgatcatgaacctggcattcattttgttgatccattttgaatcctggacctgaattgctacaaaaagtcgaaaattccaattttcaatagtgacaaaccattgcaaaacaaaaatggtcattcagtatagatatgaaaaaagaattttgaaaatttggtatttccgggtttcaaaattgctgtccaccatcccagaaatgagctccaataccaaaaaagatttaaatacctgtctcagtggtctgtgagaaagtcaccaaaatgggggtcccaggttcgattcccggtgcatgctatagctgtattttgatgattttaatgaataaataaaaggaaaaatgaccaaaatgattttaaaat

SEQ ID NO: 5734 - DNA, 3713 bp, Heterodera glycines
gaaatgatttgtccggtcgacaattcgggctgtttcacggatttggtgcccgacttcaaagggctcttcgtgaaggatgccgacaaacaaatcatcaaaatgctcaaggagaagggacttctggtcaagcaggagcagcacaagcacagctaccccttctgctacaggtcgcagactccgctcatttaccgtgccgtcccctcttggttcatccgcgtcgagtcgcttgttgaccgactaatgaccaacaatgaagaaacctactggtctttacttgaaaaacgactcctttcaacccaataacatttttagggttccttccttcgtcagagacaaacgttttgccaagtaaaggatttttggcttcatttttgcgctaatactcaaattcaagttggttgcgtgatgcgagggattggtgcgtgagcagaaatcgcttctggggcacaccgattaacctttgggtgagcgacgacttccaagaaatggagtgtccaggatcaatcgacgaattggagcgattgacaggcacaaaagtcactgatcttcaccgagagaagtataattttggaatgtcaacgtagttattctttgctattattttaattgggttatatttcagcattgaccatcttcaaatcccctcaaaaacgggccacggaatgctcaaacgtgtcactgaagtcttcgactgttggtttgaggtgctttgggtttgatttttcctctgcattttcgcttcccttttagtcgggttccatgccttatgcccaacaacattatccatttgaaaactcagaagtttttgagcacaatttccccgctgattttattgcggaaggttaacttttgtaaattctctttcatctttgatttttctggcatttcctttaggcattgaccaaacccgtggatggttttacactttgttggtcatttccaccgctctgttcgaccgtcctccattcaaaaatttggtctgcaatgggctcgttttagcttcggacggaagcaaaatgtcaaaaagcaaaaagaatttcccaaatccgttggatgttgtcagaaagtacggagcggatgccttacgtttgtatttgatcaattcgccggttgtccgtggggagaatttgcgcttccaagaggaaggagttgccgaggtcagcaagcaggtgctgaacccgtggttcaacgcctacaaattcctcagcactgcgatgagcatctatgaaagtgttcgtttgacccaacaaataaatatacattcatttgtcattcattcttttacagaatgacaaacaatttgagctgcgaagcgccggtttttccaatgtgatggacctgtggattttgtcgtttactaacagtttgatcgcttttgtgcgcaaggagatgaagtaattatcaatcagtaaacgggatgaggactaattcatacatgtacaaggggtgtctcagcccagggccatacgacggacgattgggacagaaggggggggggtgtctcgggaccgattttttatacgaaggtccaatttttttctggcgacctttttttgttgctattcagccacacttttttgcggcgtgttttacaaatggggaaggagtgacgggcgttccggcggtgccgataggcgtcgccgggaaaatttttttgtaattttgtatggatttcgctaaggaaattgttcaaattttcccccttcgttaaccacctccctccacgagagaccccctccctcttttacagccgccccacttacgacgaacgagaggggggggggggggcggggtgtcgagacctccttgtacatatatggactaattgccaacgaattaggggaattggttttttgggcatcaatacttcggctttttgaatcaaaatgtgtcgaattttgactccaatccttttccgttccctgttgtcgtttccttcgtttaaaagtgcaaatgcttcctcatcagactgtaccatctctatgctgtggtcactccgctggtcagctatttcgagactctcaccaacacttacattcgcttgaaccgttcgcgcatcaaagggactgtcgccggtgcgtcggccgatgaccaaatgttggccctctccaccctttcgcatgtgctgttgcaaatcactcgactgatggctccgttcactcctttcttctccgagttcatgtggcaaaggctaaaaccgttggtttgtgcgggggggggggcaaaacagaaaagtcaagtccctactttctaatatttgtaaagattggcgatgctgcggaaaagtcggtgcactttacgatgttacccttggcagaagctcagttcatcgacaaagtcgtggagcgtcgggtggcagcgatgcgaattgtggtcgaaattgtcagaacgttgcgggaacggaaaggaatatctgtgaaggtgccatccaaaattgccatttcattaatttttatttcggcatttttagtacccactgaaagaaatggttgtcataaacaggtcggtatttttcgcaaataaatatcaaattgacaatccaataattttttcaggaatcagcagttccttgacgacctcagctcgctgagggaatacattctgtccgaatgtaatgttgaggaaatgaccgtttcccaggacaaacaaaagtacggtgttcagctgaaggcggagcccaactttaaagttttgggagcgaaattgaaaaccaatttgaaagcagtaacaaattatttaaaagtgatgttttctttcgattaaatgtgttccagttcaatgcctactctctctctctgtcattcagaatcaagtaactgaagttgaactcgaagcactgttggccgacgggtcgctgactgtgctgggacacgaattgacaacggaggaagtgaccgtttcgttcactgttaacccgggcaacgcgacgaaatccaatgacaaatgggaaacggcgaccgcaaattcagtgagtcattcgctcacttttgatggtttctttccattggttggtttttgcagtgcgttgtgatggtcaacacaactgaggacgactctttgctttcgcgtggatttgcccgagagattataaaccgagtccaaaagctacggaaacaggtgcttacagtgggacaattacagttttctaagattatttttgtgatggcagggcaaattggtcgagactgacaaggccgttgcatattgtactgtaatgccagaggattcaccgcttggcttggcactcaaagaacatcgcgagaacatccaacaggcaactggcactccgttgttcatgaacgaaacccccaatggggacacttttctggcggaaagctgtgacaaaatcaaaaatttcgatttccaggtagcattgacattacgccattagaaattttaaatgtatgtttatgtagctgaggttgctaagactgaacgattgaagaaatgcactgaagaatttcattatacattaaatacataggtatatgtatgttgtgtaagaatttttggctttcgttgttacaaatgcactcaattgctttatattctattgtttttatttttgttgagattgtttgattagtgtataccagggttgttgtgaatcgaagaataaaatgcgaaatacgaaacgggtacttttcaatttttggcctacatctctatatttaagccagattaaattatttaggtttttcctgggatgaaaa

SEQ ID NO: 5735 - DNA, 2554 bp, Heterodera glycines
  unsure (1)..(2554): unsure at all n locations
taagatttgtgatcagcacattttaagagggatggtcaatgactgaatacatacactgtactagagccaataccgatcaaaagtggcaacatgnagacgaagttcttgttcgaatccaatcacaaaaaaacaattaacaaggggaatcatttgaccatcaaacattttgtcagcttttatcttctcccccccccccattttttcattggttttccctttcgtttttctgttgtgtctctctcgtctttcttttctgctcttccttcgcctgtctcttcatttccttttccttctgcagttgtatcttccgttgctctttttctctctgcgctgcctctttctgttctctctctttaattagtgtctctctgtccaccaatttaacacaagtgtctttgctgtggtcctccaaccgaacgcccaattccgggaggatttcgtcgcgcagtctgtcacactcctggaaaatggagcaaacttagtttgaaatattaactggtttaaatgtactttcaaaattccaatgtttttctgtgcccgagcctcgcttctgacgacctctcgaaactgtgcaagtatttccaagtacggcatgataatcgcttctctgtcgtcagaagttgcgcagctaaaatgagaatttttttgattccatggcttaataatcattgcgccattcttaaatttttaaaagtaaaaacaaaaagttattaatttggtatggtcgttgcagaatatcgagcttactcaagtaatattttaccagtctttagtaaagaattcgtatttgcccacgtccggctgtacgccaaatatgcaaagcaattctctgacgaaattggcacattttgtcagcagttggcaattaagtacggcttcctcctgtttccggaccataatgtaagtgttcagaagggaaatgatcgtcctgattttgtcaagaactgcgcgtgtgtcgatggagtcgcacatggccaaatgcacggacactttgatcgcgttgaatttgttcagcacttccatctcctcttcaccgtattttttgaagcacttgaaatttttaaatttttcgttatcatttaaaattatttttacctgggacaattcatccacttctttaatttgctttcttataatatccttcacattgaggaagaattcgcagaaacatttttcgaaatgaatggcatgttccatcgtcgattcgctgaacattttgacaataattattttttaggattgcaatttcatttttgccataattgtctaattccgtattttcctccatttccttggtccacctgtagtccaaattgtccgtccaattgtgcatcaggaaaaggaggcgcagttgtcgagcagtgtatttgttcaacgcctcccttatcgtcacaaagttcttcaaactcttcgacatttttagcccttcgattcgtaatgtgccgcaatggaggaaaaagttaacccaatgatcgttgtcattgtacgcctcacacttaaaggaaaaaatattcaaaacggaattttccatcaacagttagagtactcacttgagcaatttcgttgtcatggtggggaaatttgagatcaaatccgccggcgtgaatgtccaatttgtccccgcaaatggccccactcattgccgaacattcgatgtgccaaccgggccgacctgaacagaaaacaaattggaaaacaggtgatgtggaataaatgacacacctttgccccagggactttcccagaagggctctccgtctttggaggctttccaaagcgcaaaatccgacggcgagcgcttttcctacaaaaactgcaataaattcgacaattaattaattggggaaaaaggggtgcagttgttgcgcactttcaaattgtccactgccacgctgagttcgccttccccctctcgcaaatgtttttccgcactttctgcatcagcatacgcctcggggaggagttttgcataggaatggttgggttttgatgcgaattgggcagtgttaaaatacacctaaaaggaataaaattgggtaaaaagaaaggctaaagaaacatttataaaaggatcactgtagagatcaaatgcattcaaaaaaaacttactgatccatcagacacataagcgtatccgttgcggatgatttgctgcacataatcaatgatttcgggaatgtactcgctgaccctggtcaacacgtccggctcaagaacatttaacgcattcatatcgcacaaaaattcattttcataccttaaaaaacatgactcaaataaaggcatattcggatttccttactttctggccaatttcgcgaaaatgtcgtgtttagtgaccgtatttccccgggtaacgtccaaccaatcggagagcacttctttcgcactttccaccaatttgcgcaccaaaacagtgcgaacatcagctgattgcccattgtctggctgngaaatacgcgttttgaattgaacgagatcagtctcgaatttggcaatctgaaaatttnnacgatagaaattggaacaatcaaataaaggcaaggcacagact

SEQ ID NO: 5736 - DNA, 2548 bp, Heterodera glycines
ctgattccctgaaatgggttcaaatgtttctttgtcgcgcgtaaaactattcatcagccgtaaacggggcttttcctcattgttttgctttttgtaggccgtccatttgcaaggcattgcactaacggagcaaatttgagtaaaattaaaaagaaccagtcgctgaaaaacggaatgtgtatggaggaatagaacgaataatttgcataaactaaaaaaaggagaaaaggtatgtatttcggtggattaaatggttgaggaaaattaaaaagaattaaaaatacaacgcatttgcctatagaaaagtaaactataaataagttacaaagaaaaagtgcagaaaatagaaacaaaatccatctttttaaatggccaaataaatgaaagtgaaatcggtaacggacaggcgaaagcatccgatcgactcgcaattggcgcccgtttgttttgggcgcaatttccaaaatgtgtggatgatgatgcaatccgagtgagtcgctcgcccacccatccatcacccgccccacttatatgtaagccatccttatttgatatgagaagcaattccccacctgacgaatgagttgaggaattccaattacgaatgttagataaaattcgatttgcaaaatctatgtacataaatgttttgtccatggacaaggaaaggtttgagatttttagatttggaaaatttacactgcgttgtcaaagtgaaatgtttgcttacaatatgtttcctaccattgttgcatttaattattaattaggaatatcattagttcgcctaattggcttttgcgccccaccaacttccctccctccctcgcttcgcttcttcattcatctatcaacgtgcattcccatttattgttaaatgacatatgtaggtattatttattgttgattcatttgttcgttccctttttctgccaatttccaaaacgactcgcgatgtgtgcgtttttcgtttttctctattcgttccaattgttggattgaattttagggagtgagcgaaagagggacgataagaaagggtagtcaatgaacgaataataaatacaacaccaaaactatcgttgacgttccttcccttttcttcatctcgaagaagtgttttctcgaggcgtttaaactgtgttttacttcaatccttcaaaactcaaaagttcgattaaattcaattttgaaagaagcaaaagaggaaagagacggagagaaaagcggcgggcgaatgcaccggcggaatgagtgaatgcatctgccgtccgtctgccgtccgtctgccgatcagacgatgggcactcactcactttccctcccagcttttcctctttcaactcgccgttcatcaattcactatcttttttctctttcaaacgaagggggaaggggaaggacagctgttatttccacaattttttccattaccaaattttgatcgttactttgtccctttcccttgtctcgtgattcattacaatgaatttgactgacattcataccatcacatttcaatcaatattaaactttgccaaattcaattggctttaacccctttccctcaggctttacacaattttattcttgtattttgtcgatttatggatttgacctcagattctattaccaacattgacattgatcaaatgctgaaacaaatcaaagcgatggttcgttcgctcgtgttcattttggttcaattattgcttaatttttaggttttcaaattggctgagaatggtgattcggaaagattgcacactttgctaaatacattaaacacggaacaattgaaacatttgctgaacgtgaaagaaccgcgagagaatggcagaaatatgcttataattgcggcacgaaacggccatataaaagtggtcgaacttttagtgagtgaattcaattaaaataaattcggaaatgccgttttaagttgaaattgggggctgacccgcatgagactggcacagtgaccttcgacggtgaacagataagtcagtgcactttaatgaatatatttgggtgctgggctaaaaaggcagttttttttatgactggtatgccattttatataaccaaattcagctcgagttcctccgctttgggccgcggcggctgcgggacatttggaagtgtgcaaacagttggtcgccaggggagtgaatgtcaaccaaacgacgagtaccaacagtacgccattgcggggcgcatgttatgacggaaatttggacattggtaattgaaaaaatggacgacattattattcattactttatttgtgaatttaaaagggcactttcacatatttggtttagtcaaattcctcgttgagagcggcgcggacatcgaaattccgaatcggcacggacacactgcgctgatgatagcatcgtaccgagaaaaagtggaagttgtgcgctatttactttcggttggggcacaaacggacagaacatcgaccaaaggttttttttgttttgttttgttgtttatgtaaaatttgaaaattgtaattattattatttaatactaattccatttc

SEQ ID NO: 5737 - DNA, 1287 bp, Heterodera glycines
  unsure (1)..(1287): unsure at all n locations
acaatttttaattaattatattttcattattttttatcttttaagaattgaggccaaagaatcgcagttttttgttgacgtttaatgaaaaaaggcgtctcaatttcgccattttcatttgaattggtgcgttttcgtctgactttgagtcgccgagacgcaaccggaaattaaaaaagaaataaattaattgcaaaattaatcatataaaacgtactttttgcgttttttcagcgtgaaataaatcctccaagagttccttcggtgttctgttcacaacgctttgtaaaagttcacagagtgccatttttaatgcgtttggctaattttaaaaattatttaacgtaaatatttttctacaaatgatgatcagaatggcaacctgttcagcaaaagactcagtggaaatgctgaaggaacggcacgctttttgtgcaatttgccgaaggttggcgaggccaaagtgttggcactccgaagcaattatttgggcaaacgcgcgccatgccaacaatcgaatagagggctgaaaaggtaaaaaaaaaaagcaattaacgaagacaaataatgaatcatttaaattgaattgcctttttggcagccaaccaatcgttggttgccgccaaacaatcactgaaggcggaaggcgtaacggagcagaacaaacggcggagagacaaagcgacgaagtggcgacaacgaacgctgtcatcgttgagcagacggaggcacagcttcagatggaccaacagagcgtagcgagcattggcctcctcaaatgggggataaataaataaagggaaaagcaaagcagtgacaagcgaaagctcaacggggacggacgcacctcggtgaactcgctgatgatcgagtggaccatctccagcgcggacagtcgcccttcctccaattcgtattcgcattggttgaggaaaaattccatccatcgttcgtatttacgctgaccccgcggatggacggtgaggtaaagaagaagagactggcgaatggaaattacaaattgggaacaaaacaaacgtaggacagagaaaaaacacctggcgacactgactacgaatgtttgcggagagcgaagtgatggccaattcggacagataagtgacaattccggtcagctaaaccaatgtttgggtgttcatagtgacaaatgccatttttcattcactgacacttttgtcgtcgattttccgcccaatgattgccttgagncaactgaacgccgttgtctgtttgtgcacgtccaaaatgtccgtctccacgtaattg

SEQ ID NO: 5738 - DNA, 4102 bp, Heterodera glycines
taaaaaagagcgaattattcactaatctcgatgccatactaataatacagatcgatgcaaaaccccgagataagaattaaattaaatttcttttattttttttttgcatttagcgatgaaagaggaaaattccacatgtacggggggggggtcaatttttaaataatcatttttaattttgccaacttcttccaaatgccggtactgagtagaacaaattggatggtcaattgcgcagcaacagcaaaagccaaacagaagcggtaaaataaatatgctaaggccaattaaaatggaggaggaaaacaaaactccgctgggtgacggagataaatgcgaagacttaaattagagaatgttaactgccataaaagaacatatttaccagtttagttgagacaactgtcgtcgttctaataatcgatggcattggcacagcggaaattgtgacaggaggagacgatggtggcggaaaagcaaaaactgctgacttaattagtcaggggcttaagttagtggttggagcgaaaaacattttttttaaatttgatcagttttccgaattaaattcacgtttaaagttttatacgggcagccggacaagtgatttctattttttctaatttaccgggtgcattacgtttgcgcgggagcaggacaaaacgtcgccgccgaaacgtcgctgggacataacgtcgccgcaaattttttttctaattttagaaaaaatctaaaaaattgtcatacatttagttagctagcttaatacgaaaaaaattctagaaaaatttaaaaaaaaatttctatcaagaaaattcaagtttcaagttttttgggttttttccggaaatccagcaaatttagttttattaacacttagattttcaaaaagctaaaatacttttaagttttcttgaaatctagaaaatttttaatttttttttgcggcgacgttttgtccggcgacgttttggggtgtaccccctgcaagtacaccttgaatagttgctgctgcaattcagtcacattcgactgtttccccgcacttccaaccgacgaataatcggccaaaagcacaaaaaaacggtccaccaattccgcggttcgttcattcgatgtccaaaaaatttgtgaacatttgaacaaattgagcaatgcgcgaagactgagtgcaattatctgaacaaattgaaaaacaaatcaaaacattgttcatgcttcactttatcatatttttgtttaagcgcttcaataatcaaaggaacgaattgctccaaaagtgacacaatttgttgtctgtcctccgatttttctgacacagatttggctgaaaataaaaaattcacaatcaaattaattaaaatcctcactattttttgtgttttcctcctcagttttgtgctcgtcttcactttcttccccaccatcaccgagtttttcactcttttcgatcaaatggtggcgaataattgcgatttggtcaatcaaaatttgaagggcaaattcgacgaaaatgtgcactttgcttttgagggccacccgttggattacgcccaaccgttttggttcgggtgccaacagcaagcaattgacaggacgacggccaagcgaagagccaccgccaaagttactactagtaaaaagaaacgcaaaatcaaatttgctgaagttgattcaaatttgatagtattgtatccaccttatgcgactgtcgtccgatttcattagacggagattctcgtcaaacagtcgaaatgcccagcggagctgttcccgaacggaaatgaccgaatttgtgcgcagtccgacgcccaaagctcgcagccaatcggccaatttgcgcatcgtttccgaacgtgaactcgcattggcaatgtcacgaatcgcagcaaagacgcaatgctccaaagggtccactttggctacaaaacggccaaccatcgacagtgtgtgccccgtctttttgccgttcgcccgcgcctccggcactccgtacgaatccgaacggcggtccatttcggaggcggcaattccatcctgccattcgttcgttatttgataaattgcatttaacaataagtaatttatgcctttgcgctgtttgctttggcgtgccctccaaatgtttcccatcgacaaacgtccaccacttccttcaaaattggctcaatgtctccgttggttaaatggccctccatcgccccaatcaaagcgtgcactgttacggccatcacatgcatttggtagcccttattcagcgactgtttcacttctcggaccacaaacggaagtttggctggtcccaacaaacggaccatttgctccaacaattttcgcgcattttggcgagtgtttggcgatctgtcgccgcaaaatttattaaggatgagataaacagaaggggagcacctggacatgagcaagtggtccaggaacaacacaagcccatgtaaatgatggcccgacatttcaggtggaagccattcgagcagtttaacgatggacagagtgagcggagcacgcaacagtttctgttcttcctcgtcccagtggttctgtaaaaattgtatgaattatagccacttgtgaacatttccaacccccggcttattgacgccgttccaacggtgcaaacactcgcgcagacgcggcaaaagccttccccgaacgacttccaatatccgccgcttctcctcctcctttttgtctcttgccatgtcctccgtttccttttgtgcgtccactggtgtttctgacccttctccaaattcgttaccctcgtcttcctctgttttcccttcttttttttcgtcacagtttcccttttcattcgaatgcgttccctttatttttaggtgccgcaaatcgaagtgaaaagcattcaaaacagcgccgatcactcggatggcaccttttgtgctctcttcaccagcggtgtccaataggcgcaagaaatattccaacatttgacaatattttggccaaggggtgcggcggaggattgaggagaaaagatgcagggcctggtcagagagtgccgaccgattggacgccgtgtccatcagatagggctcaacgatcggaacgatgaaacgaacgagcgaagaatggccaattgagagctgaaaatgggagatttatgcaaatttaaatgtggaaagagaacctctttgttgttcaaacgttcagcaagcttatgaaaagctcgttgacgacggtggagttggatatgcgtcgcgcattcgaagaaatcgacgtcaggatcaatttcaaagtcgacggacgccgaagcagttgtcgatgttggtgttgtgtcggttaaatgccgaagagcagcaaattgcggttcattggggaaacagtggacgagaaaggcgaaacattggataaattcgtgtcgagccgactgaaaaaataaagtgaccgtttttacttacttaataaatgaatataataatttcacttcatcatcgacggaagtgcgcaagccgcgcaaaatcaacggaatgaaatgggcacggagcatttggacagcgtccaaattggagtcattggccgtcgttgagacaaagtgaatcagctgccggaaagtgttggcggccgtcccccggagggaaatgtccgacttctgtcgtaatggaatgccattcctttgcaacaaatttattttccgtacctgtaacatcgaatgaacgtgcgaatgtgccaacaacggaagagtgcgagcggcgccgtcatccaacaaaatgtgccggtcccgatgttcgtaccaatcgtgaagacgtaccagggccttaaacaattggtatcaaattcaaaaagcactcgcccacttcgcatcgtctgtccgcgtccggttcttcaattcgacgcgtatcccaactttccaatgcttccaaaagctaaataatggtcaaataatgggactttattgcaagtccacacatcaattaaattcctagcagccaatggaaagtgccggtttttcccgacagaaagtgccatttgagtaagcgcccatcggagctgacgaccctccaaatgagagaagagagaagcaaaacagctgaaagaaaacatggtaaagttcagaaaagcgagg

SEQ ID NO: 5739 - DNA, 2000 bp, Heterodera glycines
  unsure (1)..(2000): unsure at all n locations
acagaaccaaacgagcgccaaatgatgggggaatgccatcagtctcatcacaatcgggcattgttaaaggagtttgagggagagcatcgaacagattagaagaacaacaaagagaaccgacttcttccatggcattgttctgaaaaaggtgaaagtcgaatattcatgacaaatgaacgaaagtgacaaactgattccgagtcaagcattgaacagaacatacgcaaaatgtccattttgattgtgtttttatttttggacaattgatcacagagaaatgccatcggagaggcgacgaccgaacgacgaacggaaggagcaaattcaatggacaaaggcacatttagcaaagggaaatatctaaaaaaagtttaatgccacaaaacgaggcaaagcataaccttttaatttgtgcaaaagtgcaaaagagtcgcacgacagaaacaggcaaagacaaacattcgccagaagacaaagctaaaggaacattggaataacgataaaaagttgaacaaatcaaaggaatttcaaccttttccactgttgtgatcacggatcaaaggaccgatgaactgttggaacaaagtgagaaaagaaaagacgggcaaattgggacgggactgaaaagcgcggaagaactgaaaagagaaagtgccaaagaaacgcggaaaagaaaaggtacaccttaatgagcgtgagaaagagcaatttacgcaaactcttcagaaagcgttcgtccgacggtgtcacgtcatcgctattcaattgaatcttaaaccaaaaaaaaagtggaaaaagaccaattaagcaattggctaacaataactaagtgtgctaagttttcacctggaaaacttttacttttttaaaattttcgggggggggctaactgcttctggctgaattacctgctccttccgctgaggataaagtgaagaacggagaagcaaaatgcgtgcgatgagcacaatggaagcaaagagaaggtccaattgggcatcggaaaggaaagggccgaggaaacgaaaaacatcggaaagaaagccgagggaactgaacggaaaacaaaacgataatttatacattttttaagggaaaggtcggatgaacagaagaacgaacctcttgagtttgttaagagatatggactgaacgatgtccgttttggagtccaatgaatgcaacgcattcccaagactggaaactgcgtcattctcatcaatttctaaaatgaaattgcgtaattatttgaaggcactttaaaaacaccaaaaaaggtgaaaattgggccgaagagaagacggaggaaaatactgagttcgttcgaattgcaattggccaaaaaacggaaaatggcgattcgttttgccttgccacggctggcgacatgggtgtggagagagccgtaaaggagcctagaaaggacagttcagcaagtggttttagtggtccacacacctcaacaagacggggataagctcagcacggtgctgatccgtcaatgaatgctcgtccaatttgttgttgtgacttcggttgtccacaccaaaaaggaccaaatgatctctgagctgccgggggtccaacaacgcttcgagatgagttctgtccaacgcaacaaatagaaatcccctgtcctaatgtcttttttaaaatttaattaccggtatggacacagccaattgtatttgtatgtaaataaacagccgagcgccgcctgctgaatctccgcctcgttgacaagaagaagctgattgtgagaaagtttatacggttcgaatgccaaccatttctaaaagagcactgacttcgtagtaaatgtcgagcacttccctttctctgaaaacacctttcgggttggaaaagcgtccgtaaacggctaaaaatgctttgattgcttggacnngcgttcgacgcccgattcgaaaaccgcaaggtttcactgcgatgngactgactgggctaaaccaaaataaggaggaaaatgaaataaaaaggaa

SEQ ID NO: 5740 - DNA, 5057 bp, Heterodera glycines
ttcactgatgaatccggggatttctcccttctcaataaattgataaaggccgtagcctcctgatccgctttttctccaagcgaagatcaactgagtatgagttgccatcagcagctctgagtgtgagagagtcgacacattcatccacgactagtcgcgagtccaatgttagcgaaagacaggctgggaattcggcgatgtcctcaagttctctgatatttttgatctcctcctcagaacggcactcatgtgcagcacgtgacagtgcatcagcaaacatgttttgtttcacagcgacgtgcacaattttgatgctgtaattctgaagctcaattagccaccgggcaagattgggatgggcctcagccttctgcaacaaataagccaatggcttatggtcagtgtgcaactctacattccccatgtaaatgaacggtcaaattgtcttagcgcaaaaattattgcgcctaattcgacctggactggtggccacttacgctctgcttcagacaaagtgcgactgcagtaggccacggcgtgaaatgcactgctgtcctgctctttctgcatcagagctccgccttgtccaactgttgaagcatctgtgaagatgtggaatggtttggaatagtccggaaatcggagaatcggatcttcagacaagagcttcttgatttggttgaacgcctcgtgttgttcgacgtcccacgaaaagggcatgtctttcttggtcagctttgtgagtggctcagtaattgttgagaatcccggtatgtgcttcctgaaaaacgacgccattccaacaaatctgcggacttctttcaacgaggtcggcgctggaatatctttgatgatctccacttttcccaagctgggcgtgtatccgtctttattgataataaagcccaaaaattccattttgatgaagccattacacattttttggacttacctttaaattgaattgccgtagccgagtgaaaactttccttagtgccaataaatgcaaatgaaatcaggcgatttggagtaaatcaagaaatcgtcgacataggctataacagagtcttccagtcctgaaaaaacatgatccatgactctggcgaaggcactggtggcgttgcgaagtccgaaaggcatgtgcgtcatttggtagacatcgtcttcagtgatgatgccgcattttctgctggctcgttcggtcagtcttatctgaagatatcctgaggacaagtctaaagaggtgtaccaatggcaattgccaattttctcgagaacgacttctagtctcggcagtggaaagtgatcaggcactgtaatctcattcagttttctgaaatctatgcatggccgcagccctccgtccttcttctgtaccaaaacaatgtttgaaatccacggagtgtcagaattgaccattactccagctttaatccatttctgcatgtgatctctgacctcttctctgaaacgaaatggcgtactgcgcggcttggcagttatcggatcctccgtggttgttatgatgtcatgttctcccacaaggcatgagcctaaatcgtattgggattttgagaagacatcagcaaattcagcgcaaagctttttcaacttgttgaggttttcacccgttgcagaggatttggcgaagttgattttgaatgacgggtcatttgtagtaatttctggattgacattggcttcctttacttgcgattgttcctcaagccatggaccgtccgcgctttgtttcaattcattggcaagtgctacgtgcattccggcacaaatgttgattggtgcatcagttgggttggttaatatcatcttgatgcatccttccacgggctttgcgacagttgagatcatcccgacatgcattttggagagtcgtcctccatccagtgaatgtgttacaacttgatcaagttgaatttgtgaatcaagtttgccggtcagcatgatataggatcctggttgaatgtcaacatgatgacgtgccacaactttgacattggagtacagcaagtcccctctttctcccatggttacagatttacctgaaatactgattagaccttgaacaaaatcaaaagtaatcggtggaagttttgccatcaagtcacatccaagaatgacttgataatcccttctgtcactcataacttcatcctgaatgagttttatttcgccaaaaattttctgacctgcaatttcgatgtgtaccattgctgctgctgttatgttgatccaatgtccggaggctgacctaacggtgtgatttgtcggaaaattttgcatttcaattcattggcaagactcatcggcgcaagagaaacacttgctccggtatcagccagacagtttactggtctgttgttgatcagggaacggactgtcgctgttaagcgaggcgtcactgtatgattcgcaacaatttcttccataatggaatgattagatgaggccgtagcccaaaaactcctgctctttgagagcacactcatatggcatgcatgaatccagccattgcaccaagagagaccacgattccaatcagttcgaacaaatctgaaattgtgagaaagatacctgttccggctttcaagtcagattgggatgctttctctgcgttcagtggtacaacaagcaaagagatcatcagcatcataatcgccattgttgtgctcgttccgacctgcatgaccgaagagggcctaagcctttttcgtggagatttgtttacaacattggttgtcattgatgctgctgtggggtcggaagatgaaaatatggtctgaaaacttgacactgaaggtggccagttcattgggttccctggaatgctttgtaaagggatttcttcaacggttacgctagtatttggaaattcatcagttgtcacatctcccgtgttgcacgagcctcttgacttttttgcgccccaaatcattcggcccagccatccaggaccggtgtaagtttcaagaagtactggaagtcaccttaagagaaaatcaattaagagaactagacttacaaatgataggacgcatagccatgtcagtttgtagtctccgactacttttttctcgagttcgtctgttaattcacgccactggtcagaaactgtgactcttacttttttgtgcagttcattgattcgatacgtgagttcacttaccttgaccataccgcttagaaaggcatgtgtattcaggtcggagacgttaaacaaagccatttggtgaaatgagtgcctttcaatttccaatatccctgggagccgtggctcaatatcaaagtcttttattttgaggattttcgtttctcctgttacctgatctacctccagaggctggccttcaatttgaactacaatttttctgtgctgtgcacatgcgacttttgccgaatcaggaacgatgatcatcgtaaatgggtcaaggaaagctagtctgttctcggattgtgtgacaaattcgattggcaatttgtcaaagcatttgttatccaatcgggttggtttgaaacggaactcacctttcttcaattggacgcaaggccaaattttgagaagagatgatccagctctgactgcatagactttggtgttgttgaacaacgaacgcgcaagagaagttggatcaataagatgagtgttggtcagcattttcgtcatcaccgagaagaaatcgcactgcgttttgaaggaatgtcggagtgcatacatgagcgagtcgacccattcatcatccaaataagttagtttggcattcatttccggtgaagttgccaatccaagatgttcgactgagccgtagctcctttttgtgcgctttcgttttctcacaattatcctcgtggcaaatccttgctctgaaacagtaagtgttttgttacagtcacttacctttggagtttttgtcttgaaatgaagaccatattgcgcgtcgtccgacagccatgtgttgctacgtatctgcctttgaacttcccgattgaagtatatctgcaattcagctgcttttcaggtgtccagactaaaatcgatttatcattaagagtgcaattaccgaacaaatatcggcaatgtgaagttgttccaagtggggttctaatggtttcttcaccaaaatgatggaatacctgagttttaaaagcaaagcaatcctcactttcagtgtccgaccacgaaaatgatccaagaagccaaagccgtggagtcaagtcgagtgtatggtcggtcccccaaagtccatcacgttcggtcaagatgccgaagtcacacgttttgtgttccaccatgcgtttgcattcatcgacggacatttcgagcaattcgggatcgagcggttcaacgacgggcacaccggaaagagttgtgaacttccttgccttcttttttatttttcggcaagcccatgcttgcgtgttgtgttcgaagtcattgatgacgaacagttcccttgtttgaatgagtggcacatgtgtggccacttctgcgggtagtgggcactgaacctgtttaggaaggccccaaattgttggctgaatgtcggtttggcagattaatggaagagaaggaggcgcagctttggcgccattcaaatcaagaattatgacaatcagaaatacaatgaacggaagcagaggtgtaattctgggcatcattcggaccccttcccatggtgagcttcttcctgacgctgggcaatttgcctcatattcaatttcagaattattaggaagggctgtcgcccgagatgagttttcaaccacattcacatcattgagagacttatgctggttcatgtcaagtgacagatttcgcagacccgacgcaatttcgttaagcagttcgattgatctgtcatgttgaattgcgtttgctccggttgcaggagtgcgtctctgtggttgtaagcgagtattgccataggatcctcgttgttcgtcctggtaatcccgaagtcgaatacggcaggcgttggcaacatgtccaacacgtcggcaataattgcaatatgggcgattgttccatctgcgatcattag

SEQ ID NO: 5741 - DNA, 2935 bp, Heterodera glycines
tggatcaataagatgagcgctggtcacattctcgtcatcgcgagaaagaagtcgcattggttttgaaggaatgtcggagtgcatacatgagcgagtcaacccattcatcatccaaataagttagtttggcattcaattccggcgaagttgccaatccaagatgttcgactgagccgtagctccttttggtgcgctttcgcttgttcgcaattattctcgtggcgaatccttgctctgaaatagtaagtgttttgttacagtcacttacttttggagtttttgtcttgaaatgaagaccaaattatgcgtcatctgaaagccatgtgttgctgacatatctgcctttgaatttcccaattgaagtgtatttacaattcaactgcttttcgggtgtccaaaccaaaactgatttgtcatttagtgtgcaattccctgacaaatattggcagtgtgaggttgttccaagcggggttctgatggtttcttcaccaaaatgatggaatacctgaactttaaaggcaaaacaatcctcactctgggtgtcagtccacgagaatgatccaagaagccaaagccgtggagtcaagtcaagtgaatggccggtaccccaaagtccatcacgttcggttaagatgccgaagtcacacgttttgtgttccaccatgcgtttgcattcatcgacggaaatttcaagaagttcggaatcgatcggctcaacgatgggcacgccggagagagttgtgaatttccttgccttcttttttatttttcggcaaacccatgcttgagtgttgtgttcgaagtcattgatgacgaacagctccctcgtttgaatgagtggcacgtgtgatgccacttctgcgggtagtaggcagtgaacttgtttaggaaggccccaaattgtcggctgaatgtcggtttggcagatcagtggaagtgaaggagacgcagctttggcgccattcaaatcaagaattatggcaatcagaaatacaatgaacggaagaagaggtgtaattctgggcatcattcggaccccttcccatggtgagcttcttcctgacgctgggcaatttgcctcatattcaatttcagaattattaggaagggctgtcgcccgagatgaattttcaaccacattcacatcattgagagacttatgctggttcatgtcaagtgacagatttcgcagatccgacgcaatttcgttaagcagttcgattgacctatcatgttgaattgcgtttgctccggttgcaggagtgcgtctctgtggttgtgagcgagtattgccataggatcctcgttgttcgttctggtaatcccgaagtcgagtacggcaggcgttggcaacatgtccaacacgtcggcaataattgcaatatgggcgattgttccatctgcgatcattagtggggccgtggcccatgtcccgatcacggctttgtcgtcctccattccttgattcgtttctgttcgattgccttggttggtttcgccaattattttgtctcggagggtaccgattttgctgtgttggagctaatgttctaaagttacctggcggtgtcatcgaattcgattgcaaattttgattgtccattgcttgaacagacttaaatttttgaacaaatggcaggcctccagcctgcgccgagagcattatttccacttctcttgcttcccagcaaaggtgttcgaatttcttaccccttgacatgtctaacattttcatgaccaatgagatgtttggccgtagcctttcaagaaatagctcacgtaattgtgcttccttttgtgagtcatccttcacatcggacactgaagcttcagccagtggaatgaagcgattgaggaagtccttgaccggctcactgtccatttgtcgacaggcaatcagcgcttgcttcgataatcctttgctttgcggcgaatctaaatcagttcgcaaattagccaaagctaggtcaattgtggcctttcgattcggatccattttctccaaaattctttttggaacaccatccaaataaatgaccaacctgacaagcttgtccttttcatcgagttttcgaccaaatgcatccatgtattctctaaagcgttttgcccacctgtcaaatgtgaccacacagtcatccttgtagccttcaagtgccatgggatacgcattagtgatcatgttgacactttggaaggatagtgcattgcgttgctgatcatcatcctcatcatcgctactagagctttgttggctttgattaggtctctgtcctgtttggtgtcccaattgctgtacaggaggatgagcatgatgagggacaggtggttgagtgacagccgtagcttgttgaatgtttttgtttgctaaattgaggttttcgagggactttaccttaccagcaactttcgaaatctcagcggtgaaggtctgaaagcctacgttgacttcattggcaaggatgccaagatgattttgaacattgtaagacttgcggttaacttgtcggatggtgcagctgactccctcttcgagtcgtatgagttcaccaaaactttctcacgtcctcaaaacggactgtgctattttgctgtttgccttgaaacagtgtcttatttacgactttaagaatcgactcatcatcagaaaagttaggttgggctgtcgcccccgaagacaatacagaccctgaggtcgatgaaggcatttgaaggggttgggatgggtttgaaggagtagtgaattgagtttaaagttatctataaaccaaggtgtgtagtctcaataagtacacactagtgattgatgcaagcgagttagcattaagtgagggacttagtattggttagtaccagttagtgataaattcacttattttttgacagttttttttcaatttttggcacatatgttggccttttttgagctttttag

SEQ ID NO: 5742 - DNA, 1986 bp, Heterodera glycines
  unsure (1)..(1986): unsure at all n locations
ttttagcacatatttcnggtaggggtcaactccgtctggccaactccgtcctcagcaatgttcaaaaagctataacttttttctttgttggccaaacttcaccaatcatnggtatcattcgaaagccctagatgtntagaagatatttataagctatttctcagtgattaatcagttctcaaaaaagttgtcagtttaaaaccgcaaaaaaggcagaatttcaaagttttttatttctatctttttttatagttcgaaattttctgtaatttttagtaggctaatagagcctatgaagagctttcgaatgatatcaagattgtttgattcggtcaataacttcaagagttatattgactcaaagttggctcagacggagttggccagacagagttgagcccgttccgcgccttttggagcttttttggcacatataaatccgttccctggcaattacaacaaaaaatagaacaaaaaaaaacaaccttcaaacattatgcataatacttttaactcttacataagcaacaaattggaaaatgaatgaaatgccgaataatatataaatttttaagaaatttaaatttatcaaaacctaacaatgaatagccctgaaagcttaaaaatattctcagtcaatccgtgacaccttcactttttctcttgaattcagatttatatctttctaaagatctttttgtaatatttaaaatttccgcaatttggcgatcgttgagctttgggttttggtttttcaattgataatattgttttattttttccgttttttccgcaaatgtataatgcttctgccctgtaatatattaaataataaaaatttttaaatttaattaataaataacaatttgtttaaaaatttcaccctttgaaagaatttgatttaagccaattttcttgtcccatttttcaattgtctgaaaaattacaccaaacttttgtttaatttttgcattaaattctttccattcttttcgtgaatgtttctcattttgcataaattcattttttaatttaaaatatttttcaacaatttctcttttttcatcatcagttttttgctttttcaccatttttccactttttaattgtttcttccaataaaaaattgttctaatatttgtgtccaaatgttttgctattatttttttgcatttttctctttttccctccaatttttcattgaatttcatttttaattttgcatatatttgatcaaattgctttaacattattcttttttcttcaactgaataatttttgttcttcatcattccaaattctcttttccatttgtaaattttcttttgatttatacccaatttttttgcaatttttatttcaatttttgtccattcttttcttgtgaatttctttcccatttgcttaactttctcttttattttatggaatttttcaacaatttctcttttctgtttgtcatttaaaattcgaatttgatcataaatttgtccattatttgttggcattggcaattggtcgcccaattcatcacaatctgtggacatttcttcactctcctcttctttcacttccacattttcatcaaaattctgatcaaattgacgaatattttgtccaaattggttattctgatcagcattttgtccataaattattggcccaattcgataaatattttcttcagttctttcgtcccatctttggccaaatatttcagcaaaacttttttcttgacttattttgccagcctcaatttggttaattgcttttttgaatattaatgcgcataataataaaaatattaataatattttcatttttttgtaaaaatataatgaattatttttataaaaatatttttcgncaatgaattttgtaattattaattttatagcatggcttaatttttcttcaatcaatcaatattaaccactatttaatctattatttcanttaatttgacaacatttttataataattca

SEQ ID NO: 5743 - DNA, 6909 bp, Heterodera glycines
  unsure (1)..(6909): unsure at all n locations
gtacattttgaagctttcnnaattcatacaaaaaagaaaattaaaattttcagaaaaatgacattaaaataaaagtgaaatttgtatgataaattaagaaccgaatgaaaaaaaatntaaaaaattttaaatgttaatntaaagccacaacgacgacagaaaaagctttcgcgtgctcaattggacaaattggaatgtgtgtttaaaagcaaaaattacttaacaaaagctgaatgtaaacaatttgccatggaaaatggcattatggagcagcaaattcaagtagagaaacaaaaaatgaaaatttaatttaatacaaagtgtataaaaatctaattaattttaatcttaaaaataaaagaataattaaggaatggttcaaaaaagaacgcttaaaatgcaaaagacaagaaaaagtaaaaacccaacaacagcgaaatgtaagtgattaaatcagggatggtatccgtccttgaatggcaaggacgtccttgaaaatgggccctctttcttgaaaataaaaaatgtccttgtatgcaaggacgtccttgaaaatgagcatttggaaaaatttttaaaaaatcaaagaaatttgagaaatctttgtaattttcaacaatattttgattaaattatggcattatgtcatttaaaaatgtaatttttgagaatttttgaaattttatggcattaagtcactagtcactattttccttaaaaaattagccaaaaatcgcatattttggtcatttttggacaaaaatctgtaaacaactcgcattaaaaattacaaatttttccggacccccctatcctcaaaaaaattttttaaaaagcgcgccgtaaaaaaacccattttataaacaaaaaaagtcgtcgcatggcttaaaatcgcaaaaattaggcagtttttggtgaaaatctgttaacaaattgcattcaaattttcaaaatttttccccggcggcgcctgtcggcaccgccggaccccccccccctgtcccacaaaatttttggaaaaagcgcgccgcaaaaaaagcgtttttaaagcagaaaaaagtcgtcgtaaatgaagaaaatgataagtgaaaacaaaaaaatgttggaaaaaaacaattccggtgaaaaatacaagccatttgaataaatattaaccattttgcattgcatataataaaaattttaaatgtccttgaatttcatgaattttccccactatgtccttgcaaatcggcatacccgtccttggaaaccgagcattgggcgataccaaccctgttttcttttattttttttcatgtaaggttaacaaaagcatgcattttgtggttttcgaggtcgtcgatcagtgatcacgaatgtaatatacctaaccaaagttttggccaatcccggatccgaattcagacaaaaagtctgaatttcaaatttttggttttaaaattatgttcgaatctgttcacaaccattttaggatattacattggtttcttattattactcatttttaatcaattttaaaataaaatgtcaattttgaactttcgactttttgttcgaattcgggtccgggattaaaaatgccctaattttggatttttagattggcttaataaacaattaaatggctgcgaccattaatcatatatctgcaagcaacggaaatgatcaaaaacggcgacatttggcaagtggaaatgagccgttgcaacgcttcggagaggcaaaaaaatggatgactgatatctatgggcaattggatggacatgttggagagttactcgaattctatttgggtaagatagaaacaaattattgtagttgtaactggaaagtccaggtttggttaaaaacggacaaaaatttgttcctcccgctcaaattgatgaaattggacattttcgcgactcagtaagggcaattcgtgaagtaatcgggcgggacaagatgaaggtcgtcttcttcgggaggttgattgcgggatttctctagtgaaaatcagttttatgtggtttcagaacaagcaacggtaagagcagtgtgatcaatgcgatgttgtcatgccgagtgttgccccaggggatggggcacaccacttgctgtttcttacaagtggaaggggggtcggagcaggacaagtacttcatgatggaagacggggcgaagcactttccaattgctgaattggattcggttgggcatgcgttgggctcggaaggcatgggctccctgggacgcgactcgctcattcacattttctatccaaaatcggcgtccaaattgcttcaaaatgatgttttgatcgtggacaggtacaaaattatggctaatttgaccatttcattggtttgcgtctttcaacagccccggcgttgacctcagtcccgagtttgacagttggattgacaagcactgtttggatgcggatgtgttcgtgttggtctccaattccgagtcaacgctcactcaagcagttcgctttaatttaaagctcaacaaataaaacatatatttactgaccaattgtaggagaagaatttcttcattcgcgtcagcaaaaaattatcgcgtccgaatattttcattctttgcaatcgatgggatgccagcgctactgagaccgatgagagccgtgcccaaatccgtgctcaacacgagcaacgatttgaggattttttagccaacgagttgaaagtgtgcagtgtggcggaagcaaaaaatcgctactttttcatttcggctcgggaaatgcaagacgcaaggcttagggagaagggggaactgaccaaaacgagtgggtcagcaaacaaaacgaaagataagccatttttaaggtccctaccagcaggagggtttccaacggcgagccttggagttcaaacaattcgaagagcaatttgaggcagggcatttgaaaattcggtgattctatgcaattgaatttagaaatgcatttcgaagtcagcaattcggacaaaattcgaggcgcataatcgccgtgccaatgacatagttgaggcaattcaacacaaccttagcacagtgctcgatttggccgaccaagaacagttcaaacacctcaaaatttaaagaaaaatccctattccaaggaaacgccttgcgctggaattccaattaaaaaccaaagaattcgcaagttgtcgtgacaatttcaaatttttcgagcggacttatttcaccgaacaacagaaattacgttctgaagtgcatttgaaggtaaaatatcataacagaaggaagggggagaagaaaacagaaaattctttggtcatttctatgggcgccattgataaatttcccctccaaattttattttcaaacagttcgtttaaggtcaaaggagaaaaattcaaactaataaaaaaaaattaattattagagaattttaatgatctanaattcctcagcgtcgtaattattttttgttcttttaacaaaaaaaatttttaggtttcggctgactttttagacgaaattggacgcttagaagcgatcattgaccgtttcaacactcatttgttgatgaccccgaactgatcagcgattacaaacgccaattggccatccatgtgaatggagtgttgtcggaagggctgcaaaatcagtgcacgggcggactaatggcccaaatttggagtttggagcagtctatgcacggtgagtgatgaccaattgaaagaagcattcatcctttcattacttcaaaaaaaattagcctttgtcaaaaaaattcttaacgaacggcacgctgcgcagctggacaaaatttggcagtataaacagcccttcaaattcgcaattgtggtgaactgtcctgaattgatgtccgatttttacgaggacttggaattccgcttttcacttggagttgagaatgtcgcacgttggattttgtccataacacgaggccaaccgatcaccgccattgaccgaaacgttttggtccgatacaattttattaattaaaataatattaatttcagcggatgaacgtattgtcacgacagggacacaatgacggttgatgacggagtactaacaattaaaaagaaaaactgatactgttttaggggcccgaattggccatggacagcaacggcctgacaaacgcgaggtagacgcgttcttgtcgaacatcgttgtgcagtcggccacctatttgatgaatggttccgttggcgtgaccattgcggggctggtcatttacaagaacgttgactggcgatgggtggtcggaggagtgggactcgttgccggactatacgcattcgaacgcctccgatggaacaacggggccaaagaggagcgactgaagacccaattcagacagcacttggaacaacggcactcaattcgtttccatttgtttgaaaataaattgaaatttagcctccatcaaaccgagagtatccacaccagcagctgtgagcagcaagtgacccgggagctggaccaagtgaattgatcgaccgaaattccttttcaaattcccttttcgagttaggtttacgaaggactcaaaactgtggttgggggttttcatcgcgagatgaaagagggaattgaccagtgcaagtgccagaaggattcgctcgagggaatagtcaaaagtatcaacacaataaagtgagtgcgttggatagagagaagggcgggggaaatttatgtatacattcttggtatcagtcgaaatcttgaagtctgcagaagttttttgtgctaaagacaaaaaatattctggaatatacacgaaaaatgatgctttcgagtttccctattgtagtttttttcgtaatgcaaaagtattggttggaaaggaaaaagtttattgtttactgtccaaaaacatctcattccactcaagaaaaatttacaacgaaacactcgaatttttccttcagaaacaagaccaactttgtgggaagcaccttagacgaattttcaaggcgtttcttgaatgcgttcttctgatcgacaatatttgcacatttcgaagtgattaattcagttggtgactttgctttaggtgtgcccgttgattgatcccgaacctctctcatgaataattgtgtatttttgctcaatgcccactttcgtttttgaatgtcatttcatttttatagttatatttgtgtcttagaatacgagttctgttcaaataaacaatggttagccatcccattcattcgcattctcagccatttgtgccattttggaattttccttacttgacactgaatttgctttttccctgatggacttgccaattccctttttccacacagaccatttttccacaaaatgccattttgtaatgcgggatttggggagtccaatcagcaatattttgcgcaggagagaaccgatgtccagactcagcaaatattcctcgcaatttgcaggtgtcgtttaaggggacaacctttggaatttgttgccagttttaacagaaccactaaaaatgaatttttgcaatgtttgggagtgatttttctctaattatgatttttgcgccgttatatgtgttttatgtggcggcccgactcaaacggccgcctcaaatgacccaattcgttgttttgtcaggtcatttgtttcgcccgctgttccgctgaccgttccgctaagcgaagatcgtcaggggaatatttacgtcagttgggatgttttgtccttcgacggcattcgccgctccttcgctggtgctttggcctggcagaaaagccaattcgaggcatttctgaccatcatttgtttgattgcttcttctacgctttctcaggccgtcctccaaacggcgtcggaattacgtcgcaaattgcgcttaattgacgaatttttcgccgatccgttttcctatgcccaagaggtcaattcgctgattgactcccatttcatggtcgcttccgtttgtgacgctttgtcattttttgcagaggcaaaaacgatggcttgcaaaatgttggagacggaaggcaaattttcgggtgaagcgataattctggcaaatttaccgttgtgtatttcaggaattcattgctttggcgaatttttacaaatgttgagaaagcgtttttcagaattcccgcaatatttagagaaatttttaaaatcaaaaaatgacaatttgacgaggacagaaccgccaatttacaccttctgggcagacttcatacagcaccttgacttttggcccatttatgagagtgaaaatttaatggtaataaaaagggaaaggaaaaacaaatcggacaaaatttgagccggcgtggaagacgacactttttggggggaatggtccgtctgctgggcaaatacctcactttgcgtcttaaatcggccagaaatgaaaacgggcaaattggttttaactgaagaaattattcattcccattttctgtttcacagggaaaggcttgcttttttggagtctctttggactaacgatgaatgggtgctcagtcggctgaatttcgtcgccaattgtgggcaaaatattccgctagaaatgttggaagaaaatggccaattatgtcccttttatgagactttcatttcgcatctgcgcaaattcaaagaggacggaaggcaatgaacaatcaattaatttggtgctttctgagtgggttaggctcattcattcatgtcatttccatgccaagctccatgttttggtatagtgtggagagagagagagagaatggtcccctttcgattggcattttgcagttctaggcctcgttttgggcgttgtttcctccttcaactcgtccaccaatcgctcgtccgccactcgccgtccaatatcgacaccactgcgcgttccttatttgtccaacacgacatcttgcttaaaactcagccgaatcttctaattgttatatttcc

SEQ ID NO: 5744 - DNA, 879 bp, Heterodera glycines
  unsure (1)..(879): unsure at all n locations
atgggaaagagaagcaacacgtggtgtactaatgtgggggggggggggagttcgtcggggcaggggcaataaaagatggaggggcagttggattccgtcagtggttgaggatgggcggggagagaccgaccgacgaatctctctgctttggttgagttagtctcttttctttcgcatccattctttcactcatttcttagaatacggagaataaccaaacaccacaaaattttaaacttcgtgagcctaattttgcgtataatcgacaaagtttaatgggagttttggggtgttaccgctgataaaaacaataacaacaacaacagtctctatatattacacaaaaagttaacgaatttttaccccctcccccacactaagttttgtgcgtatttcacataaattctatcttttatttattatttgttagatacatatttctttaaaaaaatacgacagttggttccatcgtcttacaatttttttagaatggctgaggccagaaatattgctgccttaagcttcaccgtaacacacgatggcatttccgtctcttatgaccaggaagttctgcgggacatttggcacgcgttttcacgcagttataaaaaacgcatcgcaaaattcgaggtttgcttttatttttgatatttacttttgtatttcattaactttcgtgttttccagaatgatttcttcgctgggattttcccagccaatatccgttcgttggccattgtcattttccttgtggccgcattgaatgtttcattcggaaatgacaaaactccgttcaatcttgccgataagctcaattactacgtcttttcctaatatcaccacgtgnagtcatttattttgtcaattttaaaagggttg

SEQ ID NO: 5745 - DNA, 2183 bp, Heterodera glycines
cggaagatttaaatgaaaatgatgatttaaacgaaacctttattaggatgaaaatcggaatgtcattttaaatgatcgccaatcgcgccaagctggaattgagaaaagacaagaattggtggcccgttttacctaattctttgttattttcatatatattttgtctctcaaatactctttttattagattttgactaattttggttaaaagtgattttttaaataatatcacatgtctctattttagggaaattaattacagttcataaaaaaaattttttttttaaattttgagttggccctaaaaaatcaaaattgatcattgagaaaaattattttataactgtttttaattggttttttgttagtttagcctaaattatttatcatacaaaaattttttggttggattttgactacttttgctaaaatggattttttatatacttatcattaggttaaaaattttattttggtatcagatgaaagagcacacttcaatcaataagaaacttatttttgtttatttttatctcacaattttccgtgtcaaaaggctcatggtaaatattgcaaccatgggtatgatggtggtagcttttctaaccaccaactcccgtcaaatgaccacgaactaccttcttattctacgggttaaaaagagggtcatggtcatggttaaatgaccaccaacttcatggtcatttgcccaaagttcgtggtagctcttattctgcgggttttaccaccaacttcgtggtcatttaaccataaccacgttcttattctacgggcccagacggcgaacgaaaaggcagccaaaatgaggttttcggattgctttccttttcctgagtcacacattcatttcggtgtacagacatttcgccaactgacatctcgccaacatttatttcgccaacttaaccaaaatctgacatttcgccaactgacatttcgccaagtagtcaaaaaagtaatgaaaaaaagtaaaaagacgaaagaattgcatcaatcaaagcttaagtattcctttcatttttataagttcttttctaaccaaacaaaaaggtaattcagattttagtaagaaatgccaactgtacgtgaaatacttgagagtctgcaaaatccaattaaaaggccccgaattccaacaaatgaagacagcgtactgaatgctgagaggacagacgcagaacaacaaatggaaggcacgtcaaccaggaatgatttggacgtcgctgaaagcgatgatgaagaaaattgtgcgcctgttcatttccaacgtggcaaaacaatccgaggagcgctttgcatttggcaccaaggtcttaatagttttttggggtttcatttgtttatttttaggcttccgatttctcaaaatacgaagcgatggaagctggttcaggtgcgaacggcgcaattgccctgcgacagcaaaattggaagatgaggaattgacgggcgttttgggtcccaaagaacaccatcatggtcttgccccatcgcgttgatgcaccagtgcgattcggtctgcattcgccgcaaccatcgactccaacaattccatcgacagaagaaagcagtttggagcttattcgacgatggggacacgaaattgtccgtccaccacgcttccccataacgttttggaatgtgcacatcagggctcaaatggcacttgaaaggacgaataacggcatggaagcacggccaattcgcagtataaagcaatacatttcagaaaggcatttatttttttggtcagcgtgaactcaaccatcatccatcatttagtgacttcattgctgcattcactaaggacattgacaaacagttagacatcggacgcgcagaacagctccagaaaagcactaaacgacgacaacggtacatcatcaaagaacaaaatgtggtgcggatccttgacgaggccgactttgaatcggaagaaggattgacaaattctttgcacctgctcgggctcgtgatgcaaggctttgtggaggggcttcacgttcgtggaaatgaagagagtggtgaagaaactgatgatgccgatggaaattaaattcgaacaattttagattttatttccctttctttttgttattttatttattttataaagatttcttcgcattggtgtgcttgggggagaattttttaatcattat

SEQ ID NO: 5746 - DNA, 2250 bp, Heterodera glycines
tggttaatatgatcggaaaattgtaatttattatcaccttttactcctaaatccctaattgtatccacagcatttattctatttccatcaaatttatatgtttcttttgggttttttgaacccaaatataatacaaaagttttttgcattgaaactcttatttgccatttatttgcccattcgaataaattatgcaatgctttatgcataatttctgtgtcggttcttgctttataacaaatatataatttaacatcatcagcatataattttattttcactcctgatggcaaagcatcaggaagatcgttaatataaatcaaaaataataaagggcccaggacagagccctgggggacgccagaggtaacttttttacttgaggataaagaatccccaattttaactcgaaaagtcctattactcaaaaagccctttatccacattaaaagtttgccctttataccaattttttccaatttgtataaaagtaaattatggggcactgagtcaaatgctttttgaaaatcaatataaatacagtcaacattttttccatttataattgcctcgtaccaatcttccacaactgttattagttgacttgtcgtagacctatttctaacaaaaccaaattggtattccgaaattttattgttttttaggagaaagttgtaaatattttggctaagaattctttccataaccctgcaaagtgagcaggttatagaaataggcctataattttcaggattaaatttgtccccttttttgaaaagaggaaaaactattgattccttccagatatctggaagagaaccagagtctaatgaaatcctgaataggtcagtaataacagttgctaatgaagaatggcagtttttcaatattttatagctaatattatccggggaggtcccgtttttattcggaagttttttcaaaagtttttgtgtctcgatgatgttaaagtctatatctgatataaaacattgattaacaaaagtattgcccaagtttaggtagcctgggtcaacatcagaattgttaaacgaatttgcaaataagttggcaaataattcacatttttcatcaccatcatgatagcatttgttttcaaagactaaattcggtatttcaaagggattaacatcgtatttttgtaggtatttaaaaatggaatttcttccctttgaaatagcctttttctcaatttgcgagtgaaatttatttgtttgtatttttatgtgtaaactaatgctatcataaagtgctttttgctcttaacacttttgtaaagaaaaagaattgtttttgtatatgcaaagtcaatggaaatgatcttacacttagttttgatattgtattgaaaaagttttggttcgagaaattgtttgaccttgaaatggagtttttttgtttttgtaattaaagcggatgtcaattatgcctcttttaatggatacggttttaattggatggatttatcgcacttattgtttgttttgacaaaaataagtttcttttaacgatataaggtcagtttatttgttctttttttgtatgtagatgtttatgtaaaagaaattattaaaatgtaagagaacaagtatttattatgaaaaggattttctacgcaaattgtatttcataatagaaatacgtttttaaaattccaaaattatgctgaacaggtctgaattaagtcccgtgattgacatgccgatgaatccgtaaaattgagttcattgtttggaatagtgaaggattgagtcctcggtgattggaatgctggtgggattgagtcccgggaataggaatgatggagaattgagtcccagtgattggaatgctggttagttgagtcccagttattggaatgtcgcagaattgagtcccggtgattggaatatcgcagaattgagtctcgatgattgcgatgccgaaggaccggtgaggttaggtcccagtgattgaaatgctggagggttgagtcccagtgattgaaatgctggagggttgagtcccagtgattgaaatgctggagggttgagtcccagtgattgaaatgcaggagaatgagtcacggtgattggaatgcataaaaactgagtccgggtgattgaaacgcaggagaatagagtcccagtgattgaagtcctggagatttgagtccctgtgattgaaatgcaagagaattgagtcccgagtgattggaatgcaggagaattgagtctcggtggttgcgat

SEQ ID NO: 5747 - DNA, 1892 bp, Heterodera glycines
  unsure (1)..(1892): unsure at all n locations
tttttcaaaagtttttgtgtctcgatgatgttaaagtctatatctgatataaaacatgatttancaaaagtattgcncaagtntaggtagcctgggtcacatcagaatttgttaaacgaatttgcaaataagttggcaaataattcacatttttcatcaccatcatgatagcatttgttttcaaagattaaattcggtatttcaaagggattaacatttttctcaaaaacgggaataaaagtacactggtaataataggggctgatttgtgagtgaaaaattgttcggtccgagggtttttgtttagtccacacaccgtttcagcttttgcctcccagttacaaaaagatttgaatttttgtctcacaaaggaagttccccaggtgtccgtgggatttccgaatgaaatttggtgggtggatacagcacgatctcgatcggtcccgatcaatggcgtccaaaatctgctccgtcaaccgttttcgcgagctgcgttggagttcgtcgatggccttccttggtcttcctctgtttggcgttgctaaaattgacaaaaaatgaatgatcaatttttgagaaaattaattgggaaaagagaaggcatcgaaatttcactcacttttgctggtggttggtgtcgccgttggtggtgccgcacattgctccagctgacgacgcagatcactgatcagcgcttctcggtttcggacctgctcgcgcagaaattgaatggtgtcatcccggtccttgagctgcttctccagctgttcgatgcgctctgatcgctcgtcaatggccagcggtggcgggatcgtctctccggtgtccattggcgcagttggtgttgtcgaaaacggcaccaaatcgccgactggtgtgacagatgtcgacggcagcgaaaagccaaattccaagatttcctcgtccatctcgggcgtcggcactggtcctggagttgatggcgatggttccatcgcttcttctgttgatgcagcagatgttgacggccctgcttcgtcctgctgtggcatttcggcattggggttcgactgtggagtggctgaaactcaaagaaatgattttttgagtttaaattgctgaaaaaactcgcttttcttagtccatcgggtttctctggccctcgcaatattggcctgtcgctgctctcgatttttcacccgtttttgtgccgatttaattgcattaagcttgcacacaatttttctttttgccatttaattaaattttgctttaaaattaaaatttaagttaaataaaagcgattgttttctttaaaaaagcgattgaacaattctatatttttttctctatcggtatacaaaattaaaagaaattctgcctgaggaaaaaaaagttatgctgttcgaagtaaatgttgtttttcctaataataaaaatattagatagtacgccaaaaggagacaaaaaattagagaaaaaagataatgtttttctctggcactctctatttattggtacacatctcgttttatgaaacggtgtgtccaattaaatatttaatttcttggagaaggaaagaaagtcacaaataacttggggaacaaatataaaatgcaaatgaatgaagggaagacataattagggctgtgaattttaggttttaactaaattttttgctcgattgatttgaagaaaggagctcaaaaaacgcatttctgcattaaaaattttcgattctgatgtcattatcggtcactagaaatcactattttggcgacgagtcggcactaaaatagttaaaaatcactattttggcgttttgtcactatttcgacattttttggaaaattctttaacaaaaatgcaataaaaccaaaaaatacacccctaagaatcgacctaaaaatttt

SEQ ID NO: 5748 - DNA, 3214 bp, Heterodera glycines
tataatattttcttatctctttttctttcttttatttctatcacagagaataaaatgatgggaaattctttgtggtaaaataaatttttttagtttaatgcaactgaaaataaaaggtttcaagccacaaaatcatctttatttgatcatttgacaaattacccaataaaatatgtacatagtttgtttgttttctgtccttgttttgtattttatatttttctgcctttttaaggcgaattaacggagaatgattttgccattaattttattcattcaccattttcgtaaaatgaatttcaataaaaataaattttatttaaaaaaaaataattattttattctttttcataaaaatggttttaataaaatttattattttattttcaattaactaattatttttttttatttaggaaattgctttattttaccacagaaaaaaagcaaacaaagaaatggccgggaaaatttttgtggtaaatgaaagaattttttatgtgaaataattttaaatattaaaaattcaggtcactggcgcaaacaagggcattggttacggcattgcgcgtgggttggcccaacaagtgaatggtgccaccatttacatgacgggtcattttttatgggtgcacccccaaaacctcgctgccgaaatttatataaaaaattccataactgaaatttttcaagaataaaaccatataatttttttcaaatttcatacttcgaaattatgaaaattttggtagcttttttttagaaatttaaaaaatatataataataaataataaaactttgaaaatattgctaataaatttaaaattttcttacaaaaaaaattctgatatttttgaaaaattaaagtttgaattggtggcgcgattttgtcccgtgcactatttatttatttatttttgaaaaatttaaatattttgattttcagcacgaacgccttcactaggcgaaaaggcattggatgacttggagaaggaattgggcacaaaacgcatttcaaaattggcatttcatcagttggacatcactgatgagaaaagttgtgccgattttgcggcatttttgaagaaaacccacggcggattggacgtgctcatcaacaatgccggctttgcatacaaagtcggcatttttggatttaagggtggcaaaattttgcctcttaaaactgcagcataatgcgacagagtcggccgcaatccaagccgatgttacgattggtgtcaattattatggtaccaaattgatcagtgatcagctgggcccattgatcagagacgggggaaggtgaggtgaaggggcgcaattgacggcacttttccgttagggaccgcaattctttgccattgccgaaaatttggcatgacgaagaagtgccgttaatggatgacaataatacataattaggcagcctaataaatttgccaatgtatttttttgtgtgtgtgtcagaattgtgaatgtgtgcagtcaaatgggcgtaatgggcagtcagattggtgtgatgggcaacctgtacaaacaggcactgattgatcagttcaaacatgccgatgtcacttcggacgatatcaacacatttgtggaggaatacaaaaagtgggaacattaaatcccaccaattttctttttttttcggaattttcgggggataatttttaaaaaataaaagttacaatggcaggggtataaaatttcaaaaaattttgaaatttccaaaggcttgcccatgcggacaagcgcaaggagggcggctaccccgaatcggcctattgcgtgtctaaagcggccgaaattgcgctgtctgtgctgcaggcacgcgaattggccaagcggaacattgttgtgaatgccgtgagtggaagaaaattggcatttgaaactaaggccaacaccctcccttccccccatgttccttctctgaagttggacatttcgatgggatatgtgatcaagagaattggcatttggcaatgcccctggcaaatgcctaagaatttggcattcccaaaaaaagccggaaatcgagaaattggccaaaacaattgctgtttggattgggaatcgttttttttataatccacccattcacagtgttgtcccggctacgtggacacggacatgacaagtcacaagggccatctgaccattgaccagggcgcggacacgccaattttcttggccattgaccaaagtgtgcagaaaggaggactgttctattatcagaggaagccgatcacatggcttcaagagtgaaaatgggaattgatcagtggctgatcaactgatcagaaaagaattgtgatttgcttgggcttcttgggagtacattttgatgaattttccatcactttattcgtggatattccaaaaaatttttaagttaaatatttaataatgtgaaagctttttcaaataaatgtgtgtttgtttggcttaatgtttttttttacatttaatcattgtaatatctgttcttcattgccctgtatttgcgcagccgataaagcgccttaaaatcacaaaattgagttaaattagtaaaaaaaaaagagaaacaaatcggaagggtggtaattagcttgccttatcccagaataattggcactttttttttgtacattttgtcaatggccaaaaaacacctccaactccttgaccacgtactcgccccgtttgatcagctcgcgcactttggcctcttcctgcacattggcgttgcgtgcgaatgcgttttttagccgttcatggaaccaacgcgagccttgcggatagtccttcaatttgccaaaagctttcatgcttattatttgggtgctaggctaagccttaagctttatttattacattgttttttattgtgcgcgaactgctctattgctccatttttgtatgattcccaggctcggtaatagtgtactttgtaccccccttttttgaaaaagaaaattttcaaaaaaagtttcgaaataaaactgttttatgtgggccgtagaatttgatgctgatatcatttcggcccatttcgaacccctgacccggactcgaacaaaaattcaattttcgaaaaattcaaaatatgcagccaaatgcattaaataaaaaggagtctcgattcagaaggcaaaacatagtaattcctgcatttgaaatggtgttgtggcatattttgaactttttcgaaaattgaatttt

SEQ ID NO: 5749 - DNA, 1772 bp, Heterodera glycines
caggggtccgaaatagatatcagaatcgaattctatgacccagaaaacccattatttcgaaaaaaaattttctttaaaagacaaattctccgagtcttgaccaaggcttcatggtaaaagccttttcgagactcggcctcgagaaattgtcagtgtctgacatcgccaaaaaattattttctctctcaaataatccatgataatttccaaccacgccttcgtgaacccaccttgcccaagtggtacagctaaatgaacaaacatgataatttggcaatagcaaaaacaattttttttttgtaccgtcttgtaaagttgaatcacttcggcacgaagcgagtgccctccaacgatggacattgtcaaaaaaaagtagttatgcaccaaaaatgccaaaaaaaatttgcgcgaaaaatccactcaaaatcaaaaaaggaaaaaaataggcatttgtttaggaaatcattattatgatagataaataaataaatgaatgaaattgtcaaaatttatttctttttacattattattttatatatacagaattgcaaaaggctgtgtaaaaatggtaaaagtgaaatttacattttttataatttttgaaaaagcggcaattggccaagctcgacacagcaaaaaaaaaaaatcgacaaaatgaaatgagcaaaagtgaacaatggaaaatagagaataaaattaaaatgaaaaagttgcaaaatagcaatacaaaaaatggacggaataaacagcaaaataaatatacatattggacaattctcgagcaaaaaaagatcagttataaacggcagaatttaaaaaagagataaatgaatgaaggcaaacgatgaggaggggaggagacgatgggcccaaaaaaaaactgaaaacttcaaacatatgaaaccgaaaattgttgcgaacaattaaaaatgaaatcccaaatttttgggaataatttaggtttccggtaagttgagaaaattcgtaaaaatgctttcgaatcacaccatatttgttaattttagtcaaatatataagaaaaagctacaaaattttacagtttttttttcggggcccaaacttccacaggccatttgggaagtgaaaaaattattgtacaatttagcaaaataatcctcaacatcgatatttattgtatggagttttcaagaggccatcattgtggccaattggtcagcggaacagtgccacaaatcgggcatacgaacacagttgaggaacagctggttgaaggacgggttgagcaggttctcctccgccgagcattcctgaaaaaataatatgggagtagacattaaaattgagaccttgaaaaaaaaattgggcaaaaaatattgttgaaaatttttttaaaatttttacggggggaaacggcgggggggggggggggtaaacgacctgcttccaattttatgacagtttcgggctgccatggaatgcaatgacggattatagatgatttgacccgtagtcagagttagaaaaaaaaatcggggattcaaaacaaaatttacatattaaccaaaaaatccatcacattttggaaatttttgtccacccttcaaaccgatggatagtcagtcaaatttagagcaaaatttgtcaaaaacaatgtttgaaaactgaatgaattgcattgttatgccgtgaacaatggcaatacatcacaatcaatctttggtacgtgcctggacaggcaggttccactgctggcgaagccgttcaacgagacggtccagttcagcaatct

SEQ ID NO: 5750 - DNA, 1003 bp, Heterodera glycines
gggcaacggttgtttgtctgggcaaatggaaaattaaaaaaaatgagaaatttaagaggggagggggggggggtcaataatcccaacaaatttgcgaaaattccaaaaaaagtttccgccggacatcaatcactacgtgaaacttctcatagaatttgctcaaaattgaacaaaaatctatgaaaatgtgggttgtgttttggacaaaatcaaagttgcaaaaaagcataaatatgtatcacgaaaattttcaaattcttcaaaaaaaaaaaaaaatttttcgtcatttattcgctagcaaattttacatcatttcgaattatatatattatataaaattttcaattttattttccaaaactcaatgagagagttattgtgggtcacgcatcaaatatcgtaatggaatgcacaggcacggcactgacaattgtaaaaaaaaaactcaaaaactgaccgattgtgacagtgccaacgacaatgtgccaatccatttttgcattgtcgccacgcttgggcagctgaactgcagtgcgctcagcaacggtccgccgctgtcgtcggttgctgactcgccattcgctccgctgctgggcacccgcgcctcatccgcaaagtccaactggaacacgtactgctccacgtcgttgaccagctcggcctggtacacctgttccacggtgtcgctacaaaaaataaaattattgattgaataattttaaatggcaaaaaaatgccgattttatttttggtggttattaccgtatgctgacacagcgttgggcaaacttgtaggtggagtccgagaacaggtacagctttgaaccgctgaacagttaaaaaagttagaatagtcgttagcgaaaaattaaaaaaaaaaaacactaataaaaagcccatgaaatgtcgaaaggaaaatcaaatagtcaaacatttgaaagagtttgtgtaccaaattgaaggtaggaagggtcaaaaacctccaaaaatttctggaaattga

SEQ ID NO: 5751 - DNA, 1317 bp, Heterodera glycines
aaaaaaaaaaaaaaaaaaattggaactcggcatggaaatggaagccataaaaaacatcgggaaaaaactgggaattttacacccgttgcatgtgcaaattacacaatttgatactactagtggcctcccctcgttcacctgagcaccacgtagctttgcttccactcactgctgcccaccggacgccatgtccaaccgcgctggtacagctcgcgcacggacatgtaacactccatcatcatcaggttgctgccgcttccgcctcccctgtcatgttgttgaccttgttgctggtgttgtacatcgcccgtggttgatggagcagcagcagctgtactgcttggtgttcgttgcttctgttgccgctgctcctccagccgacgacgctgctgctgcagcatttgctgttggttgtgctgcacccgtggcgcgtcactctggtgccaatacaccaatgaatggtgcacaatttcgagctgttgctgcaaaaggcaaacatttttttaggtgaagacaaaaaaatatatgtatttatttaagagattatatacataattggaaaatctgtgtgttcatgggtagtgctccggaatacgtgtggaattgtttttttggacagtattttagacgtgtcatgtaaaaatctccgttcgattttgattggtgtataaaactatagattagagaacaattggtggtctctatttatctgaacgttcttttaggggtttctagaaaaaaaagaagcaaaaaaattccaaaaacttattatctgccttttttcgaaaattgtaaagaaaaatttttttattgaaaaacgacaatgctcaaaacaggaaaaaaaattttgttccccccccttcaaccgctgcttaccatgcccaactcgctgcgcagaaaacgcttcagcaacagtgccaaatgcgacgagtgggacgtgctcacatacaactgctgttgtggggcagtcaatgatgcttgggccagttcgtcagcagctgaatgaatatttaccaagcattttttggtatttcttgttttctaaattgtctccaagagctccctcacgcaaatttcccaaaaatttttaccaacatccttaaaagtgtctccaatttttggtgcaaaacagacttatcaccaccctctctcctcgccctttttgatgaaaattttcaattttccttattggctttctcctccagggactgggtcgttttggcgccgacgttttggcgccagcctcagtttttttattataactttttttcttgttgaccaaatctaacaatcttggtatcattcgaaagcccttca

SEQ ID NO: 5752 - DNA, 734 bp, Heterodera glycines
tcactttttgcctttttgctcctttctttttgagggctttattattttgctgactgaaaagaatcgcctcctctcaaaccaaatccaataaaataattagtgtttattgattaattaatttagcaattaaaaatagtaattaaaatgtgcagcaatccaaacgccaaagttttgtcttcgatttgcggcttcagtcggatggggccgaaccgcgagttgaaaacgcgcgttgaaacgttttggaaagagcaggcgaagctgcgcatggacggtgcaaccgaaggcgaattgaccgtttcaatcgatcaatttgagagggacattgaacagttgcaaatccaacgttggcagcaattgcaggtgaaaaggggaaacacaaaacatgactaattaatggattaattaatttatttgcacaggcaacgggcatcgatctgatcccatccggcgacttctctctctatgaccacgtgttggactgcgcgtgtcttttcaatgccattccgacgaggtgaaaaattctcatgaattaggcaccaaaagcaactaattaattgtaaggccattaccatattattttgggtgtgtttgatcttgacttttagttgaaaagttgcatttattgaattttaactacagtaataattttaggaattactgtaataaaattaaattttatataaatcggatcgatcaacggcggggggggggcagaccgtatttagggggggggg

SEQ ID NO: 5753 - DNA, 3604 bp, Heterodera glycines
gttatagaggtcccacaacagttatatgcaatttctccaattggtactttggcagatacaaatcggctgctcagctcagcggtgttccgtcccatctgcgcctttactttgcgatggcacgcggtcttcaggagaagggggcggatgtgccggcacttccgatgaagaaatggttcgacaccaactgtaagcacacaatttgcttttcttttgcattgggttcatcgttttgctcattttcagatcatttcattgttcccgaactgagcactgatcagtccttttctgttggcctcaacaaaccgttgaatgactttttgttggccaaaaatgcgctgaatttggtgacaaagcccgtcctggtgggcccggtcactttcttacatttgagccgagtcggagaacggaaggaattggcgacggaggagcagcaaaaagtgcacaatttgaagctgctcccgtcgctgttgcctcattatgtgaaggtgtgcgagtttaaattgaggaatttaacaatttcaattcaacggttttcccattaaatgaaaggtcgtccaatcgctggtcgacgccggcgccaaatggattcaaattgacgagccaatctttgcactgacttttgcggagaatgaggcgcccgcgtattacgacgcattccgacagaccgcgcgggcactgcagcaagtgacggcgaagaaggcgcacttgctgttcgccacgtacttcagctccatcgcgaagaatgtgcaaattgtcaaagaccttcccgagggtcggtgcaaattcgtctcctaattaccgctaattgccctctcaggcactggcattcacattgacttagtccgtgcccccgagcagttggacccagtgttgtccgcgttgccagccaattgctttgtctctctgggtcttgtcgatgggcgaaatgtttggctgagtccgctgcgtcagtgtcatgccaatacgttgcgcgttgtgcaaaaattggcaccgggacgcgtgttggtcagcagctcatgcagtctgttgcacgtgccatattcgaccaaaacggaaaagcgcagcgcagaagtgccaaaaacggtggccactggaatggcctcgtcgaagataatccattggctatcatttggtccgaccaattctgcaattgttattcaatgaaagatcgttttggatttgttcaggcattgaaaagtgcgaacaattggtgaccgtcgccaaaatgataaacggcggagactgcgccaaagaattggcagagaacgacgcccttctcaaagaccattccgtatccccgttgatacacaacggaacagtgaaggaaagggtcaccgccattgaggtggggagggcacggcaaatgacggcattttcacctttgccttagccaaatcgtccatttcttttcccattctttttgaaaacccatttgaattgctaaatttcgccattttcccaggcttctggcgttgagtcatacttccgtaagtcgccctatgagcagcgcattgtgcagcagaaggcgtgcctgcagctgccgcccctgcccaccaccaccatcggctcgttcccgcaaagtgcgacggtgcgcgcgatgcgtgccaaattcaaagcgcacaaaatggcggacgcggattattgggcatttatcaacgcggagacggagcggtgcattcggatgcaggaggacattggtggggcggggaggaggaaaatgggcaaagtgttgaaaaacgataattttcaaatgccattttataaattgggccaatccatccaatggccaaccaatcaatcaatctgtcgtcattcgtcgcctttgtttaggtttggatgtgcttgtccacggcgaattcgagcgcaatgacatggtcgaatatttcgctgaacatttgcacggcttttgcgtcacttccaacggatgggttcaggtgatttttcgatttgtttccgacactttctcttccattttcaattccttcgcttttttcagtcctatgggtcgcgctgtgttaagccccccgtcctttacggcgacgtgcaaagggcgggcccaatgaccgtggcaatgaccaaatttgcgcaatcgttgaccaaaaagccggtgaagggaatgctgacggggccaatgaccattttgaagtggagctttgtgcgcaacgaccaaccgcagaaggacacccttttccaggcaatgaaaaatcattgccaattaattgttgggatttctcatttttaggttgcgttggcattgcgcgacgatgtggccgagttggagaaggagggcatcaattgcatccaaatggacgagccggcattccgcgagggattgccgttggacccggcacagcacaacgaataccttaagatcaccgtacaggcattcaaagtgagttagttgctacatagtcgtatcattgatttgaaatttcaatctgttcctccctcacaattccccccattttttagatttccactggttgtgttgcggactccactcagatttattcccacatgtgctactccgactttggcgacattttcacgcacatcgccgagttggacgcggacgtcctttgcattgagtgctctcgctcgggtaaaagcatttcccctttctttgacgctttgttcagatttgagtctgctctcctgctttgaccgctttggctatccgttgatggtcggccccggcatttacgacattcactccccgcgggtgccgtccgtcgacgaactgaaggcgcgccttcgtgcgatgctgaaatacatcccggccgggcggctcttcgccaacccggactgtgggctgaagacgcgcgattggcccgagactgaggcggcactgcgcgcaatggtcggcgcggtacgttccgtccgtgccgaattgaaatgaaaaagaaccaaagaacagcaaagaatgtgccattttcacttatggaatcctaagaaatcttaattccccttttataataagcatggttttattcgtatcacttttgacactttttaattaattattttgtttatttattaaaagtttttctgaaattacatttttattgtagacgacgacagaatatattaataaatatttaatatttttcaaatcattaggattggaaatttaagtcaaatggttttttctggtgactcgaaattgcttcaaaacgtgatgagtcgaagtgtcaaaagtatgggtaaggggtgaccggaagaggcgggtcatttcagtacgggaaaagttatttaaataacttaattgaataacatctaataataacaaatatatttgtcctctatttcagtttagacgaccacaaaaaaagacaagaccatgtaatattttgacaaatttcatgcaccataactttttatagtagcaaccaaatttatacattcttggtatcattagatagcgctaagtgtcctttattttcctgtaaaatttcaaaaaatttcgttcggttttaaaaaagttatggccaaaaatgtttagaaaaacaatttttgaaatttacaagccacaacttttttataacccaacgaaattttttgaaattttacaggcatatatgggacacatagggctagcgaaaga

SEQ ID NO: 5754 - DNA, 2872 bp, Heterodera glycines
  unsure (1)..(2872): unsure at all n locations
aaaggtaccgccaaacgaaaaacatttttaatactgaatacctatgcaaaggattccagcgataaacacgaagcaaagcataggaccgaataagcaaattgcgctccatacatataaattttctttcgttaatttttttccaaaaattcacaaaaatggctcaaaatagcaaaaatagatctttttctcgacaaaatcggttaaattaattcgagttgcgtttgttgctaaagttaaatctgtgtttgttgctaagtttgtagttacgtttggacttacgtatgtttgtttgttttttgaacaacttttcaaaaaatggaaaaaaaattgaaaaaccccgaccgaccccaaacgatttggtcagcccgaccccgacggtcggggttgcagccctacagggtcctaccatcggtcaatgccttttcgtaataaaggtttaataaacgttataatcactagagaccggattttgaggcatatgcctttttttgctaacttactacggcctaatacgcacgaaaaacgaatttttaacttttttatcaaaccatgttaagaagccataattttttttgttgatgattaaaccaacaatttggttaattcgagaccaatttttacaaaaacaattaagaaggttacaaaaaggctatcgctattgtggatgaaatgttctcttcggcgggtgatcggtgattagagggaattgattaaatttgtggactgtggtgaattcccccccccctttttgccccacctctctctctctctcttatcttatctcccccccccccccatctcttctgaattccatttgatgaactgtgctttttcgcagcaacgacacaaaatggagggaaagctgatcaaaaacacaaatttctccatccaatttattctcgacaaaattcgccgttcattcgatttggaagaggcgcaaaatgagcaaaaatcaacggaatggccggtggccaatcagctggacggtttcgaagccattgtctgtttaattaatttaacacaaaaaatacaattgaaccgttgaataaaaacttgaggacatcaccggtggtgccgcgtttatgtcgtcgattttaaaagttacgttccattggaaagagcccaaaaaagcacatccctttcccgattctgttgtactaaaggttaaaagggatgatttatatatatatatatatatattgaatttaatttaaattgaaaaatcatttaattaaattaatgatccccttggcacagattcctggcccaaaatacaattctttggtggcacaaaatgggagggaagaacaaacggacaacgcaatggaagaagaaagctccgattatctgatcaaagcgcacaccgtaaagtagcaactattggcaattaaggtgccattttcagaatgagattcttttctacaaaaactttccgcgcttcgacgcgtccctccgtctgcccaaattttacttcggttccgactacagtcccagccacagtaagtcgatctgaccgatcgattggcgcagtttgcccagcaacggaagcgcactgatttctcacacactttttcagccaggaattgtgtccgcttttgtgatcagtgattttcccttcagataatgggttgatcatcatggaggacctgagcagccgcgcttcgtcccttctcactttgccaggcttcgacgatgcccatgtgctggtggtcatcgacgaactctccaaaatccacgcaatttcttggaagcacggcgaactgaagcaacacttcccgatcgaaattcggcccagttttatcgagtcaatgcgatctaacgcgaaacaattggcaaaggcaaaagagcaaagcaaattcaaagtcgaataatttgttcggatttgcagattgagccgaatcaggtcggcccactgatcgaccgtcttttgtcaatgttcaatgtcgattattacgccatggcattgtacaccggagacaaatacggtcagtgaaattggcattggcacaattttaaatgtgcttttcggcttcttaaaggatttcccagttgcattgtgcacagcgacctttggtcaccaaatattttgtgggagaaaaatgccaacggcgaacccagcgaccgtttgtgtgccatcatcgactggcaaacgcttcatgacggcaacccgtgcaacgatctgtcgcgacttttggcactgaacacgtcgggacagtacagacgcgaaaatacggggcgactgttggaatattacgcaaaaaaagtggccgaacaaatgggagggacggcaccattcacaacggaacaggcaaaacgaagctgaaaatgagagcaaaaagaatcgcaaaatgtgaaattcatttcagttgagagttgcatacaaacattcactgcccttctcaatgatgtgagtgagaaacggcacgaaaataaatgtcaaagcaaatcactaattgtttagatgggagagggggcggggaggtgaatgagtggtgaatattaatgaatttggcaatttgagaaaagcttaaattgattgaatgttgaatttatacatttacaagaggaatggtttttacaagtagggatcccagcagatgtgataatgttttatcatttggcagtggcttttttaataaagtttttgaaattttgaagctttttgtaaagcaattgtcattttttgatcaaaagcataaaatttttaatttccttttatttcngnctaaaacatcacattagacattttagacgaatctttaagaagactcataaacacaaatttttgaaaatgaagcannaattgntgaggattgaacagtgtgaaaaaaggatataataattatcgtttttactgtttttgaggcttttt

SEQ ID NO: 5755 - DNA, 5249 bp, Heterodera glycines
aaaaaggaaaaggtttttcctcctattttagacctgggagaagccagggaaaaaattaagccttttgcatgtttttggcatccctgtcttattttgttcaccagcagaaatcaaaatttttcttgtttcatgcatgaaaaattctaatacatgcattattctctctaagaaactttttttccgtttttgaaataaaaaaaaaaaaaaaagccttcaaaaataaatttaaaaattgtattttttaaatttttggacaaaaataaataaaaatattcatgttgcacaacggactcgagcctccgcccattgtccttttactatcttacaaaaacctctgagcctcgcaccccatccgaactccgtcgcggcgcccaattggttgcccatcagcggattaagcatcccaatttgggtggccatctgttgcatgcggcgcatctggcgctccttctccgtgtccgccagcttcaccgtcagcgcgccggaagcgccgcgcattgtttggctgccgtgcagtgtgaggatggcacgctgcgcctcatgcgcctggccgaacttgacgaaggcacagccctggaaaggtgtgggaacttagtgaccaagtttcaagactctcgaccgggatgaggtgacctcgtttcgagagtgcttgatcgggctttaagttttattgagttctttgttcgccgtaccatgaatttgatcaacggaatacggttctgatcaaaaactgagcaaaaaggcacccaagtcctgaacatggaccggaaaagaagcattggcgatctcgatcgagcttttgctaggctttttctgcccaggtgtttttgaatttttcaatggttttctgtctggcgtgctcataatctcgtggcaccgctcatcatatcgtcaaagcgacaccgacctttgatgcaccgtccgcggcgcgcagtacagtgatctcctcaatgtggccaaacggttggaacattgcgcgcacgtcctcctccccgtactgcttggacagcatgccaacctttgaaatgaagcaattaaacaattattgcattgcccaccctttttataggggacattttcagagagctgaggctattgtaagagttttacaaggacgtccttgttaatcataagaattcttgcttgagggaaagtaagttatcaatttgttcgctcatgtggcaacggaaatgtccttcctttcaaggacaaatttaatctaaaccggaggctaacggtttatcaaggacgcctttgtaaatcattaaaatcctttcttttcaataagatcaactttaaatgaagcgctaattaatgggaatgcaaatatcattgatttcaaggacaaatttcaatggtaaagcgaatgctaacaattagcagtcaaggacaaaaaaactcacaaacaatttcctgtcctcatgctttggcgagctgcttctgctgtccgtgtccgccggcttcacctgcatggcccggttcatctgagaagggtggcgggaaaacgcatttaattcggctcaattaacggggagagtggagggtgttcatgacagttctcatactcgtagttttttttaatccgaaattattttttcttataaatgccatgaaaaatttgaaacaagtatttaaatgccaaaaacttgacgataattttattttttcaaaaaacaatttccctcgtttacccccggaagcgttttccgatcgtgtagtgccgcctggcatttcagcgcactttcccgatggcaataggtcagaaaggcacagccctaaacagaaaatgtgatatggctattggcacattaccggctacagtaacacttgttggattttttagttaccgtataccttgttcagtgaaaagaattcttgttggactacaataagaaaaaggcggagtggaaaaaaaaatgtcgaccttgtgcaccccggtggttttgtccttgagtatgctgaactcgtagattttgccgtacgcttcgaacacgtgcctgagatccctttcttccagatttcttgggatctgcaaaagtggctttgttttttttttgatgggtttatcccaattttttggatggaatcactcattttgcaaatgacattcgataatttcaattttgtttttgtgaaaaactaaaattttcaaaatttcccgctaattcttacccttagaatattttaaaaatttttcgctggatactatatattttttgtatgtatttggcttttttccgtaaatttagttaaatttttttaataaaatttaaatttgaaccctgctggagagtctttaaatttacatttttcttttttgaaattttcatataaaaatcgcaagcctttcttctttggtctccttttttaaacttctgccatgctatttttgactttaatatggcccacaattttgccaaatttttgtttcacgtccgtccatcactttttattcattttcataaatcaaaaaattcttccctctgtcatttcatgcgtttttttaaccctcaagaccttagaaaccataatcacccatcatttacccctctaattactgcggcaaagtttcgcgcataaatttacacccaacacaaacaaggatggcaccacaaaaacaaccacctgtccaacaaacagtttgatggcatccgggtctttgaccgggaacccgttgctgtccgtcgatgaacaccgttgttgttgtacttgttgctgttgtgacgttgtggcggcgcgtgccgtgccattctcggccgccccatttctcgtgccattgttgctcataattagtcgtggcccaatttctgtcggcatttgactgctgctacattcgataagaatggcgccgccggcactattattcttgttgtcatgccgttgttgttgtaccatttttctcgttcttcttcattccctcgggggaattgtgtgaaaagtgtgtcttttgtttgacaagtagtcgtcgagactctcgacggacggatgccacaaaaaaatatatcaaaaatattattttgccagccaaacaatgatgaatgtttcgtccctcatgcaaaagttaaaagcatcaaggaaatgtgtccgggagcgggggtatggcgagtgagaaattcttgtgccaatgcttctcggccaatcccgcccacgcggggcactacttgtgccacaaatcgatggcacacactcacacagacagtgccagagtgatggatggcgttgaagcggaatgaatggaaataatgagggtttggccagtgccgcggcgcgggtcggtcgggactgcgagacggtaaccatgtgccgagggacagagggataaagacacacaatgattgagtgacagacagacagacagtcggctggtctggcttcatcattctcgccactctcgacctactctaatcccctcagcagggctcatgcatttgggtagatgaagcctctcccgtgcccttttctctgcccccgttgcgccccagggagagcacagtctatgcttttggcctcatcatcatcatggatggcttcttcttggatggggagagggagcattcgcttttctgcccctcgggggctccgtgcaattgggaggggtagggataaagccttagactttttttttctctcgggtcgatgttggctaaaactccgactcagccgaagttttctttgttggtcaaacctctaacaattttggcaacattcaaaaactcgaaatgtttaaaagaaattttcaaaatgctaatgctaagcaattaaatggctcacagaaaagtcacaatttttggtgtttttttcataatttttgtgaactttttttaatttggcattcttttataattattaattactaagaaaattgcctgtaattagcttttgaatgttcccatgtttgttgggttaagttaacaactttacagttatattgactcaaatggttcatgtcagacgaagttggcccgctccgtctcccccacccccccccccctctcctgtcaaagtgccaaaaattaaattgtgccgaatcagcttcattttgaaaaaggcaaatttgtttgtgccaaaccagtttgggcgatagagataatggaggacgaaaggggtgaaaccggtcggtccattgccgactttcacaagcagtatttttttttgtacatttggtaaataaaatttttgttttttggccattttctccaagtcgccggtctcatttttgaatagcttaaaaaatcctacaacatcaagaactggtgccaccaatgggaaagagtaaaatctggcattctcaagctccctcatcccccgccgtcggctctcctctcggttcatatgccatcgaagaggctctctttaagaagccagcagagcaaatcctcactgccgtcgctatcttcgtacccccaggggttttgtgtgtgcttgatgaaatcgcccctaccccccccccctccctccctcttcagtccgtgcctcgttttgtttttacatgttccaccaccaccaccatggcacccgccccgccgtgcccggctcaagcaagcagaagtggcagctggtggaggtcgcgctaatcgttgtgctccatctcctctcttctcatccgccgaatgtgatgtgtgtgtgtgtgtgtgtgtgtcccatcaatttgcgtgcgccagacgaggcttaaaagctgctactccctgccgtcccccttcccgccccctctcccaattcaaccgtttctccgttttcttcgtcgagtcgtgtgccaattttggcgaggagagaggcgggagacagtggccctaccccgcctggggcgcggacacctaagaaggagagagagagagagagagagagagggagaaaagagaagagaaaaaagaagagaaagagagactgagtgagagagggagaaaagagaagagaaaaaagaagagagagagagagtgtgttgaggaaacgagtgaaaatgctaattgcatggaattgggtggcgaattgtgaaaggattgagaggacaaaatgctgccatcaatggaaatgaacgaatgaatgcttctgccatggatgatggaagagggtgggcagaaacaaggatagaataatggcttaaattggttggtaatttgctgctggtaagggcgattcttggacaatgaagcaaaacaaacaaaaaaacaaaattttgaaattttatacattattttgaattataaaaaaaatccgttctgatttttgtgaggaattcataaatttcggag

SEQ ID NO: 5756 - DNA, 1748 bp, Heterodera glycines
  unsure (1)..(1748): unsure at all n locations
gaaaatgtttgtagaatttttgtgtccatttgatacaantttggattantataaatttgggcataatgttttttatttatttaaaactttttaaaaagctttaccaaagctaaagcttaagcttcattaaaagcaattaactccacattttttccctttaaaagctctgttttaacattcaaaattttttacccattttagcccagtatttcaacaatttattcatttcactttcaatgacaatgaaccgacttttgtccggccgttctctgctccccaaaatcatgcgaaatttttcacacagcaatcgcctcgccgcctccgaggcggacccggaacattacggctatttcccggacccaaccgaacagacgtggggcctggagagggaaatgcttgctgcccgcctgaagggcgaagatgtgggagaaaaatttcgatttttttttgaaagtttttttgaaattttagcgctactcacccaaaatttattaccgcgctgaacattcgaccaaggatgtcccaaatgtggtgcatgtccatttggaggacaaagtcgtcggatgcctttgtgtgtgaaagttacaaatttttgcgctacgttaaaagtgggggattttgaattttattaaaaaacaggggggggggctttttctcggagacttttggggtccctgatcatgaattttacatctattttgatcagtttctaatccctaactcgaaattgaacaaaagttgaaaatccgattcgtgattagtagagctcggcctggacctggatttttcctgggtccaggtccgggtccaggtcatttttcgtcaacctggatttttcctggacctggatttttgtccaggaaatccaggtccaggcttttttcaaaataccgagctctagtgattagggattccaaaaagctccgagaaaaagttttaaattttaggcgaacacgacggagaccatgtgaattattggcacatcagaaaaggcgacacaaagcgatgcgagtgcggacattggtaagcgaagagagtggtgggaaatcaaatgaaattctgaattttggatttgggccctaatttttctcgtaaatttttgcccaaaatttggtccgtcgccaagaaaaattaaaaaattagactgacaaaaaaaatgggctggaagagctaaaaaagctcttaggacaaaatttggggccgctaggcgccgccgtaaaaaatttgttttgaaaattttaggcatttggcaagggttgggcattttgtaatattttctcatattttcatttaaaatgcagcggtttcgctgaacatttaagcatattttaatgaagaaaactattgtttgagtaatttttcgtaaaattttaaaaatttaaactgaaaaaagttttttcggttttatggttctgggttcgtaatttactagaatgaatttcatattcatgataagcgacccctaaaatcctttgaaaattttcatacatttttttttatttccgaaaaatgggtgggggcggtaagggggtgacaaccaaatttccaacttttcacaggttcaaaggcgtgcaagcagacaccgacagtttcgactgaatgcggtggacaccgatttctcgctttgaagaggataggaaattgttttggttgattaaatctttattttttgttttgttttttcgttttcaataaaatgtatattatacaaatgagacattgtctggtcgatagtatgtcaaacggtg

SEQ ID NO: 5757 - DNA, 253 bp, Heterodera glycines
tttttgtttctaaaatcgattaaaacaagcaagaactatctagaaaccatggcaactccagaaaataatcattctacacagattcgaacataaagttcgactttttgttcgaattcgggtacggtgttcaaaataagtcgaaattgatgccggattcatgatcagagaccctggaatggaagcatgttttcatgacttatgaaaacaaaaaaattttcatcaaaaaaggggggcaaccatcggcagtattacc

SEQ ID NO: 5758 - DNA, 808 bp, Heterodera glycines
aaatactttcggcatttgtagaaaattcgagctggtgcgaccaatgcagaaagaagtgttggaattcctgataatttaggggaaaaaacacgctcgctatacgatggcggttcgcgcctccctttccaagtccctttcctccctttccgcgtccggacatttttgcagattggttgtttgactgtagagaattaaatgagcaaaagaagaagagtgaggaatagaatgaatgtgggcgctatttatgctaaaaaaaaatggcggctaaaatgtgcaggcacgcggagactcctttcgtgttgaaaaaaatccatttcaaaaagtgacgccgtcttactttccctctcacacactctctctcgtccatttctctctgctcccacaaggggtttgcattgtctgcctatgggatgggcgttccctccacattgtctacataaaagggctcacagtcgccccattccgcactttcattcgaaagcaagcggatcgattcacccagagcgttctcttcagcaaaaccttcacttttctccatattttgttaacaaaatgccaccaaaaccatccggcaagggagcgaagaaggcagtcaagtcgaccaaggcggtgcgcacgggagacaagaagcggagaaaggcccgcaaggagtcttactcggtaggtttttttctgcattttcagggatttttcaggagggttggaaatttttttcgaaaaaaaaaaccaaaaacggactttggctagcaaatcctctaaaattcaaatgattttaatttgcttattcaaagcaaaatgcaattcttaa

SEQ ID NO: 5759 - DNA, 3868 bp, Heterodera glycines
cgttcgacgtgggacaacaggaagactctccactccgatacattcagggtgacggtttcgaattacgggaatggggaggtcgacccggcgttcttcgtctacaagaacgatttcgggtgagtttttcaaaaaaaaaaatatttgcatcactaataaatcaatatttaggccaacgcgggattcgaaagtggtgacgagggagaagcataaaacgtacaggccggtctcgccagaaggggatcatcgatgaggagcttaacgtgatcgccatttggattttgttaattttgtattttattgttgttttttttttgttaaataaagttgaattaaaattaaagtgatataggactagcgggggtggaacggtctaacgtgaaggcccactccggttagccgtaatattttataaaaaatccagcagttcaaggggaaaatagcatctatgaccgttattctggtacatagttatacatgggagttgagggaattgtagcttgacacggtgtctcgagtagagatgctgttcgacagtaacccctagaaaacctcggtaggcaaaaagcctattagaaccgttaaatgcaatgtcatccggtgagataaactgattgtgcctaaggtgtctcgttataagggcgtgtcttctcaaaaatttcaaattttgtttctttcgctggcgtagaatttcagatagctcgtgaggttcgcattcgttaaaatcgcatagaatttcaatgagagaattcattttgagcaccagtaggcattctcatattcgttgaaaatccttatataccgttacctcaccgccgtatgatgaatttttaccttttctctttatttttaaaattctgagaactgaaatacagatgatgaccactaccaaatcgacaattgacaaaaaatatacccaaatatttgaacttgaaactttaattttctcaaattctttgaacacgacaaaattaaaaaattcactatctgtgtctgacacatatttgggaagtatctcgtttgaggcaaatcgatctttgtatattttcttctctttaattagataaatttgtccctcaattattagtaagtcggtaaatgatgatggcatagacccgatcggtttagtaataatttcggtttcattattgtgggtccataaattctcgattgatctaatgtcaatttcatctattcgatcgtcactgattacaaaaagtcgaccatcaatgtgatcaaatctaaggtccccaccgggaaaattcctaacaaccttttcttgactccctcttgttatcgaagtttcatttgtattttcgttttggaaaattaaataactatgatcgttgtaataaaaacacgctcggggctttaattgtcgaaaatcctggtaaagcttaacattagttggtccgctcttttctattgaattaatttcttggattgatacactccatcctgaaattgggttcctatttatagtacatagtctcgagcgatcgaatccgaactgtctttcattgaccgaaactctttgtcatagtgagatacttgtcgtcaaaaagttgtgcatcagaaagaatagtaaccctttctccactgagttgaccgactatcgttaggagaacaattaaattaaacattactgacaaattgcttaactaataaatcggccctcgggcgaaccttatatagaccgtcaatgacctcacaataagtgattccatagcatcgttgtgtcaagaaataaatgcaaaattgcccacatgcatctgagaattgatgttggacgatgcggtcgttaatgagaattcgtttgaataggttaagatatgaacttaaatcttcgttgggataatcgcccaatgaatcaaaatattctatttctgtcggcgaatttacaaaacaggcgacccagtgttcacctatcgtgcccacccggtcggtattcgccacaaaacagtacggaaaatgcctgtccttcaattttggcatcttgtcggaagcaaaaaccccgataaaatattttcgggttgtcggatgtttggatagaaatatttcaatctcatgagaattcatcatatgcttccgtcgctactgagcacacgattagcattaatagatagaatcgaatcaaattcccccagaactatcatctcatacccgccgtcctttataggctcattaaactgcaccttgatgctggtcgttccgtttcgaattaattcaaaaccgggggtgtcctctagagtagaggtcatcgggatgacgaagaaacaccacccgtttacaaatttttgtatattgatcgacattgttctttcaccgtcgtccatcccgagtcctgtatacatgtcaacaaatgctcgaatgtatttgtttctatcaaaattaagagaatagggtgacccggggaatatgtttccattcgcttcgacaccgatagagcgtatttttgcatgttcaaagacgaagggtgactctttaggatttccggtatacgcaccggttgaaacaaacccgacgattaaacgtctcggaacaatgctggtaaaaacattgtgtgagagatcagaagtgcctcgtgggatgaaaagactcctgatctcaatttttctcataggatatttggccgaggtggtttgtagctgattgcttattacgttatttaatgactgggtaatgtcgactgtttttacataaattctaatatcatgtatgttaatacgatatgtgtgcgggttcgctatgactgcatttcctgaaacatatggcggtgccataattagaaaatcatcggtgttacggtgtatgctaaaaatgacatccgagttattaagcaatagattgggctgacggccgagatcaaaattaagtttcaccattgtttcacattttgcaccatcagcaaaacgtgacgctctgtttttaaagccactgtttgtataatcatcctggtcgacatcgtcgacataatagcaggacgcttcacagagaccctttttgacatcttctgaaaatcccaattcattcatcatatatgccctaaacgcatagtaaatgccggaatcataagattcgacacctgaaattgacacctttaaggttttgacaaagctgtgcccaaaattttgaatgacaccgacgtgttggtcagcttcactgtccttggtaatcggaatccaattgcttttgtcttttctctcaattgaagttgacaaataaagaaaagttttattgagatcacaaaactgattatctgaaaaaagtctaaagatatacggtccagattgatttattgctgaaagagggagtaattcccgaatactggatttattaattgcaacgttcgtcggagggatgtcgaaaagtgaaaggcccccctcgagaccgtcctcactcgccgtgtcgattttcttgagagttgtcatttttaactttttgtattatttgttctatttatacctttagatgaaacttaactgatcaaatacccgttttcggttcttattagtgatcagggccttttttcctttaccacattgttgtaacttgtcggtaaggttagtcagcccctgtcttgaatgttccctgacggcatcccttaaatcacggccctgagcgatgtcactcagaactctctgccccgcggcgagcccctcatgtcctgcactcgaggcaatattcctcgcaataggggtcaagaaacgtgccacattaccgaggaaaccgaatccccgctggtacttgctcccgacaaaatattgtttctgtcctcttccatgttggggagtaaaaaaagatgaccaatcgaccgactcgggatcgaaaatacgtgtgtcatttttaaatatacttttcttaaatgtaa

SEQ ID NO: 5760 - DNA, 3618 bp, Heterodera glycines
attctttcgccgttcagcttagggggtggtggaatgaattgcccgtaaaatttgaagtcaatcggactagtggtgcgcgtgttttggtgcgcaagtctcgggggtgcgcgagggggcggggcgtcgggaaaacttcgctcaaaatggtgcctgaggcgaaattctttcgccgttcagcttaggggtgttggattgacgacctaatgtgccgtctgaacttctccaacgattcaaacgcccccccctgttctcacttcactgtgcacagcgacgcggtcccctcccatccgttagattcttatcttttgttcatctgcaactgtccgttctccaccaacccatcattttcatttccatttctccattttgtattgatttgttgtccgtttaatttatttgtcctgtccaatatttttatatttgttcattatttttgcttattataactcgctaacaaattaattaattaacaaagaaaagcaaacaaaaataaagaaaagaaaatcaatgaaagaaaagccatgaaaaataaaaagaaatttaaacgctaggaaaagataagcaggtgaaaaaagataggcaacgaaaagaaatgaaaaagatattttaagctaattaaagaaaagcagcgaaaaaagataagcaacgaaaagccaagcaaggaacgaaaagccatgaaaaaaacttttaagccaagaaaagaaaaaccaacgagagtattaaaaaaaagaaacgaaaagccaagcaatgaaaacgaaaagccatgaataataaaaaaaatttataagttaagaaaagaaaggccatgaaaaataaaaataattttaaaatcatgaaatgaaatgtcggcgaagattaaaaagaataggaaacgaaaagccatgaaaaagaaatttaaaagttaagaaaagaaaaactagcgagagtattaaaaaaataaacgaaaagccaagcaatgaaaaaagatttaaaagttaataaatgaaaagcatcgaactattaaaaagaaaataaaacgaaaagccaagcaatgaaaacgaaaagccatgaacaataaaaaaaaatttaaaagttaagaaaagaaaagtcatgaaaaataaaaataattttaaagtcaagaaatgaaatgtaggcgaatattaaaaagaataggaaacgaaaagccatgaaaaagaaatttaaaagttaagaaaagaaaaacagcacagttttaaaaagaaaacaaattaaacgaaaagccataaaaaagtaaaaataattttaaagctaacaaaagaaaaaaactgcagtattaaaaagaaaataaatgaaaagccttacaaaagaaaaagaaatttaaaagttaagaaatgaaacggaaaagccaagcaaagaaacgaaaagcaaacttttattccatacataattattaatatattgctttttttttacagcgaaaaaatttaaattgtactctattgttatggctgaacaacaacaacaaaatcttttggggtcaatgccaccttttggccaagtaataattaaataaaaataaataaatataataaataacttaaattgtttaaaggttgctcaattggtggaaccaatgctcgtaaacgcggcccaacagtattttgcggtgctttcttcttatttaacattattaaaatttaaaaattgccatttcagcagcctttctgtacggatggcacgcacaacattcaatttttgaatggatgtgtttcccagttgggtcagccattgccgtatgtttaatattaccaatcaatcgatattaaattgtgttgagttttttagcccgctgtgcctgatcgtcgtttcgattgagcaccgcgcttcacagcagacgccagctgggcctcttcccatgacgaactgtgtgctgcgcacgggtgacggccaccgcgttgaggccgcgggatggcaggcgcacgcgggtgccctggcggacttgtgtgttggcagcgcctactggttcaccaactgtgtggcccgtgccaggtaccagcgactcgactgctggtaccgcgttagcgtaggcggccccaacgcactggtgatgccgcacgtgtccacagcggtaagttttttttattatttttttattattataataataaaatcttttagccaatgttgagtgcgcatccgatgccgcctgttcagacgggggcgggggtattggaggtaatgggcgaataaaatattgataataaataaataaaaatgcatttcaggtcactgttcctgtgcagcttggaccaccaaggtcacgcgacaccgatgctggcgacatcgacatcaatgtaagaaaaaactttattaaactaaataattctttatttaaatataattcatgattttaggccaatgaagtcgttgagcggggccagacctcacgtgagcgactgcctcagcgacgtgccgcgcaacgggttggtttgcgggtccgattcaatttgtccccagaagtagaagagatcccgagaggggaaagacaaaaaccctatcccgcccgtaaaattaggttgcttcccaattttgacatttcacccattcacattgaaaaatcccttgactgcccaatttgcatgtgcccttttgtgattggggatggggccacttctcttcattgctttcatatttttcacacgggttgtattgttccttggcttaggatccaccgaatttgtccaacttgtaaatatttattgccatgaataaatttttgacttaattaaaggcagggagaccgattgaagaatgctttgtgattgagcggacaacggcaatgcgcaacgcgccacgtaacacccgaggcgaaatttgtgagctgcgctttctgccgctggaggatgctgagcggcctgaccttttgatggaggcgctaatccaacatctgctggatcgagtgctagagggtcagccgcgcccgtccctgattggcctgcaagtccacccgccgggctttgatcgcccttatgtcatccgtcttcgaccacctgagcagaacaacgctgcgacactggcggcagcgattgagcgactaaacgaacagtcggcagcgggcattgatttgttggcgggaaggacgatcaccaaagtgctggctgtgtggccccttgaagcaattcgcgcggacccacagagcggaggtgagctgtccgtttattaaatgatgaattgttatgacgaaaacgcaggcgcatgcgaccatgccgcggaacaccacgtctcgcataaagtgcagtcgctgatccgcgtcatcaaccctgacgacaggctttgcctggcgcgtgccgtgcttctgggtctgagagaccgagagacgagaatggccggtggcggtggccgtgcagcactttctgcgtacgcgattcgtcaagaccaacacggcgcggatgctgctgatctactgaccaatgccggcgtcgccctcaacaaacacacgtacacgcttgatgacgtacgacaacttcaacaatggctaaacaatcagcatggagtggggcaaattcggctcgtggtgttcgagaaagagcaggagtaccggatagtgttcaaaggcgatgggtatgttaattatttttagtggattagtcaatgatatat

SEQ ID NO: 5761 - DNA, 980 bp, Heterodera glycines
  unsure (1)..(980): unsure at all n locations
aatagtaaaaaccggtaattgccattaaggatggtttaatatattttcccgagactcttgagcattttttttaaaacacaaacacctccttccattagagcaaatctcgaagcttttgtgactgattttccaataccggcaaccattaaaaatagcggtttcaatttctggaccaaaatccaggaaaatccagatccaggaaaaatccagggtgccgaaaaatagcctggatcttgacctagatcaaggaaaaattcaggcctggatccaggtcgaggccgacctctaattaccaaggcattttgtaattaattaattttcccattttcagagtcaaattatggtcgttttccgcgaggacaaaacgtttgaggacgagctgaggacgtggatgttgtggcacaaacggcaacattcgcacaagcagcgaatcatcgaagtgagaacatttgggggaatttggaggggaaagtcagaaattacgaattaaaattgaagaaaaaaaaacaaaataaaatttaatttaataaaaaaacataaataaatcgagacaattaaactaatattaaaaatatttaaaatttattttcaattttttatggcaaaaatgctttttaaatgtaaaataaataaggaaaaattaaaaaaataataatgaaaaatcgaaattgataattaaaatattgtggattatggactcgaatatttaaatgtaaatctctaataatacaagataaaataaatgctttgtgaaattaaaattattaaactcaatattaaaatattttaaatttattttctattttttatgtcatattttttctttaaagattcgatttaaatgtaaaataaaataaagattcataaatttaaaagatcaaattttagaaacaaatgtttaaatttaaattccctaatattcgagtggttaaattaattatttttanaattaaatttaataattaaataattaatttggc

SEQ ID NO: 5762 - DNA, 1522 bp, Heterodera glycines
  unsure (1)..(1522): unsure at all n locations
cagttttctgttccatttttaaaacatttccaaaaaatgtttctccataaatggtaaaaaaaaaatctatgttattttattcatgtatcnncattggattcnaatgaaaatttgttggaattttttgaaaaattttccctaaaatttggtccttcaaaatcaagcaaaaaatgcttaacatttgatcgatcacagggcgcggaacggaaattgcgcgacgaagacaaacgggcggataagcgacgcaaaagcaacaacagcagttcagcagcaggtcaaaaaaaagagaaaaaagaatatttgagggcattttgccaaaaaaaaatgccaaaataattttgggtgccgaaaaattggttaaaaaaatgaaaattgttgttgtttgaaaaatgagtttggcataactttttgaaatgtttgagatgatgggaagaaacaaatttaatgagaaattattttaaatatattttaaatttagaaaaattaaaaatattttttctaatgaacattaaaatgagatattattaattatctgcgaaaggttatgcaaaactcaattaacaactaattaataagccaaattaaaaaggagtgaaaggggcctaatcaaatttaataaattaatttttgtaattttcgaaaaaataatttaaattttacgtaaaatccctaaaaattcgttttcaaaaatctgctgcttgcttttgctttttgcttcgctttttgtgccttccatcgcttgtcattttgtccatataatttgtccatttgtccatttctgcactttcttttttcatcgcttttttcgtttcattttgttttttttcatttttttatttataataatttaatttaattttaaaaatttaataaaattgctgtggccatttaaaaaacaaaattactgtagtcaaattggccaaaaacaaaggcatccttcccgtcccttttgttctcgacgccatttcccattgaatcgcgcgagagtctggcaaattcaaagtgtcccattttacgctacagtaatcattgatgcgattacagtaattttattatttattattttttcattattctttatcaaaaagtgttcgtatttgcgttttttatgtgccttgccttatttgcagcttttttcgccttttatagggtgccaatcgaaaaatgttgcacgaaaatcggcgggacgaacggcgccgtggcggcggcggtgagcaaccaatgaatttgattgatcatagtgatgttcgggatattttcatctcgaattgagatcggacaactggtacggatggatcctgatgaaatcccgatgaatttaaaaaattctcgggacggatcccgtatcagtcccgatgaatattaaaaaactcgagacggatttcgagttcgagatcccgaatctaatcccgcgtgatccaataaaattcaacggagtccaaatcccttcctatccctagtcttgaacatcactaattaattcatgcttatatgctttaaagcggcgctttatgtgtgctaa

SEQ ID NO: 5763 - DNA, 1750 bp, Heterodera glycines
tagacaaaatccttttctaactctacataattattcaaattctatattttttgattgatcagatcaaatctcaaatctataaccataaactgatcgtgatcaggccaccataaaaggacattttgatcattctctaaatattttgctgatcgatcagcgagagggtaggtggcccatgctctgatcacccaacttaactgaatcggagtgatccatacactgatcaccaactgatcagtggagcttccataagaggggagggaattccgatcaccccgactgactgactgtgatccgagcgatcactgtgccgaatgcattatccactttactctcctctgtacagcttgccctgatcaacagcactcatcaaccgacaattcagggggctccggcgccgggggcgcgaacggtggcgccggaggcggcggcggccgtaaaaagatggacggcgacttccacgagccggccgatcgctcccacttttaccacagtgcggacatggaacggccggcaccgctgttcgtgccgggcgacgatttcttcgacaccgcctccatcggctcgtacgatgcgctgtccgagctggagccgcagccgaagcggccaaggccatcggagcggagtcagttcatttaattgggggggggggggggctaattaggggagaaagagcagcaactcgcccccggggtcaatggcaacacatacaaatggcaacttgtattttacaaaacaaagcttaagcctaggcataacctaagcaattgtacgagttgccttttgtacaagttatcatgacacctctcgccccccccgtgccgtccctcccccgtcgcgaatttttttaaattgatttttgtctaaatttcttagagatgtttttctaatcgtatcgtatttttttaaaacaggtttctttcaatttaaataaaactaaaaaaatagcttttcaaaaaaaaatcatgcttttttgaaatttttactaaaaacctttttgaaattataaaattcaagaatttcaatttttatctttcgattcgagcgggtacagaccgggaatttcttctcaaaatagtaattttaaaattgggtctgctgatcacatcattcattgatcatccacatttcatcaattgatcaatgccttctcttccgtttagtaatgatttacgtccgaaagcagggcgaagagattttcacgccgcttcatttggtgccgccatcgcttgggtaaaatatttaaaaattaaaaaaaattgtttaaatttcaatgacattttttagagggttggcacgcgcagtcagcgaaaaatacaatttggacgagtcaaaaattgaggccttctacaaacagtgccaaaaaggattgaccgtcaaaattgatggtgggaaaatgactcattaaagcaattaattattaaattatattttgcaaatttaaatttttatcagaaaatttaaattattttttaatttaaattgattaattttaatcaaaaataaaaaacaaacttatgtattattttcagatgatatgctgcgccactacaccaaccaggacacttttcaaatcgagctgaagcagtccgagttggacaggtccgttgacaatgagactgggcctcgataactcaaatgatcacagtctgatcagtcagagccctcttttttctaaacctattgctttgatcagttaatttattccggagattaaagcatttaaaacaagcatatttacgccaactga

SEQ ID NO: 5764 - DNA, 3059 bp, Heterodera glycines
gcctcctcgtcctgctcgaactcgtcagtggcctcagctgctgaacatcagcaacagcagcaacttttgttgaacatcagcactaacagcaccagcggcggaggcgcggcgacgccgacaaataccgccgccaccgccggcagcggtggtcgctgcggcggcggcggtggcacaacagaacggcacaacgacacaacagcagcaacaacaacaactgcagaatcagaggacaccggtctggtgatggtgaacagcaacacagaggaggaggggacagtggaacagcagaggtgggaaaaatgccagtttgactgaaaaattggcatttgccgtttattttcggggccagtgccagatttagagacattaatttcggattttttattctaaagacagggaggatgccatatttttcttgcaaaagtggacattcgcgggatagtccatgccggatttctgggaacaagttgccgagtttttttttttgtttttggtttttggtttttgttttctcgacacgagactgattctttcggcattgagtccctccctcccatccatcgctgataaatggccctaacttttgattgtgccatttcggctatctttctgtctcctacttcaattggccccggtttatcccgccgggtcaatgccaaaacgtttaaaatttattttatttttttaatttggaaaactggcctagtctgacctaagtcttcaaaacccaatcttttttttttgttgtattgccatggcacagccccgccccgggctaataaatgccaccgaattggactgaatcattatttagcactaatttgtcaacgtgtcgcgggtttcgttctcattttcatcaaattccctggtgccctttcccaaccatttctttctttttttgtttgctcaccttcccctaattatttatttaatcgacattcgaatattccattacatcccattaataatttcagcagtcaaattgcattgggcgtcaaatgatcaaacgcacacaccgccgcccgccgccgcttttgccccgcgggggcggacgatgacgcaaagcgagcggcgagataaaaggggcaaacgcggcagagaaagaaagaacggaggaattaatcgcgataataagccccccccccgcccgttaaatcgttccggaatttaattattgtttataataggacgacccttcctccgcacctctctttctcccggtgttcgacattctcgacagcatttcagcgtcgagagttgatggaaatcccatcaagactcgcgagagaaattgagtccaattaaggggagatgtcaaaaatggggccgcaaatattggccaataaatcgaatcgagacctactggaatggttagcgaaaaagatgatgatccacatgtgatcgtcgagactctcgaacagaattaaattctaattaactccccaccttgcgaattcgtttttttttgtgtgtcggcgttgtgcaccctccgattaaaaaatgcgagaaatttctcgagtcaagtctcgagaccgggactggaaactcgagaattccaataaacaaagtcgagactgactctcgcccgctctctctgtccccctttgtccgtgccgtcgtttttatttgttgtttctgccttcctccactcatcagtcattcaaattccgtcccatttcattctttcaaatgcttctcctccctgtctttgaataatgaattaattaatttgcctaatgattcatccctaatttggctagttttccttgctattttattatatgacagtgtttctgctgttcagtttagtcattccccctttttctttctctcatttttcgttgtattattttgtcccctcaaaaaaaaattgtgcaacaaaaaattcattgaaaaaatttatttggaagtaaaaaataggaaaaatttccgatttttacaccccaaaaaaatttcacgcaaattctatttgatttgatatgttcagacagaattttgcccaatcaatttttggttgaattttcaattttaattttaacaaatacaaattaatttcaaaattttctccccaaatttttggttgggcaaaaaaataaaaaattgaaataaaaattaaacaaattattacaatttaaaaaattcccaataacatttcttctgtgataagtcggcaatcattatcattcattcgtttcatttgtcatttttttattctctcaaaaatatattttatattttattattcttttttttgcatttaacctccgaaatttctgtcattttcatgtaaataaaataaaataaaatttattttttcaatttttatttaaatgtgagaacggattaaacaaaatcactttgcatttgttggatttgccacttaataattattcaaatttaatatcgtaataattttcgtgaaaaattttgctttttcttttaaatttttctgcttttctaagtcttcaatgtctttcccatctttgaaatttaattgaaatttcggcacttttttactcttagatcccacgaagtttatatgagctttagggatcactgaccatgaatccggcactaattttgaccaatccctaatccaaactagaaaaaagtcaaaaaattaaattttatgaatttggttcgagggcacacaaaaatatttttcgttggggcctaaagtaaaaagtgccaaattttctctattttttttaagttccgataattttttaaagccatggaaaatgaaaggaatggaaatggcggtgccgttttggtcaccggcgcggccggcttcatcggctcccacaccattttggagctgttggatgccggatttgacgtggtggcggtggacaatttttccaactcaattcccggtgatttaaatataaaaattaattaaaataattgaagttaaaattaatttttaattattttcagatgccaaaaacaatgcgctaagtttgcaaagggtcagtgagctgagcggtggcaaaagcataaggcaagtgaatggcaatttgcttatttaatttcaatttctgctaatttatttacca

SEQ ID NO: 5765 - DNA, 2236 bp, Heterodera glycines
atccattttcagaggaatccgtggccaaaccaattgattactacacaaataacattgttggctcgctgaacctgatcaaggtacagtactaccatatattaactgtcattattttgttggttactgtattcttttacgccgtttcgttttttgtcccatttcttttttagaacagaaaacggtgagaaaatttcaaattttgcatttaaaattatttttaatcttttgatttatatttgttttttctcgatttcccaattctacttgtaggtttcggaaataaaatttaaaatttttaaatttgtttaaattaatttattaatatatttatttaattaataattatatttaaaaataaaattttaacaatttttggtagaaattcagaaataattttaaatatttattaaaattaaaataaaagtcactttaaggatgtctagattttattagtaaaaatttagttttttttataattattctttttttgttttaatcgccaaaaacactgtctaaaattctcttttcccccccccctattttcagtgctgcaaaaagttcggcgtcaagcagttcatcttctccagcagtgccaccgtttacggccaacccgagcatttgccgttgacggagacgggccgagtgggcgtcggcatcaccaacccatacggacagtccaagcacatggtggagcaaattctgatggacttgaagcgggcggaacaggtcaatttttggggaatgatcagagagttcatttgtgcgactgaccaatcattttgtttgactcgttcattatggtgaaacgtgggactgatcaatgcttcttatggacctaatagacgcatttgttgttgatcaatttgtggtttgatcagtgcttttttgtgtcttatcggttcatcatttgtgcgttgatcagtgcattttactgaatctgatcaaactgtggttctaatcaatgcatttattggcctgatctctgatcagtgaattttatctctgaccaatggaattgtggcctaatctgtgtatttcttctgtctgatcagcactttttgatggtctaatctaagtgtctaatcaatgcatttgttgatcggatcaaaggatttgtggattgatcaattctttttgtgtcataataattcatttgtttgtggatttgatcattttgatcacttcattgactttcaacaggactggcaaatctccattctgcgctatttcaaccccgtgggcgcccatccgagcggacgcattggcgaagacccgcagggcatcccgaataatttggtgggggcgggacaaaaaataattgcggataaaaattggaaaaccattttgtcacagatgccatacattgccaatgtggccatcggcaaactgccccacctgaacatttatggcaccaaatacgacacgccggacggcaccggagtgcgggactacattcacattgtggacctggccaaagtgccgtggggggtgttggaaattggcacgatttgttggcacactttttgggggaaataatgcatggataaagggtggggggagcggagcaggtccttcccctgaaaaattaaaaaacctaactgaaatttttcaaaaaagcatagaaattttaaagaaaatttcaagcaaaaaaatcagcgtttttaaagtttcatgatgaatttatttataaatttttttaaaaaatcgttgaaaaatttttaaaaacactttctccaaattttctcgtaaaaatttttcatgatttttttgaaaattttcaagcaaaattgcgttttttttgggggggggggaaatttggacagcagatcagatctctgggcggattttcccgatcagaaatccgctggatttaattgggtaaataagtttttcaggcccacgtggcggcgcttgtccaccttggcaagcacacaccctcagcagcggatggcaaggagttgtgcgaggtgtacaacttgggcaccggcaaaggccattccgtgcgcgaaatggtcgccggctttgagagggcggccggcaaaacggtgggagagaaaactcgtggaaatttatttcaacggaacaatataataaatgaacgtcgtaattaagacaatccttaattgaccccagcccttagggggaatacggtatgtttgaaggagtttcggtaatacgaccgatggtaccacaccttttttgaatttttttttacaaaatttatgaagtcgtaaca

SEQ ID NO: 5766 - DNA, 6471 bp, Heterodera glycines
  unsure (1)..(6471): unsure at all n locations
cccaatgaaacttttctcncaaaacaaagacgcggaaaaaatttcnaaaaatatgccaccttctgaaaatgaaaaagaaaccagccaaaagaaaattaattctgttttgacaaaatgcatcttttcagaaaatgtcgccccggcgaaattggcactcagcgcacactgctcaggcattgagcaacattcaaattgttcttgcattttgctggaagaagtgtttccgaacttgccggccatggaccctcttcgacgcgtccaattgtcatcacttggagaattaatcccaatttcaatcgccaaacagaaagggattttgctgggccatattcgcagttgggccaatttggatgaagaatcagcttcactcctttgccacattccaaatttcagtcccgacattcaaaatttcattcctccaattttaatgtgggtggaccgttgtgccgtcgcatttcaaaccctcaaaaatacgggaatgaaagttgtacagcaagagatttgctcaaaaaatccgctccaccggttcggggagttgatcagcgaagcattcgaagaagtgaaggcaaaaaatataatcggcttttcatcaatggaatccgaaaaattccttttttacggcgactcatcggttcgagagtttgctagtaaaatggaaacaaaaaccatcatttttaaaaacacactggaaatggccgaagcattcaaaaatacttattttacgactaaagtccaagaaattctgatcctgatcggaaatgacgatttggaccaaggccttgtgttaaatgatgtcgaagaggccattcgcaaaataattgttcatgcaaataaattctcaatcaaaactattttcattccacctccttttcactattcaaaaagaattttgcatggaaaattgataaatttgttggccaaaatgttgccaaacgatggaaaaattgtgttggcaatgaaaagaggcaaacggagtttggcagaggtaacccggttcgggaacctcgaaaatcgccgaacagtgaatgaaaatggcaagttgaaaccgcctggcattcattttacaatcagttttttaactgatgtgttttggatgaccacgccggtgaaaatgtcgtcagaatcagggagttcaggaattcgaaccccagccacttccaattcgcgtgctccgagtttgctcaatgtgcaaattccaccgccaatcattcctcatccccgtcaagagcaaaatgcttacaggcgtttcaatcgtggtcgaggaagcggccaaaatttccaaaatcggggggcttaccgcaattaccattggcaaaatcatggggattatccccctccccctaaacgtggaaggttctgaacggatcgtcattaccttaattgtgccggataaattttatttttgattgtatttccctgcctcagacctacttataaatgacctcattattgtttcattttgttgtttatttatttgttttttttctcatttaataaattttcatcgcttaaaacattcgtccaaaaagagtagtccctcctatccaccccttcccctttatttcatttcagctctcgcctcttcgcttcatcaaatccgctgtttgagcgccgacgtcaaaactcgcaggcgctcgtctttcgctgatccgggggaggtgcgcggcgatcagaccgtgaggacactggtcttcatacggcgggggacgtaggataaataatgatttatccttattttattgttttttgcaacgattgtttttcgcgttaatttaaaatattttgatccttcatttaattttcctttttatttttgtcttcgtgttctctcaagtttatatatattttgtgcttttgaattatttaataaaactacaaaaatttggtgcttttccccgtggactttcattcagcaacaacaaacgcccaaaggcttaattggtactgttgtctgagttcctaattgcaatttcccttattctctaattccttgtcagtaaagtggtgttgaaaattaagtaaatctttccttgaccccagaatctcaacccaaaccccagcaaatcccaaagtccctccccgaaaatacgccgtctttctccaacggagagagaacattggcaacggacgccgtcccctccccccccccccccccccgcgcttcgctaatccccctcccccagcaacaaaaatgcaaaagaaaaagttttgtaaaaaatacaaaaataaaaatagccctaaacccttgggtttaatttttagcgttcaaataaaagcggggaaaaatttccccgcttttaaaagaaaattttcgaaaaatacagtaacccaaaaaaaatgcgggaaaatttcgcgcactgtccccaggcctcggacagcccccggttcactgctaaaacacgtgttttcacacccccctaaaggtgtgaaaacatgtgttttcacaccggtcagtggatgggtaccgtgtgataactactcataagagaagaactcgaactttttgtttcatatatggaaaaacaatggctaactaaaaacgaacccgcgaatatctggaattttaatagactttcacggaccaggtcaacaaaccctgccgaggcatggcattctttgatcaaaaagttagtattatttcatatttgtataaaaataccctttagggaaccaacgagtatgcgacatgcatcagttacaaattttttgtatttttttcaaagtattatgtcagaaactgatgacagaattaataaaatcaatatgggaaaaatacgagcgcgggggagagatcaattttacgctaaattagatgaccaaattacagaaaccatagatgaatacgaagtaaaattattttataaattgaataatattttcctgattaagggaattctcgaaacaaaatttcatacggacgaggattttaaacaagtttcaaatcattatttaagtaaaatttcatatttgctccttgaaatgaattcaaaaggaacagcaacaaaaaaggaggaaaaaataagggaggtagagcaaaagtactgttatgaatatttttttaaattaagagaaaacgtaaatttgcgagttctgcgtgtagttctaatgaagaagcttcggactagcttgtagtaattgaaagttggataaccaaaatacctaacaaatctgaatcactggaaataatatcgaatttgcctgaacaagtgccagagtcaaaacttttattttttaacccaattgcagtggaagaccaacaagaaatttgcagacaatgggagcttcgttttggtataatttaacttattatttatttaattcctaatgttatagtccgtccttcttattcctttggaattcaaagggaattttttgatttggagactggtccaggtgtttttaaggttatttcttaaacaaattaattttaaggacgtatgataaatgttgaagctgatggaaattgtttttataattcattatcagttttacttaccgggactgagttaaaagaaaatgctaggatcatacgacgaattattacacagttcattgactctgaggttgagcttcatgaccttggaattccttggcatggatggtgggaaatgttacatcccggtcaaactatttgattcaaatgggaatgaggtagtctattttttaaaccgatacattattcattttatagataattagtatacgtacctatgcacaaaatcatatggaaccggcgaattctgcggcggaaatacataaatgggggagtaatgttgattttctcgcagcagccaaactgttcaatataaatgtaattgtctgtagcccaaaccctcagagaaaaaaagactctgggattcaatatgtttggtctgtgtacacacccgatatgctagatacggtattatccattaaattaagttcataacttttgagccaatttagatgctaactgaccaagcaagagaatataaatcaatctttatttacttcgaagggggacattttcaagcgatcatagacccaaatagattgaattaagtgctttattatatttattagtgatttactttaattaaattaattataaatagttttatttatttaatttgctgaataatatttttaaaaaaattaattataaatagttttattaatttaatttgctgaataatatttttaaataaattaattatcagatttttatttatttagtttagttgataatatttttaaattaattaattaattaaaataagcctttttacttttaattatgcgttaaattcttcatttgctttgcttgtttgcagtggcttgtgtgtatacggttaagggtcgaaacacatattaattttttaaatttaacaaacagagacaccgtactgatgaggcccggtctcttttgttagatatttgcggttttcgcgaaatagccatttttgcgggtttcgcgcaacgccctttttgtgacgtaatcatttttgcgggtttcgcgcaacgacgcggcaccataacaattacaactccatttttgcaacaatcagtgaatagtcaattatcggggaaagaaatcaatataacattaaatggaaaaatatttttttttgctactcaccaatctttttttaatgaaattcatattgtacaaaacaattaataattaataaataaatgaaaaagatttcttcagattatttgatataaaataattaataatgataaactacctaatttaattttttaactttttatgatttatttcattttactattttaggtgaaaaaatctccgattagctcaccttaaatgcttgcttatatatttttagccattttttgtgcgaattttatacaaatttttggggtggaagaaaacgacggagatttatttgatgaattatggcaattagcaaaattggaaaaattaaattcagaaaaaaatcatcgccaaaaattgggggaaaacaaaataaaaattgaacaaaatgatgatgacaaaaatgtggcggaatgttcacagaaatgttttaaagaggaaataaaaaagaaaaaaatatttgacagtgaaaaagagaagaaaaaatttatggatggaattccaaaaaattggcaaaaaacgacgattaaaaaagaagaaccaattaaaatggagaagaaggaagaggaattcgatgaaagcgaaaacagacgcaaaatgatgatgataattagtgaatttgataacagaagaaaagagcaaagattgaaaaagggatataaacgtgaaaatcggcaccaaattgagcacaaaattgccaaggaattgggcacatatcgcaacaaaatttacaaatggaaaaaggaaattggaggcaacaaacaggaaagaaaagtggaaaaggaagaagagaaaattgggataattgaacaatttgaaagaatgagaaaagaatgtaaagaaagaaaagaatataaaatggaagagcgtacaaaaattgaggtaaaaattgccaacgaattgggcacaaatcggcacaaaatttttgcgtggaaaaaacaaataaatgccaacaaaaagaaacgaattgaggaaacggaggaagagaaaataagcaaaattagccaatttgatcaaatgaaaaaggaaaaacacagaaaaacaagtgattataaagagagaaacaaaattgaagatgaaattgccacggcattggacacaaatcggagcagaatttacaagtggaagaagcaaattggtggcaacaaaaagaaacgaattgaggaggaaaaggaagaagagaaaatgggaatttgcaagtggaagaaggaattgtgtaagtttgaaaatgaataaaacctatacatatttggaaattttggcttaatttattagtagggctgggaatttaagtcattaaaaatagccaaaaagtcacaaaaaagtcataaaaaaggcagcaaaaaaaatcatgaaaaaatgaaaaaagtcatgaaaaaatagccaaaaagtcacaaaaaagcacgtaaaaaatgcaaaaagtcctgaataattaggcgaaagttaaaaaaatcccattttgaatagtttatagaataatattttgatcgtatttttaggcacttaattttataaataggtacccaaaataggcataaaaaagagattcttccatcaattaagaaaaaattcatcctggtttaattgcctttttatcgatcgaaattttatttttcggaattttctttttatttttcggcattttcttcgctaaaattcaaatttttgcctcaaaaagtcaaaaaaatcacgaaaaaaatcaaaaaagtcataaaaatcccaaaaagtgtaaaaaagttttaaaaaagtcacaaaaaatggatgttagaggcttcagacaaagtttagaaccctttttaagtcattttaaggccatttagagtcagcaaaaaaaaaagtcatttgacttaaattcccagccctatttatta

SEQ ID NO: 5767 - DNA, 1350 bp, Heterodera glycines
tttatcatttcagaattttacgctgggcaatttgaaaaactgtaacatcacagaacagttggacaagtcaaagataaaggaattcaacattggcattcacgtcatggacaatgccggcaaatacaatgtgacatttgacacgggtggcaaagtgacagagtgccattacgaaaatccggaaatgccaccatggacagtgcaatacatcgcggtaggaaattctgaatcaattatgcccctaattaatggccaataggcatgactcttctgcgctaattagcgtcacaaattaattaattatgaagccctaaaattataagcattaccatattaattaaaccaacattaatgttatgaaaatgaaatttgtcgttaattaacgagaattagtaagatttcctttttttaattgtatttagttatatgctttttaataatgattaatgcatgttaatcaaaatttttcacagtaaaattgtttttttcaatatctcaatataaattacataattttttttatgtcttttaatgttcaatcgcatttttttataattttcttaaattttaggttatacttaaaaatgaccctcagcagttaattaagccggaaatcagttgtattccgcaaaatcgttgcatgaaaatgaaagaagttgatgacctattagagaaacaaacaaatgggatgaaaaagaagctttagccattggcataatgccaagaatttttattcaaattgaattttcattaattcactaattaattcataaaattttttaatgaaaatgtgtaatataaagtacaaagcctattgtaatacagtatgaaattcctatgaataaggctaacctaaaaaacattaaagaatgtttagcttaataaaaatattattttaattttttattaaaatttggcacagtgtcaaaagccaactttggcctagcctatgcctaaagaataggacacaaaaaaaattagttttccttagctgacttttaataaaaaaagtacaatttcaattcgataaaaacttttgaaaacgcgtaaaaaatgaatgcattttaagcaattttaaaacaaaaggagtaaaaactgctgagtttgttctcacccaatgcaattaattgccgacaatttatttagtatgaaataacaacatcgtttagcaaaaaaaaaagataaaattaaaggttttaacaaaaaatgactatgcgaatgagaatactaaaatatataccagaaaatgtttattaactacataatgaatatttgttttgtaatcaaaaatcagtataaaatataatgaaaagataaatatttaaattgtcgttaaatcttataaatttaaaa

SEQ ID NO: 5768 - DNA, 1911 bp, Heterodera glycines
ttcggcgcggccagttcgacgcggccacttcgggcgcccctatataaaatgactttttcggcgccgaaaaaattttcaaaatctggagcaaaccatatcaaaagcaaaaaatttcctgctgaaaactacctacacactaattttgagaaaaagtaaaaaaaaaaatgttgcattgttgtttacaatcgaatacctggtcagtttggaacttttaagtccaatccaatataaatattcgaaatttgaatccggggttctgagttaggcaaacctatggtcagattgtaatcagcaccctcgaaacccccgattggtgattttgaaccaaaatataaaagttaattagggaccacaattatgcaccattgctcagagtacaaccgctatgccgaaagtgtgcttccaagcaagcccactgacttcacgctggcgcagacgatcgacaagctcaaggccatgttttgtgcaacaaaatccattttcacccgtcgattagaatgttttcagctcacaaaatcaatttcacaatccccattagatttcgccagccaggtcaacgcaatgtgcgagcgatcacaaatggatctgaccaaggacgaaatcaaagcaatgatcttccttacaggactttcggacactgatcaagagctccgagagcgttgtttgcgacttttggaggaagcgaagaagaagacaccgccggaagcaatctcatacgagaagctcacagaagagtaccgcccgtttctctctcttcgcaacacttccaacgcattggcacattcaactcatgtggccaattcggtcactataaaaccccaaaaattaagggatcataaacagcgaaagcgggatgggtcgcgaagctcgtcaaagacgacgtccaccaccagcaacaatcaacgatcatcccaatttcagcgcaaaccgcaacaaccaccgtcgccatgccgtttctgcaatcaaatgcactgggtcagcgactgtccaaaggcaccgatctgctcaaactgcaatcgtcgtggccaccatcattcaaaatgccgtctgccatcgccatcatccaaatccaattcacagcgcaaccatgcaacaaaagtgacgcatttgattggtatgtctacgcacaacggcgtttaagattggaacgtgcaccttccaaaccacacctgcgccttcaacaactttaccctgcaaccacatgcttttgttgtaccgatagttgagtatcagcacgttgtctccaatcgcgaaagtcgacggtgaacttctttttgtcaattgaactgttttggcatgttgtcgttgctgtgtttggtgttgtttgctgggtgtgaaaagttgttgagagtggtggcaatgggatgttgaagtgccgcttcgaacgccctgatccatggaagaccaaacaaattcattgccccttttggtgcgacatgacactctaattgaagtgtgactccttggaatgtgattgagcaaatgaaatacccggagatttcgaaaaagtgccccgaatatgatttggtctttgaaatgccctttttgagtttggggctgcctaactgttcccataatgcttgctgaatgacggccaaacgtgatccagagtcggccatcagtgatgccttggtgccattgagttgacagtcgaccatgatccaatccgaatttcgccacgatttcccaaattttatttgaagggtagggttagcaaccggaaaatttttggaatttttgatcgattttttttaatttgcatctttggcagactccgatggtcactttggaatcgcatcgcgagcccgtgatcggctgcgcgtggcatccgtccaactcgggccaggcgatcactgcttcatgggaccatcagttgatgctttgggacctccaattggcaggtgatttttg

SEQ ID NO: 5769 - DNA, 4148 bp, Heterodera glycines
tttgatcttggcagtgttatttgtcgccatgattgagctagcagcaccaaaatcacgaaaaaatagagctttttgatgctgatagaattgttcggttgacgagtaattgacaccatccatttcaaaagaagcttggtaaaagtttgagaaagcataattttccattaaagttacacttatagttttttactcctaatcaacctctatataaaggcttaaaatatcgcagaatcttcactttcagaatccaaatttttttgtaatggcagcacaacggtcccaattacgccgtattatttccaataaaggaaaacagcaaatttacgaaaattgctttctttatctgtttgaggccaaaagcaaatccgatcacaatctctctttttgggcatgtactaaacgctatgatacttgtccagcacaaattcacatacggggagaacaaatcgttaaaagatatcacgaacacagccacgaacctgatccagcatcagcagaagtcaaagatttaaataattccatcaaaaagcgggctagggatacagttgaacttcctggtcaaattcgtgaccgtgttttacagggggctagccaagcgatcttaggtcaaatgcccacaaaaaattcaacacgaaaaatggttgaacgagcacggaacttagaaaaacgggtaccaccagatcccgaaaccattcaggcgttggaatttcgggaggaagaacaaacatacgagggagaaaactttcttttaattgatacagggcatgaagatccatctagagtggttgtgttcgggaaagaatctgtcttagaatgggcccaccttgtgaaaagcctttacgttgatgggactttcaaaatttgtcctcgtccttttcacaatggtcaagtttttatgattttaggcaaaagaaataggcatgtttttccaatgttttactgtcttcttcctagcaaacaaagggctacctatgacaaactttttactgaaataaaaaatttctgtccaaatttaaatccggattcagttgcccatgatttcgaaatcggtcttttccattccatccaagaaaattggccaaattctcagttgcatgggtgtttttttcatctcaatcattccatgaaaaaaaaaagtagcggaacacaatcttttgccacgttataaaaacgaccctcaaatcaaattaagttgcaaaatgatcgttgctttggcttttgtgcagttagaaaatcttgaaaatgcttttggggatttaagggacttttttgacaatgaatttcctggtctgaaccctctcttggattggtttgaaataaattatatgggacctttaaaccgcaatgggactcgacgtaggccgctttttccacgcgaaatgtggaatttatttgagagggttatgaataatgaggaccggacaaataattttagtgaggcggggcacaaacggattcacaaacaattgtctatggaccatccttcaatctggaaatttgttgacgggattaagaccatccaaaagggaaaagacgctgattacgaagcaatgattaggggggataatgcaccgaccaaacgtaaaaagtaccgacaaatagatgagcgaattttggagattgttcaaggggggaatgagcattggcacacaattttaatatggatcaataattgctgttttgcttttaagccactgggagcacctctttggaggtttattgtgccctttgggttggttctttttatttaaattttctttgctgcagtgctgcgattacacccttcgttttttttctttcggatcaagaattatttttatttcggtaatttcgctttttatttttcaaaaaaaaaaaggcgcactaaggtaccattaccaatcgcaggcctcctcgtggccgtgtgccggaaactcattaaccgttttatgttggttaaagaggccaatcctacccttaaaaaggataggaagcgaaaaatggtttttttttaaagtttaaggaattttttttcgaaatttttcgacgctttttgtcccgacgacgttttgtctcgacgacgttttgtcgggaactgcccacttcggcgccggccttttcggcgccgttgctaacaacttttttcctgatcaaccaaattaaaaatttttgttatcattcgatagctcttcagattctctattagcctgtaaaatttcaaaaaatttcgtcagtttacaaaaaagttatggccaaaaacctcaaaaattaactttttcttggctttttcggcgccgcgtggcataacttttttatttttgaatcattcatttctatttttacatgtaaatatagagcacacatagagctttcaaatgatgccagattggctaaagctaactgacaaataaaaaagttatagcatttcaaaatttgcggcgccgaaatggtccgcgccgaagtgaccccgacccgtttgtcccgacgacgtttcggctgacgacgttcaggctgacgacgtttcggcgacgacgtttcggcgacgacgttttggggtgcaccggttggcgttgtgtccgatgtctgttggcactcaaccgaccagcatttgtttgtttcggccagctttgacaacacagttaaaatgtgggacgtccggtgagtttctggcacaagcgtcgagtaggtatttagcgaatgattaaaacaaatttatattcagaatgtcattattagtactaaatattgtcttcataaatttttgactgtggaggggggggggtgtatttcgaggatttgaattttaagaaattctttttttctgttactctaatgttttttgtgtccaatttcagcagccccagggcggcctatatgatttgatgggccattcggaccgcgtgctgtgcgttgattggacagtgccgagccgtatttgcagcggttcggtggactcgacggtgaaagtgttctcacatgggaccgaagaaaatatctaattgtttatcgtgatatcatttgttgttttattatagttaaaatttctgtacaaactgagaacaaacaaattatacatggcccaaaaacacttctgattgtaagcctattttaatggaagtttaatgaaattgaaaacttttggtagaaagcttttgtttccctttgccagaagggatataaaagcaactttttaaatggtgaagtcattaagcatttatagccattaaatttaattcaatgtgaattaaataaaaagtgaaacttattgttagtagaaatgacaaaggcaaatgttaagtgacaaaaaggggggatgattgatcatcgatcatattccgccatattctgtggctcctccacaatatttgccgtttccgcctgctgttgctgcgagtcggaagattccatgtcgacgaaagtgctgaggagcaaaccgccgaagagcaaatcgggccaatgggcgaccaacagatcgcgcagagaactgatcagagtccaaacggtgcgcacaacgccaaccgccagagaagagaacaactgagccgaaaaagaagcgtagaaattggccaatttgaggggggggggggggggggataaagcggccttctttacacgtcaggttttggaggttttaagggccgctgacccttcattttttgttgattccggcccggatttgaacaaaaagtaaaaaattcaaatttttagagcggtttcaacccaaattaagttcgaaaagtttcaaattcattataccgtagaaaaaatttctaacggtttgtagaataatttcatccaacgtgaatggcactttttgcttaaattagcaccgttaatcccttcgctcactcaccggccaatacaaagtgaacagaaatgccaaaacggcaaaaattgcggccgttccgcacaccctcaaaaattgcttcagccgttcccatttcgcctctctctccgcgtcagcgctctccaaagtgctgaccaatgactgaaaactgtcgtaaaattaaaatttgatgaacagagacgataaaaatgctgcaaaataaaatactatataaaaaacaatggaattttaaatgaacacgcaagtaaaacaattttaggaaaaaccagcacattgagacaaagatgcaattcctcgcgctgtgcttcgcctcccgacgaac

SEQ ID NO: 5770 - DNA, 5449 bp, Heterodera glycines
acagcaaaaacgaaaacattttagcgaaataatttagaattttaatttaaatttaaatattttcaaagaataaaataaaataagtaaaattatttctgtcatattttgcattttttaagtcagtttgaatggggtcgttttaatgcgtttttaatttttgagtgggagtcgttttagtctgtgagtgcccatttaagcatggtaaagctaaaataactgcaactgctccttctacatgcttacaatgctctcaacgataattccgcgttaaccttgtaaatattacccaattgcttaatgatacctctcgaaactgcgaaattattcttaatttttttttttttttgtaattgtgatataattttcaatcattttttattttaaggtgtataaggtttattatacatagggtttaaacaatttatttatttttgttttttccgttttttgttttgtctttaaaattcatcgcaaataaagaaaaaattaaataaatttatactgtgaatgtttgacttttgtagttgatttttaccaatttatccaaattacaataattgggccaataatttgcaaaatcatagtaagaatacatgaattggattacgaaaatccgcaactaatgacttcgcaccgtttttccccttttgatgataattggctgccgacgatctttggccactgataatggtgcatttgctactgtttttggacgaggaatactgtatacagctggtactgttctggcattttgccgaggctgactgccactgccactgctggtggccgttgattttttgtgaaacaggaagaaaatgatcagctcaaaaacggtcaaaagtgtcagaccaaagtaaaggcccattgtagagccaaggtcaacttaaaaaaagaccattaaaataatgcattaccaatgccattgctaatgttattgaacgaaaagacatcaactaagcaaataagcatggccatggacgcccaaaatcagaaaaagcccaatttttggtttataaaatacgtaaaataatttataaagatttccaattttgtgagcttaaaaaataaaacaatttttccatttgctcgattgttcattggaatggtcaaactcaagaaaattgtgatgcctttatttaactttgacacaataattatgagataacccaagagagtttttcatttatcaaataaaatgtttttaatttaaaaattatcaatgccaaaacgaccagaaaaacttttaatttgccaaaataaaacagtcaattagaccattatcagagttcatgcaaaatattaccaagcaaattgaagttgttatattcgcgcgattcctccattcgaattacagtcattgaaaggaagcgaaagcgcaaagtggccatattatttcttaaaaatggatttgcattttcgagaagcgaattccgattattgaaaatttgtcatcggaaaccaaattaaaacaggcacttactcaaaatatttgccgccttggcctcgtgccgcttataaatcagaagagattgaataataatattatctaagagtaccacattttttttcgttttattattatttttggataattttttaaattctcagttctttttttgccaaatttacgccgattaaatcatctttcagatttcccaattgaaaagtcaccatcaatttttgaaacagaaaacctaacaatttgaatcaatctacagataaaatgagatggacattggtaaaaagggcaaaactgatctttgattgaagaatgacttctaagttgcgcacaagcgtgctccgtaccgggttgtaagccacccgggccaccaacggttcattctatgcatttatgataaatatttaaatgaaacaaaattagaaaaataaaaaattaaggaacaaacaccttgatgatctgctcaatttcagcaatcactttttggcatttcgcattttcacgggctgcaacatttttggacaaatcgcgccaaagttcgagcaacaagcggaacagttgattggtgtgctgtttgttataattaaactgacggttagcttcagataatttctcacttcaacaagttttcgtttgcttcgcgtctccttctgataagcttcgatcatcttattaaaagcaatggatcattttaaacaaatgccaaaaacaccggtattggcgagggagggatacggtatttgaccgcctcaaaaaaggtgatgtcagtcacatcttcattgtgctgaacacaaaatgattagaaagggtttcaaattgagttgataatcacaataatcacttactcttccccaatcaaattgccaattccgattgaccaattcgattagatcatttttaaattttaaaatgcttgagaccttgaaactaaatattaaatttatattaatataatcaaaaccgtttttgagcattccaattcttctgatgtttggtttttgtgcaaataattgctcattgacaattgctcttctatgagagcccccctaatttggaaaatgagttacaaccaaataaaaattttagcaatttgaaaataatacattggcaaattgaacaatgccaaaatacggctgtgcccatcataaaagtgccgaatcaatttctcgaactcataataccttaattggttttttcattttaaacacttccgcccacaaatatggttgaaatgcgtcattgttgagacggcggacgcgttccgccagcatcctggactggcggttcttctcccgaacaaacatttctctgttgagcccgcgtgggtattggaatggcatccgatcattcattctgacctttcattttatacttttgaaaaataaaatattaaatttcaatcaatttctacagttacaaaaagtataatattctgatatacagcatgcacagactaaccttactgtagcccaaatcgactttgtactgcacctgctgtgtacactttcgccacagacattctgcacaatttatgtacacaataggaaaaaataaatattttaatttaattcctttttatggggtcaaaatttaaaaaaattatgaaatttgataaatttcaattaaacaattttgttttaaatttttcaaataatcttctttagcagaaaaacatttgaaaaaattgtatttttggacaaagcctattaacaataaaactgaaaccaaccgtgccaattggggcgtttaatgtaaattacgaaatgccataaattgaattttgtttttgatttttagtgcctttttcggcgtctttcccttcgcctgcgtcccattgtgccatcgctgcttgacaattgtcccccgtatagtttttctgcactgtgacaattacactcatgtccaagtgggagccggcggacaaagtgaccccggagatgccattaagccgtaagagaaggaacaaagcaataaatgttgaaaaaatgtgtggcattactttaactgttcactttcgatgcgtgggttactgtaatttttttatttatgaatatttttacaatttcaaattgaaaaagggagaaaaaacagtgaaaagatttagtaacaaaagcataaaaaggctaatgcttgttgtaaattgtaaatttgtgcatattatgcaccgattcattcatcattccacgagaatggcgttttgccaagaatttctggaatatttttgcctttgccataaatcttttcctttgacgtttattttgtgttttctacattatgagttccaataattttttaaaataacctgtaatattatccaattaaatagaaaaataatggttaaaaattgctttttaaacaaaacaagttcatatttaattctttactttcataatttaattcagactcaatttattggttaaatattttttctatgcgattttgccgaccgaaaaaaagctcttctagattttaataaacattctttattaaaatcgtcctttggatttatacattttgtccgcttttcattcgctttgtcacttttcactccgtcagtgatcgatcaaattctccaggttcaattcgattgttcccattgctgtccatgtgggcaaaccaggacatgtttttggccaaatcgtcagctgaagtgccattctttgtcttaaccaaatgcgcaatggcctcttttgacgaaattccgccgcttttgtccacgtcaatctgcacattagtttaattacaaaaatgattaatttatgccattcaaaaattaaaagttaaaataccttcccgaattctcctcgcttttttgcagccgattccaagtgtgaaagcgaagaattgtcactacaaatatgagtgctttattaattcttaataaaggcatttaagacagagagcattttcataataattattattaatattgcccagtggcattttcccaaaaatgcacaaatactaccgtactcatcacactttgtatcatacatttatgttttttttactatccgactgtcattgtaaattttgtacttgatctgcttgaaatgggctgctgaattctgcgggcatccgccctccccgtccttaacgcaatttttgcacccatccggacaagtagaggcgtactgtggatcgcaacagtagtagcagctgcaggcgacgctaacattgcacgagggcggcgagtaatcgtaacggcacgccacgcaattgtggccgaaaatgttgcactttgggacgagatggccggggcacctgtgaaaaagagaaacgtgttcaaaatttaattttaattcattaaatatcattgaagtgcgcacacagtgatgttccattcgtgcattggcattgattccgagtcgcagcagccattgccaattgtcactgcggcacaggcgaaagcctaccaaggcatgttcaaagtttacatttttatgggttacaaatttttacttcgtcaacgaaactcgcaccaaaaaaggcactaagaaaaaacagagacaagcaaaaagtcatttttaaaggcgaaaagactaacgaaagcgaagcgaaaaaatgaaataaatacgaaaaaaataaatggggaaatggaaatcaaataaaaagaggaaaagaaataaaatgaaaaattaatgcacaaattgtctaaaatttataatgtaaaaattatgcagagtttggttttcattttgaaataaaaagtcgtttcataataattttgaatattaatgtgataaatgagcaaataaaaattaattaaatcaatcaaaatgatttttaataaatttaaaaaacctaaatttatttgggtttttttggggttatttcaaagaccttcgagcaaaatttaaaaaaggtaaaattttaaaaatgttccaggcttaaattaattcatgtatatttaaaaaatatatatcttaaaaaagtgaattaatagattccgtttttttctgatgaagaaaatatttcctcctccgattt

SEQ ID NO: 5771 - DNA, 1598 bp, Heterodera glycines
  unsure (1)..(1598): unsure at all n locations
tttatttcattttttttttttgattggcatttctaacccccccccgggccattttttgtgaaaattantttgtccattagtaccatattgagcccacaaccgacggtatcaccagtcgtgaaaattggttttcctggcagccattcattcccaaaccaaaaatagccatcactttgataaacgatggtccctgccgaagtgccgatactttggtcactttgcttgagggcgagtccaatgtaaacgcaactgaatgaaatgtgccaaattaacatttattaattaagtaataggagtcaagataaaattaaacaaatttgctacaatgccttttggcaaactttaacattaattaactcgactccccccccccccccccaataaggagaaagggacaggatgaaaatttgagttttgtttgacaatttcgttggttaaaattgccaaaattttattcggaatcctaaaaaattgcaacatttacgaaaacaaacaaacatgaaaaaattcattttttggtgttataaaagtatttcttgaaagaaacttttaattgaattacatattttaggcataatttgtgcagagtaggacaaaacgtcgtcagccgaaacgtcgtcgaacgaatttttcgaccataacttttttctttctcaaccaaattaaacattcttggtattattcgaaagcattcgaaaaatgctattagcctgtaaattttcaaaaaattttatttatgcacaaaaaaatcagagcaaaaaaagttcgaaatactgggtttttgagttccttctggccataacttttttgaaacttaaccaaaatttttgagattttgcaaattaataataaacacatagagctatcgaacaacaccaacaattcttaatttgattgacagtgaacaaagttatggttcaaaaagtcttccgacgacgtttcggccgacgacgttttggggtgcaccgtaatttgtgccatttgacttttttttaaatttttaaacaaacattcaccaaatattccttaccatttttgtttcatttgtaagatgctcaattcatagtaaaaaaaggtggcagaagaatgaatcccattttgcactggatatttcgcgaaaactgcactcctattgcctgaagttgagttaattagaaaaaaatttaaatgaaaatttctaaatgcattaattaattcaccgttttctttacaacggacagttaaaaatccggtgtcaatcaactcaagtccaatttggcaagtggtgacatcccaacaattttgaggacgattaaaagcattctaaaaagacagtaaaagggagagaagaagaaaagaaaaattcttttaaaatcaatcaattaaaattatcaaaaattttaatgcaggcggggaactgatatggggagaaaaggaaactgtggggaggggggaagagctgctccctgtcaacgggaaagggtcggttcggcgcaaacgtttcggcatcagcccaagttttttgactataagttttttcactgtcaatcaaacccaacaatattggtatcattcgaaggcccttcacatgctctattggccttacaaaagcaaaaaga

SEQ ID NO: 5772 - DNA, 944 bp, Heterodera glycines
ttcaatgcaatttgctccgtaatttacatctcaatgcaatttgtcaaaatttctaaaatttacatcatcattggcacttacacatggatctttgcgcatggtatgaaatttataccacttgaatttaaatacatatcatttcgaagccattagaaattgtacagtatccccaattagcgataaatttatcctttattctttgaccgacaatttaaaaattaattatatatattttcttttcactaggttgtcctcccctggtgtatttgctgctcaatcaacgaattcgaaatgattgtgccaactatggccgtgccattttccgttttttgcgcaatcgcaacaataattcggtgtcaaacgggctagttgccgtggcatggtccacacaaaatgatgccggaaacaatgccaacaacagaatgagagacgataacaatgtgcaacagcagtgaagcctagcgggagaaaagatgaggcgaatatttactaaaactcaatattaaatcatttcggttatcaatatattgcttttttttaattgtattcctcaaaatgcctgttggacaaaattcatttgttgcaacaaaataatcccaatttaatggcctaacaaaatggaaaaatggctcttggttaacttataaaaaattttttaaatgagatagaattagggtaggtcgggaccgggaattttgggcacaaccgggaccgcgactttttgggttgaaaaaccgggaatttttggctgggaaaaccgggaaaaaagcagggaatttcccggtcccggtcaaaactggtcaaaaccgggaccttggtactcagttgtactcagttgtccgtgtccaggtcccggtcccgacctaccccagatagaatcaatcaggcaaattgaggttggttcaaaagtatttcctcaaaaaatactttatcaatgaaaatca

SEQ ID NO: 5773 - DNA, 6493 bp, Heterodera glycines
  unsure (1)..(6493): unsure at all n locations
gtccatattatataattaaatagccttaatntagtttataaactcattaaattataaaataaaaattcgttagaaaaaagagtgaaacaaattttggtaaaatataatgtgagttatgaattctcttttatatgcaaccatgcgaaaacggccacgcggaaaacgtcctggcccggccgacgaggcatgccaactcggattcttaccgaaaatggaacccaattcgtcttggcatccaaagtttccgcggccctcgaagccggtagagtgccgacttcagcactggatcgattcatggcacgagaggcaatccattggcgttttatccctcaattgtcaccttggcaagggggagtctacgaaagactcgttgccttggtcaagagctgcttcaaacgagagctcggccgcgcaatgctctcatgggaagagctagtcacatacacagccgaagtcgaagcagtactcaaccaaaggccgctctgccatgtctctgaagagcctgatggaatcctgccactccggccaatcaacttcctccttccgagagcaaaacttggcattgtgtttactgccgagaccgaccacgatgagttccgaatttcttccaccaatcaaagagatgcgctcatccaacgttggcattccgtgtcatcatcaatcgaccatttctggaatcgctggcagaaacaatacctgctgatgcttcgccagagacttcagtggaagtttaagaaacaacggaaccaaattgcgcgagagcccacggaaggagaagttgtgctcatctccgaagaaaaacttccgcgcaactgttggccaatgggacggatcgtcgagttacaacgctcacacggggaaatccgaaatgccaaacttcgattagccacaggaaaggtgctaagccggcccctgaatcgtctttatccattggaagtggcttcctctgccgaacaaaatgagagccaccagcagctgacagacccgccgcttgagtaacatcacaacagaacccaaacagcggaccccactccaattagccaaactcgtgctcggcacaatttatctggcccgactcatcctatggtcactcgctcaaaaatcaaagcactggcctccgttttatccattctgatgtgcctatttctgattggcgcttcccaaaccaacgccagtagcacgaccaagccaaagcgtgggaaaggacttcaaattcgttgccgtggatgcgaactggcctgtacaaaaaccggcgttgacatttcaataccgaatgggattgtcaaattcttgctatgttgtgccggtggaactcagtgcctcactcaatccggcattaggaaatccttccatcgcttgcccaaggaacatcttctattcgactacgcttattggacgaaaaagaacaacaaaagaatcgggagcatccaatgtccagaccagagatgcgtgcgagctgatcgattgttgggtatgcctcgaacgcctggcaaatcctgattgtcgtccagatgttcagactcattggtggagcgagccaacacaaattcacgaaagagccgtccgtgtcactcacacccggcattacgttccgttggaaagatttgagcatcacacctattgcctcgtctgttcctccggccccaatcatggcaaacaagtttctctcggatggcaataacatggccaaaaatcaactgccaatgccgagatgtcaaactcgaaccagcactcgccgatcctgagaagcgcctaccaattcagctcaaaaacttgcttatccgaaatgaaaagcgagacattttcgccgaaatcacctacgcaccgattcagctgtccattcaatttgaggggcttcgaatcgccacggaagaagacctcacaaaatgccatgccatgtccaagggtcttttcgggtgctattcatgccacactggatctcatctccatttgcaatgccacaccgactttggttcagcacttatgctacgttcgttgttcggatggcaccgagttcacagctctctgccacaaaacgccagaagttttgaatgtcagcctatcatttaaccgtgccgaagtcgacatcaactgtaccattgaatgcagtggaggacggaacccatttgtgatcggtggtcatcttcgctacgtgccaaaacattttcaagcacctaatgaggggagctcattcatctcgaaggccaaacccagcaactcatgcctaatttggtgcccagattggaacttcgatttttctgatgtcttctggtacttctttggtctacaaaatgctctacgaaccattcgcatcatcactctggcactttttatcgtctatatcctattgcgctgcaaccctgcccttcgatcttggagagccataaaccgaattgttcttctgttccttgctctttggccagtgacatgtcattctgcagcgggagggctgagtcgcccactcagcattcaaaacgcaccaaaacggcagttcgaagaccattgtgcaatgtcagaacggatgactacgcctcatggcatttttgaggtccaattgtggaacattcatcccttcaacgaccaaaaattgctcataactaccctataaaagcggttcccaagtcactcaatccaccattcgttcaaatccttgaatttgccttccacttccgaaatcaatcccaattctcttcctttccaatggccaccctgctctctttcctcgccaattcgatgaacatcgatgtcgaacgctttggacttgccgtcactacatccttgagccgttggaacgaagcccaggcgatcgttcaaggactgcacgatcgaggctacgaattgaagacacggcacttgcacccatttgagcgcaatgtcagactccacgggactgaactgagccgaatcgctgctaatcgtcttggcgcttacaacggacaggcccgagggcccactgtttctgaattctaccgctctcgccatggaatcgtccttcgatgcccctcagctccttgtcttatggaacctggcggaaatgggcaccgagattttttccctattgaactcatccgagtggtgtctcctgatcggatctcggcgccgcggcgactcgcgactcatccactccctggccctcgcccctcacactccgattgttcgaccgatttccccattccgccatgcccggtcatcttttcgttaacatcagcaccgacgacgtgccaattggagagccgggaatggagcgccgactttcacgtggacaaacagtaactattcatggcccgatcaccttgcgtatctaccctgcccttctcctcgtttgtcttttgctgtttttggcaacatttgtcacatctaccaatcaactgccacacgacatttgtaaacaacaattcggttcccccctggcaattcacatcgactcaattttttcttattcacccgccgcccttctacacaatccaatgtccccccaaattggtgtgatccatttgccgctgtctctctatctactacttaaacaccgccagccagcattcatcaccaccatttgctcaaacccctttgcccccaattctgccatcgctcaaacgccttgccttgcctatgacatgtccaacctgctctctgaaaaacgtgccgccctaaaaagggcccaagaagagttagccgaggcagaacgaaccaaccgccgcccgactccggcccctgctggacgaccccttcctttggctgctatttgcccttccccacccaaaaaaccagccctcgccaatcgcaatgccacggaagccgcaccggacgatttgcgcgccatactccatcgacaatttgctcgcctcgccactgatcaagaggctgccgcccaatggacagagcgccgaaaacgcgaaattgctgaggaagcggaaaaggtgcttaaagggctgaaggaagtgatcgtcgactccatcgacattcaacgacaactcctaaatgagcaggcggtcgctggtccacctggtctttgtgctgggagtgttgccaaatgcaacgaaagaaagaccaaaaagacaaaatgaaaaaggacaaacaatgtgattggattggcttttggccggtgattaattccttctgttgaaaattatatgttaaatgtttcctaaaaattctgtccatatttctgtattaatcatcatttcggtctttgttcccccatttttcgatcctatttaaatgcttctcactcctcctgttcttctcttcaccattttcctttgactgttctgcattggaataaagcgcacttttctaaccgtctactcgctcgttttcccccaatcgtttggccagtctctcgcccacacgtctctccgttcgccgccctttcttggctctttcgctgccccctcgtggtcacccccccctcccggtcgttgtccatcccctttgtgcgacaacccggacccgtagccctaatttaatatacgattttgtagttttttgaagtaaaaaaaggtacagaaaaattgaaaaactctcgctctcgtctttttggggactctcacctctcgtcaaactttcgctctcgtcttttctgagacaagtcacacccctggtatgtaatatgaaagaatattatcatttttacaattattttccgattcgtatgccgattagtttatcataaaaatttgttagatatgggaaaaacttggctctattctagtttacgcgtccgatcagtgtgattcatcctcactttttttggtcataactttttaatgatgaatttcgggttttctcgttccaatctttttccaagattgtttggattgaccaaataagaaaaaaatatgatttaaaaatgaggatgaacactgattggacgcgtaaactgtaatagagccataaattttaagcctcctcccgggtttttgtgcttaattgtgggtcatttttgatatttgattaatttaaaatgaatttttgattttgaattttcaactttttttttcgagtccaggtacgacaggtcgaaatgcatgttgtatttgtgatcagcaacccagaaaaccccataagacatgtttttacaaatttttaaaatttttgtcaaaaaagggatgctaccacctaaactgttatcgaaatttcaaatcatagggcacaaatttaatgctttttggctgaaaaatatagaaaatatttgattgtttaattttttaaattttattaaaatgacgaaaggtttagtgacgaaacttcagggagccgagttccgattttctcgaagtgccgttccctttccgacttttattaaatgagattttggacagattcgattgccttcttcattcaacaattcattactacaatagataatacataataaatatttgtagtatttttgtaatttcgcataaaattaaatttatttcaaaaataatttaattataattaaagggcaggggcaaatattaagaaaaattccgaaatatgtacaaaaaaccccaaatatataccaaatatgtaaataaaatttttaaatggttttgttaatttgggtacattttataaattattttttcaccataaattttcaaaaaaattctcaaaatatgttacaaaaaatgaaaatatgtacaaaaaatttgccgaaattttaggtttttttgaggatttccaaaaatttccgtaaaaaatcttcaaaatatgtaaaaaaaaaatgaaaataaaaaaaaagtcaaaatatgtaccaaatatgtaagaaaattcacgaaatatataaaaaatatgtatttatataaaattggcagcccctagtgatcacactttggcgatttccggaaaaaatttttcccaaaactttttacattttttgtgatttgtttttttcttgaccaaaatttctgtttttttttggtaatttcatggaaaatgtattcaaaaatttcgaaaaatataattattcgcaactgtaactaaaaagagatgatatttatagttgctaaaaactttcaaatttaggggtgtaaaatcgtaaaattttatccaaaaagtaacaaaaattaagccaaatcagtattgagattcacgttacaaacaataacatttcgagttgttcaggagaatgacggaagcgattgtcagtcaaatggatttttaattagaaaacgatcgtttaacatcacatcaagtcaaaggagcgatttgtaaagagaaatcagcttgggatgcatacggaaattgattttatggccagaaagcatttttccaacgtgctgagtcgatcctaaaaaagtatcaatgataatgaataattttggatttatctaaagaatatgaaacttaagggatgttctttaataataaatatgaagtcatgcaacatattgcaatgaaaaaattactgtaaaatgaattaaaaaataaaatatttatataaattttaaaatatttttattaacaattattaaatttaattattcattatcattgatactttttt

SEQ ID NO: 5774 - DNA, 1579 bp, Heterodera glycines
aaagagagcaatggcaacggaacggattaatcaccaattcacacaaacccaattaatcgtaaattaatattaatcaattaattcggttatacttaattaataaaaatgccaatgcttttgcatcagagagagaaagagagagagagagagatagagattagggaacgaataaaaaaggaggaggaaaagaaaaagggaggttgggagaggaaaggaatgcgaaggcttggcaaatttagtgaattcatttaaatctgaaaaagtggcggagcattggaaaatgataaaacagaaattaggacgaaggaaaaaagggtaaaagcgaaaaatgaacgaatgaacggcactttttgaatgcattcttttgccattttttttattattatgagagagaattacggtagacttttttcagattattatactcgaaatggggatagatattagacaaatgaggtaaaaaagttttgggctgatagcccttcgctttttggggaatgggatgcgttttagccgtgcgttgggcgcgggtgcgtgcggttttttgggagacggcccccgttaatgcaaatattcccttccccttgccccccccccccagcaactcctccaacgacttcatcccctcccgttttcccacaagagagacaataacttcgacgacgaacgttttgatgatgggacggggggaggagagatatttgctaaccgtctgagagcactcttcacaacaaaatttcacattttctgttaattcccacgcgcaccaaacaaaacccattcttcgccttctttttgcgctaatccatggacttttaaaaatatttttttctgttttgtcagtgcattttggaagaaaagcaccgacaaaaggacgacggaaggagagaaatatttacatcaatttccggaggcttttccccaacaaaaagggcggaaaaggtcacacacccatgaaaattgtcggtcttcgcctactcaccgccattttgaggcagcacaaattccacgccatcgatgccgttgttgctgatgttgtactgctgttgctgctgctgatggaatgtttcgtcctgtggcctatatagaaaattggcatttccgccgtttccatttgcgttgtcttcgttcagcagagaagcgatgaattcgttgtccatttgcatccgctgctggtaataattgtagtaatcattcccattctctccccccttttccaattcgttttccccgtcgtattccgttggaagttcgaattgatctcttcgacggaaatggcgaatgattctcgtcatcttctaatgatgatgcatttgcacttttcaatctgttcgggtcaattgagtaaacaaatgcaaataattggccataaaatgccatttcaggcggtgggcggtgaaactgttcatttctttatcatcggagcatttatccactttgtcctcccccccccccccctttctcacttccctcccttttccgtttacgaaattgaaatgagaggcttttgttgagaggagaatggcgggcttagatgggaaagagcgggtggactgaacattctaagctatccgagaag

SEQ ID NO: 5775 - DNA, 577 bp, Heterodera glycines
cccccccccccccccgcggcggttgtctccccatttcccatccatccgacttcttcaaaagacactcttcgtcggcttaacgggtgtatgtgtatatttttgttgctgtgtccatattggcttcttcttctcatcatcgtcaccccccccccccccccatttcggcgatttgtttggttatgcgaaaatggcattaggcattcttgggcgaaaattaggcctttgagaaagaatattttcagtgaagattatggaagtgtgaagtgtaaacaggaagaatgctttattatgattatttagggatttgggtcgggggactttttctgattgtgagagggcggggggcgaggcggggggggggggggggactgaactggacaaggttggtactgaaaagttctagaagcacccagcccagggggttagagatagcggcctggaattttttttaacttttagccaacacttcatcttaaaatcctaccagcggaaactttttggtcagggtttggagtgatttttttgaatttttaaaaaattattaggggtctttagtccacatcgaggctcaagacgg

SEQ ID NO: 5776 - DNA, 2332 bp, Heterodera glycines
cccccccccctccttttgttttcggcattttttgcttggtgtgtgacccccccccccctctaatttattatttatacattctgcttttctttcctctctccactgacctaagttttgttgttaaaactcctttcctccatttgaacaaaacacccaccgcttcaccccccccccccttaacatctgatagtgagaaaggctaatgagtgcttttctttcccaacagcactttgtagaaaggcgtcaactaaggtcagaaaacaacgataatggcatgtccaattttgatagatgaaccagaaggattattatgtgttttaggaccgcaagtcaagtggaactaatttaacaaatagcacaaaggaattggtgaattttcggtgatatataatattaataaatcatccatcctaattatttgttttatttttaattttacaaaatacaattttttaatatctccgcttatttgaggaatgaatgtgttgtttgtttatgtttagcgttgattgggaattaaaggaaaagtcagcgcggcgtcgaaaattgaagcaaaaaattattaaattgtgccaatttgatgatcgcacataaattatgccattcgctcagtcattaatttcacttgggaaagtccgaggggctgcccatttggcagcataattgtgctttcccttaaaaagtttgtttgtcccaatgcaggccagacgagaagaagcggagaagcaagcggctaatatgggcatggagggcggtcaaatgcccccggcgatgatgatgatgatgatgtcagcagccaccgccgctggaggcgaaggcgcagccgcaaattcgttcacttttgcggcgcctccgtcgccggccgttccgcttgacccgcacttggaacggatgttcatccaacaaccgaaacacgtcgccggagaagaacagcgaccacagcacgaggacgaggaaaattatgacatttgacggtaccgagaagcacgggagaaggagaccaaaagcgattttggagagggagtccaaaagcggggacagagaatcacctcataaagcaacgcaacagcatacagtacccatatgcataaagatcggatccgcggatcgtacgtaacgctctatttctcatcattacctatgcaatttccctttcttttacctgattcggtccgcggatccgatctttatgcattgggtacagagccctttcttttccctatcattccatcgtttgatgagctttttcccattttgttcatttttatcagaaacttctgctgtttctttctctactgacccttctcctcttttcttatccgatttgtttaagcttccgttgcattttctcattcatatgtttatgtttatttggtattattttagttgtttttcttagatttgtcctcgtgtggttggctttgttcgttctcattttcatacatcaattatgtaatgtttgtttgagcaaaagtaaatttgatttgcttatcctcctattaaattatttgcttgttttgtaatggacggaaagccgtggagggaaaaaagaaagatcaaaagaaaagataattggcgtgtgtaaagtacgaatataaattaagtggtaagtaaattaatggtttttcaaaaaatcaaaacaaaaaaaggagtgtttcccctcagtaaagcgcaatttatgaatttgtggggggggggggggaatcacggtaggggacggttcggtgcccgccgtttcggtgacagcccaagttttggaccacaacttttttcattgttgaccaaatctaataatcttggtatcattcgaaagctttataggtttagaagcttttctaacctattgcttagcgattaaacaattaccaaaaaagttataacatgaaataacaaaaaaaaaccaaaattttggaagttttttcttaataacttttttacaagctaaaattttttttttgttttttgtaaggctaatagagcttgtgaagggctttcgaatgataccaagattgttagatttggtcaacaaagaaaaaagttgtagtccaaaacttgggctggcaccgaaccgtcctgttccgtttaaatttatagaaaatttataccaatttttagtgaatacgaaaattttttgaaaaaaagtctcggaattttcgatctaagtcgtagtccaaaacttgggctggcaccgaaccgtcctgttccgtttaaatttatagaaaatttataccaatttttagtgaatacgaaaattttttgaaaaaaagtctcggaattttcgatctcgagtctagaaaaattttatagttatggccaataatttttgttacaa

SEQ ID NO: 5777 - DNA, 1804 bp, Heterodera glycines
agtgatatgtactaattgctttttattcctcaccttcataatcacttctttgcacaagctgaaaccatggctttttctcataattatgaggtcccgccacccgcccacctgttaattcgggcaaatgagcatcggtctctgtgccggtgccaatcactgagtcgacattgccgagagcaatagtaagtgtagcagtggcggcaccaacggaaatgcgaacgcgcgtcacgcaacggacggacgcaggcgcagaaagcgcaacggacaaggagaggctcattctgttaatgggaaaggcaataaaggaaaatggatcgtattcctaatgagcctattagtgtcattctcattattaaacgttccagtgttttgtcaaatgccttttactctctctatcacacttttttgttttctgtctctgaccttcaacagattctcggccaagtgcggctgttccgccagcctttccatcaatgccaaatcgggcgagaaaatgccggggccgtccatgttgcggagctggttttgctgttcggacaatctgcttgtgcgagaatagcttttcttccttagccccgttgctttcgctcccttaattaccccgggtcggccgggggcggttcctccaacggtttggtggattggaaaatggcgtccaacgcctcctccagcgttattcggcccccgtagcgatgtgccaatggggcggcttcggccaattggcgatccacgaaagtgtccgccacttcgaccactcgcgagtgttttctgtgtgttggcatgcccggtaggattggcatttcctccctttccttaatggccgcttctttcctaccggtctcgtcctgtgccccattcgcttggcactgtcgataccgtataccctgactgatgtcggccatcgctgtacggtactgtgctgacttcggtttttgaatacgcctaagacaattttaaggacaattcactgggcaaaaggctatttttttgcggacctcccgagaatattctctggtcacagtgcgagtttcggtgagcaaagaaggctcagaaggagtcttaacaagaaaagtaaaaacttgagaccgattggcataacatgccattattcactcaactgaacatcggaatggtttaagccaaagtttgggtgaaaaatgtgcattgaaaggtgagggaaaagaaagtgccaaagccaatggaaaaaagagaaaaggacagcacaaagggaaaatcactttttatttctttggaataaaataataattgaagataatgataataataataataataataaaataataataatcataaaaaaagtttggaaagtgtccaattttgaggaacaaaaggggcgaaagcgcgagttgcagaaaaagagggcaaaagtaagaaaagcacaaagggaaaaggaaaacaaaaagtgaggaagggatggcatggcaattaacgagacaatgggcaaatgcactgaaagggaaactgaggaggggcggtgagggggcaaagggaaaagggggaaagggtgcgtcactcgaacagaaaagtgccaaactcagacaaatgggcaaacagctgcggaagacggcacgacgaccttttggttgacatttgaaagaatttacgagcattcattgcgaccagaaaacattttctattgttattaatctgctttgctgatcaatcagcagcaattcccttgctgatcggcaagagactgatcagagccgaccaataagcaattcccttcacttgctgctgatcaccggcacttccccttgccattgttcgttcgcaccct

SEQ ID NO: 5778 - DNA, 1052 bp, Heterodera glycines
cgacggcatcgtcggcgcgtgttggtagtgcgacggcggtgcctgctgctgatgatagtcgcggtaccaatccggcgcatggatgcgctccgtcgatttgcgaaagcgcagttcgtgttcccccgcaggggcgcccattggcgcgacggacggaggggacaaagcggagccgatgacactcttttgcaggtcattctcaggaatgtgatgctcatcacgcggcctaaacagcacagcaaatgtcagcggaggacaagcaaacacaacgccaatttaacaattaaagcaaaaatcatttaatttgtttaattaccccccccccccccctccgcccgttttccttccgccgaccttcgcgggtccgtcagataatccgcactttttgagcgcgagtgctgtgcctcggcctcctgttcccccatgtcccttcggctttggcgtgggctgtagtccaacactgagcgtgaccctcgccggtgttcgtcctgcggacggaaatgaaattttgcggggattttggcaaattgaaaagaaagaaagaaaagacacttagagaaacaaaaaccgaagaaactcaaagccgaagcaaagaaagtgaacaatggcactgattaagaatgccaaggcaaaaaaaaagagagggaaaagaaagaaagccaatccattggaaagttggccaaatccacggaaagcaccgctgggctttttttaggcccgtaccctgtaggccatttgctcctccggtgccgttgtcgcccatctcgtggcgtgtaaatgtgccaaaggcgacgcgtggaaggaattgccggaggcatccgaatggaaattgcgctgctggcgatgggcgcgacgaaagtaatgggcgagttgacgacgcgccttggccaacagacgctggaactcctggaagaacgcaacgcatcggtggacggaacgaacggagcggcgaacggacggacgaattggggacaattggagagggaaagagaaaaaaagaagaatgaggcaacagagggaaaagaaaaagagatggatgagagaaagggaggaag

SEQ ID NO: 5779 - DNA, 1477 bp, Heterodera glycines
tttttgttcgaattcgggtccggggttcttaattggccaaaatggataccggattcgtggtcaatgccccccaaaagccaaggaacttgtttttatgacaatagaattttactgacgcattttccactgacgcattttccgggcgccgggcaagctgctcttccattaaatcattcagttcaaatgcgataactacgtaagcaaatatgaatactgaaatatatttggtgaggaatttatatttgatattttaagtaagttggggagaaatgggacagtgagtttgtaaaccgaactgactttcatctccacattttcgctaagtgccttcagcttccagatgaagtccgaccgtgccacctgctccgagcggcgactttgcatgccaatcagaaggacagcgaagaagatgaccagcgtgttcagcagttgcaacttcagcgaatcgttgctttaaaataaaaacaatattttttaattttgctattgccgattgaaaatcctattattttaaatttaattatatttttttgaaaattcactcgcaaatttcttcagcttttacggatggagacattgtggccaatgttgttaatttaatcgaattttggccatttgcttcggcgttcgtagaaggaaaatcgagcatccaacatctgttgtttgttaattgaattatttttataaaaataattgaattaattttgttaaaaattagcaaacaataaaaaaaagggggtacaaattcattaaatttaaatgaatacaattttatttaaaaagaaattgttaatccaagttaatatttcagttatcaaatttatgccaattcccaattaaaccaattaattggccacctgctccaaattgtgaccaaaatgggcaaacacagacaaatggcgatgaacaccttctcaagtgcgagcagagaatggaaagcgcaaacgcacaacaaaaggggcagcgcacattcaaagattagctaaaagttaattagccaaataaatgaaaaataattattcgaaaaatgggctcccgccggaaaatacgtcagtggaaaatgccggtgagaaagtaaattttcaaaaaaaaaaaattaattaaacaaatatttaaatttttcaatttaattattggagccgccgctggaccttttctttacaagtttgagaagtatcatctttgtagaagaataatgggaaaacatgaaaaaaaaccctaaatgtcatttatagtttttccatcaaaaaagtttttgtttctgacccgacataaaaactgaatccaggggcgtagctagaaaaatttttcggggggggggggggggggaaccagggacgtatccaggatttggctgggggggggggggggggtaccgatcccgaaaagtcattcttaggggtgtattttttaaaattcttccccgattcttaggggggtatttttgaaaattcttccccccaaccacctttttttt

SEQ ID NO: 5780 - DNA, 2666 bp, Heterodera glycines
  unsure (1)..(2666): unsure at all n locations
tcggtggttccatttgtggtgggaagggacgtccacttgaagcgtagcggagaccaaaacgcgttggtgccaatcgtcgtaggaattatccgtaagcgaagatacattcaaagtgcacacagaagggaccgatcgagagagattaatttaatcgtaggaaaatcagaaaaaataaacttaccattcgcatatttttcgacaaagccaagccattccatccgggcggtgtcctcgcattcggtccgcttcgtccacaacggacggcaccactgcgcgacaacacccacatggtctcgttgctaggccgctgctcatcgttgagttggagcagctgtttcggcataaaaaagtgtgagaatacgcggtgggattatggcaattacaatttctactaattatgacaaattaccgacggattaaaaaataataatgggaccctaaatcaattagtccaaaaaacccaatttgatgtcaatccgacttacttcgacagtgtttttgggttggagctcttcgccatccgtttctgctgccgctgctgatgccaaattcacctcgcggcacgctttgatgtcgtgcgcgctgtaaatggccgcctccaacgttggcacgttgaacgccgaatgggcgccacgctcgcgagacaatccgtccaattcgctatgaaacgatttttttaaacaattttcactttttaagaatgatccacactgaccagcagcagcatcgatttgttgtgtggttctaccaggccggcatattgaaatgtgcccacgacaggggcgtatctagaaaaaattttcgggggggggggngggggatccgacctgaactttttttttatgctatttacccaataaaaaaaatattttttccccgctgctgggtaaaaactgcactttttcactaaaaatgacccaattttggcggttttaaggcaaaaaacatgtaaaaatagtgcaaaatggaggtccggcggtcgccgccgggaaaaattttgaaattgagtgctatatgttacgaaagtagcctataaaatttttaaattttcgttttggggggattcgaaaaaattttccattatttgctggaaaattttttaaaattttcatttcgggaggggtgcaattccccccccccccccccttagatagcccttgactgaatccgaaacccggcattttctcgacccgtggcaacccagaagtatatactccagtatattcacattttacgacttttgctaaattttactaaattttatttaattttttaaacttttcaaatgaattgacgaacgagattcttatttaattttgagtttttctactgaaatacttaatgctgcagattttattttaaattgtattcatcactgaagcactctccactgatttataatgccaaaatgagactaaaaacatactgtaataaaataggaccaatcacctcagcatgaggaagagcactcatttgttgttcttgttgttgttgatcagcatcagcagcaatgatcggcaatgaactgagggcgaatcgcagagagaggaaaaatgcgcaagcggagaacagacaaagcaccaacagacacttgtgaagacgcctaattggttaattaatcaattatataaaagaagaatcaatcaataacaagaaatagtcatttaacttacttcatgacattgtgccgcttccggtgatcagctgctttctgctgaatgcaaagttgattttaatttttttttcaaaattcagctgcttcaagccaaacaagagaaaattttatcaaaaaaaaccaaaagttcattaaaaacaattattgtaaatgaaaatgtttaataattaataatttgttttaatttcctattaaatttaggacttaataatcatttatagagaaaataaaataaaattattattttaaaattaaatatggttaaaagtaaaaatattttaaattaagtagcaaattaaagcaccatgaaaaaacgacgaaaaacgatgaggaaaattaggagaggaattgccacgagacaaatgatggaggcgatgaggtgatcagaataactgtaaagaataagactaaattacagtaaatgaacaccatcaaataaattgcattggcatttgctttacgtgagatttgccaagaaaagcgcggccatacaaagcaaaaaaatggtcaaaaggcaagtggactcgaccagcacagcgttggctttgtattgcaaaaactgaaaaaaataataaataatattttataaataatagttctattataccttttgttccacccgtgtgtgcttgaaccgcagtgaatgcctttctggaaagatgaaaaatataatactaaaaatataaggcccacccaccccaccccttaaatagtgccctcaagtttgaggagggtaaaaaatagagcctaccccctaaattaccaaattagtgcaccgccctcctaaaataagtcccactccttgtgaagggtgttgaaaaatagagcatccccctaaattacctaaattggtgcaccgcccctctaattaaagccttggagctctattttatgaaatacagtagaattaaagtaaatctaaatttttcgatcaatgcctgcccaaataaaattagagaaatttntggatgaatttatcaaacagaatttg

SEQ ID NO: 5781 - DNA, 3947 bp, Heterodera glycines
ctgaaaaggttgaaatgagaggagagaacaaagttcaaagatatcaaaataatgtgcgcatttcccttcccactttttcaagctgtactttcagtgcatccagctccactgatgcgattgttggtgacggattcagcagagaacatgacgaaggctttggttcggcgtgtttgtcctcgttttgctgtgtctgttcgtccttcggttcctccgtcgtctgtggtgccgtcgatgtgccaccgtcgccaccatcagaatgatgacgtatcgtttctggtggcatcattagagtgcagtggttggcttcgcggattgcaaagcctccgacggcggttttgcgaagttggaactccagaaaatctgaaagattggcacaagttttcaatcagtgccaaatttttttcaaaaattgccattgctttatcgattataatgtcaaactttgactgactatctttgtcatggtcggcgccggcgccgatcattgcgtcgacgccgttggtactctgtcgtccgttagtcgttgtcagcgacgatgtcccgtcaccaccggcacaaatcggctccacgggcacttccaacgcacttggttcgtccccgtcctcgacaaagtcctgctcaagcgccttcacctcccaacctgaaacgcaagatttctttattaaattaaattttctgtcaaaaaattacgcggaattttggtggctcggtcccgccggaattcgtactcgtccgctgacgaacttccggctcaatttccgtgtcggtggccaacgatttgatgaagattggatagatcgaattgtgaaatttctttttttagtccagatgagaaattgaaatgaatggaggatcagcaaaaacgaaatgacaataaagtgaatcaaattatctgtcatggaactttttttttgaatgtctctctccgtctcagatttgcttgtcatttagtattcatttttaaaaggtaaataaattcacagcttctattattctttttccggtaaaaacccaactcatactgccccaactcgatcgaatattacaaaagaaaattaagggctattaacttttatgcgtgcccattcagaagtttacgaaaacatttaattgcatagagccctgggttggtatcataccaaaagggatggaccaaaatttacaaaacaacatgattatagtacacattcgttgacagcgactccaaacagaaaacgccaattgtgtgcattataaatgatgctttcaactgatgaactcagatgcacacaattggcatcttctgaaggcagaatttcaattaatgattgataaatgggaatgggttgattgtatgcagaagctcatttctttctgagccaattcttattcatactgttttggcaaaaaactttttcgaattgaccgagtagaaccatcctttgtccggatttgtctgggtttattagggttaaatcatgtttaatgtgatacataatttgatgttttcattgttttggtttaagaaaagttcattattataattttatgtttattaagtctgaaaatggagcaaaatgaaccccaacaacaacaaggacaggaacaacaacaacaaggacagcaacagggacaggaaccgcagggacagggacaaggacaggaaccgcagggacagcaacagggacagcggcccgagatgggcaaaaccccatcggtttgctttataaaattgaataaggcttccaaacttacctatttaaaaattttggtaatactggagaattggtgtccctgcttaaattaaaaatttttcttttctaaaaattaaagcatttatgggagttttctgggtcgatgatcacgaatctgacattaattttgatcaaaattcgaatccctgacccggactcgaacaaaagtcgaaattcaaaattctcacacacaaaaacaagttttttcggaattggccaaaactaaggtcatattcgtgattaacgactccaaaaacaccagaatacatgtttcttacataaaaatttattaaaaaatcaagtatttggtgaaaaatcatgacaaaatcaatgatttttcgaattctgagctcagatccgtaatcagcgtattttttacactagaaaactcgaacagaacgattttaaatttattttccgtcgggactacaattctgccctttgccacaatttgcatgtttcattaagtttgccattaaaaaactattaagcgaaaaagctccgcaatgcgcaatcgaatttggaaattcataaaaatatattcagtttttttttaccggcggtaccggtactagacaaaccagtaacggtaatttcatttttgaaaaaaccggtaccggtaccggtaccaaaaaaaccggtaattaccggccagtaccggtaccggtaccgctcaaccctactattaagcgaaaaagctccgcaatgcgcaatcgaatttggaaattcataaaaatatgtttagttttgaaacgattgtctttgtaccataacaaaaatatactgaatttttaaattttatttgtttcaatattttaaattcatggataattcgcataaaataaaacttccacccgaactcctttcggaaattgtccgaacccttcctttcaacatccgttggtccattgtccggatttccttcactttcgattatttggttgtaaaatggcagctaaattgggttagaatggaaaagcttcgtcgtcttaaaaagagagaggaaaaattgcgacgacaaaaagaaaaaattgtaaggagtgatgatgcgaaagcacaaaacattttcttacctgaaatattaattgaaagaaataatttaactgttttccgttgggacaacaattctccactgttaccaaggtgtgggttcgattcctacccgaggcttaaaattttagctttttattactaagtccagtaacgattttatacaatttcatttttttacattacagcgggtcaggacttatattgaccatttggagcgccagttggagacggtgcgcgcggcgcatgctcaagaaatggcgacggtgcgcgcggcgcatgctcaagtcgttgatgagcgggattttttgagacgcataatagaaaatttctcaaatcatgccgtggcaccaacaggtcagtgatttttgcttaaaattcaattttactgtttaatattaataacctgaccacaacaataaggcattttatgagtccaatcaactattgatttctgagtaatttttaattatctatttgtaggttatttgaattttcaacttttttaatataaacttttttcttactattacattataaaaaaagctgtgggactgaaccgccaaagccttaaaacgcaaatgcaacaaaatagatatctatcgcttcctctcggcatgtaaaaaggatgaatccgaaagaatttttgatcaaaaacgatactgctgaatgttatggctcctcactacctccaccaatgacacataaaacgctctgcatactgcctcgtccaccctccgtattgccccattactcgctcttactaatgatgtgctgcccatcatttgtcacgtctctccatgacactgtccaatgttctgctcgcacttttgctccttttttgaactgctccaccagcatggccatttgctgttcctttacgtggcactttctggccacaatttcattcccctttcattggccatcaaaatttgctcgatttcactgtttgctgtcagcggaatttcgctaatcatggcatttactggggtggaccgactgttgtgcgtcctcatcctggcattgtaatttttcaaaattttgctgaaaccggcaacaccctttttggcgtttataaaaattccactaaatgggcctaatttaccatatttcgtcaaacgattttaaaaatggaaaacaaaaaaaaatgaaaagtttctttgg

SEQ ID NO: 5782 - DNA, 1636 bp, Heterodera glycines
taaaacgctcgtcagactgcttcctccgccctccgtcttgccccactacttgctccgccttcgcatgctcgccaaggcgggcgccgcgcgcactcaaaaagggatttttatgcgttttaaggctttgggcggttcagtcccacagccccattttgcacttcagccccgggtcggtaactctgttcagaattgtgaccgcgccttaaaaatggtaccattcgacttctctcgcagagaggaatcgattgatatatacataattcgtatgcaaaatcaaagttggcagtattctgaacttttaccagtttttttcttactattatattataaaaaaaactattgggttggttatggctttggaccgataaagtgcattcgaatcttttatgtttctttgtgtttatcaccatttcttcgttgcctttaggtttcaattgggttcgaccacagacgccgcttctccgaccgttcgtcaaccaccccaacttctttcaaggttctaatatcgcattatcatttaaatgaaattttaccaaatccgaaattattcagtcaaataacagagaattaagttatcagaagctaaatatgagaaaaaccctgagaatacgacgtttaaatgaaaaatttaaaaaaaacaaatgtcgcttaattgacagtggcttttttaacagttttaatcattgaaaatttttaattttaaactaaaacttggttataagcattaggaatctgtgaattcttgataatttataattgtttgcttttatagggattggagcgcaagcccaacaattcatggggggacacaatggaggtcagggttttccggataagctcattttgtttacttaacatgcataatgatattcatttaggcaacggaggaggaaatcactggtggcaaaatgcgcccggacatggaggtcattttcattggcgttttatttttcgtttttaaaatttttctatttcgttcagtgcccttcggtggagcagtggcaaacaacggtggacaaggaggctatgggcaaaacatcgtacctggtctaaacggtggtcagggcggctatgggcaaaacatcgtacccgctcagggtgatttactcaagactattcagtttattatttttatttaagtgtaaatttatagaataggtaaaaaaaacattttttgaatccaaattttacttttttgcattttagctggcgctggcggcgttggatactttccggcggcctaccagcagcacggagggcaaaatgtgccgggtggaggtcctttaaaatcaattaaatccttcacctgaaaaactgattctcattgtgttttaaattaacaggccagtagtgttgttcttcggatgagactgattgtatgatgaaagactccgtcgatcgcttttattctcattctgtcgtcgtttttcccgctttattttggatgataataaatgctttacaaattgcagtattaattttttatagttgttttgtggatgtgtatacctacattaatttcacctttatatttatgttcagttttcataataactttgcttatggatgcgtacaaacctgaaatccgttccaatactttgaccgtttgaaaaaaggccgctgcgtcaccctatca

SEQ ID NO: 5783 - DNA, 3457 bp, Heterodera glycines
  unsure (1)..(3457): unsure at all n locations
ttcgacttttgtccagtttgggtttgggattaaatctttaaggtagatngagattgngatcgaaatcccaacttatccgagaacaagttttcacaagttattatcacaaaaattttcgcaaaccaaaaggaccccaaccccttggtttttaataatattcaaaagccgaaaattattaagtcccatcatgcattcttttatagtttttttcagacagggcttgataatatacttaactgcaagaaatatattaaaaattaccaaaatgttttcttcgtcttcattagtcgaaatggaaatgataacatttggatgttcggacaaaaggctaaacaatccatccaccgtttcgacagtccttaaaaaagcaaatgaaacgaagtgacaattgaaaaccgacttcatccacgaattgaattccattgcatcggaaatgcgtgtgttgagctcaaaaagtgcagcgataatggcggtgagcacctttgcgagcagtccaacgcccaaattgtgttcatctgcagctttgtacaactcctgcaagtagcgcacgtacacctttcggttggtcgcccgtcggcctcggttggctcccaattcgagaagtttcttcaccaccaaatcgccagtcacttcggcctggccgtcgaagaggggcttggccacgtcatgtttgtaggtgatcttctgccaagactcctcgttctgcccgtctgcctcctccaacttcttcttctccagcgctattttctcgcgttgtgccgccttttccttcttttcctttgttttgcctctgtccgttttatccttcctaaaaaacaatttaaaattaaagggaatatgtggcaatgctcactttaagaaatagcgtcgaagctcctccatttccttgccctccaatggttccaaatcggaagcggatgacgattcgtccgactcagtaccccactcggactcttcgccttccgactcggactccgcgcccataaatctcttcttcagatttacgtcatttgttgcaatggccggcgctgtagggatctgaacattccttcgttggtatggttaaagttcaatgctcaaaaatgacgaactccattctctcttcccataacctcctcgtcctcgtcgtcttcagcagcgccgctggaataacccattgggtcgggctccgttcggtaagtgcccaaatcctcctcaaagtccttgttgtacttcttcaacttctgtcttagtgaggccaatgccttcgaattcgcttttgacattatctgttcaatttctctattaaattggttgaaaattgtccaaacttttcttccttctttgtcctcccattgttcgttgatgaagtcctcaagttcggccaaatagcgaatgtaaaagcgaggaatgctcagattttcgcgtacaataaacgtttttgccttttcccataatttcagttgagcctcaaacacttaaaaagtaaaaaacaaaattaaaatgttttttatgacatacactcgacgatatccaaatgctttagttatctaaaatgtaaaataaaaacctgtttgaagtttagcaatatccttgatatttcgagcatttcgtgaagaacggatctgttctttgagttcggcataagttttgtccttttgggtgcgcacaattcgttttgggccttcgtcctcagaatcactcggatatgcgaaatcgcgagctcttaaatatgttaaaaatttaattataaaagcgaaagtgcacattccttcttttcaatcactcacatcgtacgggtttgaacgatttgctcatcggcagactcctcgctttctgatgactcggagcttgaaatagcacctcgaaagaacttcgacataattctcgatgatagattatttgtctattcttatgttttacgatcaatttgctaaaaagatttgtcattaaacaaagaacgaacagtaataactacgatgttacgtggtatgctctaaaaaattccaatgcccccaactacattaaatatcaatagctcatccgaaagctcttgttctctataacatatatgcagatataggtaggaggtatgtgtgctttttaagcatgatgaatttttcgtataattcacatattttttacaccagaaaaaaacaaaaataaattttaaacttattttcatcgtgacaacaattctgcagcaaatttctgaatttaaaataaataaattaatatttaaattttgttctttgaaaatttttccgctttgcggaaatacgagactttgcgggaacgcgaagaaaaatttcccgtttggcggggacgaaaaaagcattttttaatcggaaactctgttggtgaatgaggaagtccaaagataagccataaaatatttaattaacaaatactatttaaataaattaacacgtatttataaaaaattttttatcatacgaggaatatttatttgaaataaaatataaaaatgaattatttgattttcttaaaaaatatcaatcagtctcagtttctccttcttcaatgccattggaaaattgcgggacacctttaaaaacatttcataaatttgaatataaaaataatggctgaatgatagtgaagacagacccgaagaagtggacgaagaagcggcagaacaaacggacgtggacttgggcagagcaatgggcggactcggcacggcacgctccaccgcgaccaaagtggcatttctacgcgacttctcacctcaaaagagccatctcacgtgaaaattgtcggcattctttccccacctcttttggccacgcgcagtcgcctcttttcgctgccactgtcgctgttcagtcccgccaaatcgggcgactgttccctttcctgttgctgctggccgagttggacactttcagtcgacatttttgcctaaaacaaatattgggggttgacgatttattttctccttttaagcgtatttcctactcaaaatgaatgatttgcctttttagacaattcggggctggcactccctccgcccccgccactaagaatcatccgatgcgaacggttgtgctccgccagagtctttcggcagggaaagcatttgccgcaatctttgcagtcgtaggtgaaccccgtgtgggtgcccatgtgcaagttcaaatcaaacgcggtcatgaaagtctgaaagcatttgaaatgggattgggaacaaaacccttctgaagtccgctcattcagttctcggataaagcgtcattgacagtatttttaatggaatacagtaatacgttgcaacgtgattacagtaattaacgcttcatatgagaccggtttttaaaagtatttttggattaaaaaattgcttctgagggtgtatttcgtgtttgccataaatcctaactctgtcccctccctttttctttcgattggcacttacaccgccaccttttggcattggttgcacgtgtgcgcactg

SEQ ID NO: 5784 - DNA, 2053 bp, Heterodera glycines
tatccatcttttgagttggatctgcaaaacttgcgtccgcttgttgaaaatttgtgctaccatttgaaatcaaattttgagtgccatttttggggatttgtagtggatacgatccattgttatatgttgatcgctcttcgaaggagtaaaaaacgttagggaaatggtcgatgcaatggtggattagttcgagacgagaagcgaaagttttgtgacactaaaaattgaaatttaatcatcgaaaatgctttttccattaataattttaaaaaaggttcacaagtgtgaggaggcttttttcagtctcattttgtggtttggaactttttattgtttttggatttcttcgaagatttgtccaatttttagaaatttgaaagtgcatattaaaaaaagaggtttttggtagcagaggattttgaaaatgtaatgtgatcaatgagaacccaaaaaaaagaggattttttgtttcctggtaaattaagggatcactgaccggacgacagccaccgacggccaaaaggccctgcgaggcgatttccttgctcaacggaacgatttgttgaggaataggcgagggaaggatcggcggaaggaccgaattctgttgaggcgggagcaaaggaggcgaaaaggcggacaaaagcgacaaattcgctgaaatttattacaattaattagagagaaaaggaaaagggagcttttaaatgctatagaaaaggataattaacaaaaagcaaattaatccatccgttaaatttgatcaataagaaataattaaataataattattgacaattaattgctcaccccttaaaaaggcggagaacgattccaaatgctgagggagggactctctgccattgttttcaccgaatccaccgaccgtcaacatttgctggtgattttgggattggaaagggtctttgcattgtgccgcatttctggtcccattagaaatggccaaaaatgcatttgtcttttgtcgttttgcgttgtctgtggacgccgaaagttcagcaaaactttgatgatcgccgtttggtgattggacatcgttctgaaaagactgtaatattccaagtaattgctgtgcactttcaagtagatagaataggaaggagggcggtgacggggggggggcgaagaggacgcattttgcaccctttccccctccccgggggagatgacccttcctcccaaaagacgcctccccccccctcaacaagcaaatcaaaattgtttattttcactctaaaactaatttgatcctagtgacctttggcacccctcattcatttgtccaattgtttccccttgtccctcaccccattcgttgctgttccgacattattttgtggcatttcctcccactgctgttgctgctgttgttgtcgatgcttttgctgttgtttctgttgcgtttggctctgttccttttgctgctgcacattgccttctccgtgttcgttttctccctgctgattttgttgttggtggtgttgctgctgttgttgcatcatcatcatttgctccaacaaattatccaatttcatcggcggcaatttttgttttttttaaatgaaatgaatcaaatctattcaaagaaatggctttgattcttttcaaaacctaaaagtacgaagcaattcattttggacataatactcaaaataaatacaaagcgaagaaaatgaaggcggaaaggggcaattccccccacaaccccacacattcccatcaccagcttcccaagcagtaaatgaaaagagaataaagtaattggcgggagacggtgtggagagaggaaagcgcctcaggggcttttgcttcgggcgatgatgggaagggagaggagaagcagccgctggagaagagcgaccgcgtaagggacaaaccgcctggggcaatgctggtcgggggcgtcgaattgtgtgggttggggaggaaggggatattgtatttatggtctattaatcgaaatacattataaacaagcatataaaaaattttttttctgattaaaaaactctataaatcattattctactta

SEQ ID NO: 5785 - DNA, 1150 bp, Heterodera glycines
atgaatggtgcacgacgcatcacaacggacgggcggcgattgtcccacaaaacgcaccacagcaaagaataaacgcatgggctgctgctgtatacaatgtgctgttgaaggcagaaacggttgtgaaaggttaaaaaattccttctcgaaggaaggaattttttgtgcccctgggctatggcaatcggcgggagtttttttgagtcagcactaaaaacggtaacaaactcaaaatttaattgccacaaacaaatgagtgagtattttttaatttgtatagataagacttgagagaagattttatgacagggtaattttggtaacagatcatttaaaggcataagaaacctaaatacgccgaaggcggattatgtgcgtgagcatggctaaagcatgaatttttggaggagggggggggggggtgtttctgatactgcttaaaaatgctcaattctgctcaaattgtatttcgcctcgagcgtcattccccgcgaatctccgctacgggaatttgtgaaggcggaaggagagaaataacgggagaactttcttatcgcccgcagcaaaatacgtagagggaataaaagcttgaaaatggtaggagaataagtgaaggaagaaccgatggaaaagccaagcgcaaaaaacaaatcaaaaattaattatttaacaaaaacttttaacataaatgtatgaatatgatgaaatatccaatctccttctccggcggggactgtgccaacgacggctcaacacaaatgccgacgatgccttcctaattttgttatcattttttcgccttttcctccgccccttaatgcatcccaggcaaaaggagcagcagcaatctcagcacaaaattcaagcgacgcattaaataatcccaatctgtgccttctgatgggccgggggcgtacacagacagagaaagaaaaccttttgtgttgttaccgaagacgaagattatatacagggacatagggcagtaagtgattgaaatttgtcaaaatcagaacaccgggctcaaaaaatcggattttgggttcgaaaatcagaatgagctgacaccaaggcattgtcacagaaaacattcgctaattccttacaacaaggatcaaaaagagggtagccagatgaaaatttcaaaaga

SEQ ID NO: 5786 - DNA, 8222 bp, Heterodera glycines
ggtttttttgtgttgtcaaagaaattgaagaaagggtgagagaaatattgttaaaaaaatgagtgacagataggagagtttagggagaacgcaaacaaggtggtagagagagaaagggaaagagagagagagagagaaattcgaaagtgatagagaaattgaagaaaacgagaataagaaaggagatggaaaaggagaggagtgaaagactaattaatgagagtgagagagattaatgactaatcagagagtgagtgtattagaaagtgagagaaggagacagaggaagagagagagagcgaacgaaataaggaatattaatagtgaggaaagagagagagagagagagataaagggagagagagagagagagaaagggacaaagagagagagaaataaagggggagagagagagtaaaagcacaggatgaaaaatgcccaaacttggctaaaaaaatttgaatatgaaacaaaaaattttatttaatttcaaaccgaaacccaactcataccgtaaacgaatgaaatcattcagttatcgtaagaacagcaaaatttcattatttaccttttttcgttttcttctatttttggctttgggttcatttattttatcttccatttttcgtttggaccgtaccaccgcctccccccccccccttcttactaattaactaattaatacgaattatgaacaagaattataaattgcatttttcagtgtgtgtaaaaatgggtggggaattcactgataatcaaaacgaaaatgatttggtgacaaaaaaggcaaaggaacgaatggaaaaaggaggggaatttaacaaattagaaaagcaatttaaattaaaagagcattttaaaatttgattgaccaatccttggaaatgttttctgttagtgcttttagcttttttaggctaattaactgatttaaacaaattatagagtctttaatcaaactctttaacaatctcatttatccccccccccccccctcctcaaattggtcaatcttccgatcgtttttcctccactgaaaaagcaccatattattttctctccctcccccccccccgggggattcgtttttgtccatcgattgattggtccgttggtcgggcgaaactctctaaatttccccgtactatctcttcattctctgctatacagcctctctcatcttacgtttactctctctctcctctttttttattatgttaataattctgtagataattatcaaatcagtgcctaattagttgaaagaaatgtttaaaaaagtgacgaaaaaagataataaaaaatattgttctttttctattttggataataattcatttaattttatttttattcattttcccctaattactttttgatcaataaattaaaaaacatttatatagattatttgcctctgttttttttgttttgtttattccttttttaatcttttcccttttttctccccccccccccccctttttttgcactttttgcccattggaagtgtctgctgctgctgttttcctttttcctgtgaaggacgtctcgaaaatcgcttcgtccgccggtggctggctccgccggtcaccccgcggggaatgcaatgggcggggaggggcgggggacagagttttttgggctacggtcatagggcagcggcggaggaggcacaaaaacatttctttgagttgggctgtgctgtggtgttttgttgtgggttttgttggctgattgctgattcaattttttatcataaatattttacatttttttcattttatttaattaacttttcaattttttcaatttatttttaaacttttttcgactgttaaattattaccaatttatttttggtgttttttattccaattttattttttaattatcgcttcttttttggtttctaattttgagcttttcgtcatgtctgggtaatgctgttgatctttgggtttggcatttattatctccgtttctttttttgcttccaaaattaattttggcgcttttggtcattttctcacattttttttgttttttctaaaaataagcgcaaaaactcgtctggctcctctgttgttttgtctcctaatgactttttgtgtccattttattattatgcctgtttggccgttttggccaaaaaacaatcgctccttggcaacgctttgcaacatttgaaaccaaaggccattcttggccaattaatggcgtgtgatttgcgcgcattccacgtttggcatgtctgagacgaaaataaaaatgttggcacaattcggcgcctcttaaatatgcgggaaataacggcgaacagaccaaacaatatgaaaatggcacaccaattaattcatttgtggcggaggcgcattggcacaacgacactttgcaaaatgtttcttaccgtacattatggcattttcccttgtatcatcctcctcccattttgtgccaataattaattacctttgtaattatgccgcgggccaaatgcaacaaacgcgacaaccgttcccttcatcattttgtcccatcaaaaagccattttgggacgaattttgagggggaaaaatgcctccggggtcggcggtccgccgtttggccaacccattcattccttcattcattcactttactccccgtctaattcatgattaaaacgcaacaccaccgccaccggcaccactcccttcggcttctgctgtggccgaaaatagctgacacccacagattagccgccaccgccgctctgccgagggcaaaaaccactcattccttggccccgtcccttcgggggttattttcttccatctgccgccgggataaaactcaaaaaaataacaccgggagcggattaagaagatccaaaaccaaaccatcttcttcttcttcagcgttcattcgttctttttgctttctttccctcggccaaatattttttggcattttttgcaattatttgcagaagcttagcagagtaatcatgccaaaagtttggttgactgtattgcgctttcattttggagggattctatttaaattttagggttttttaatttgaaattttaatttttggctatcaaataaagagccaacttgagggtccaacgacagcagctgaagaatgactttccgctgtttttggaggagttttttgcagaaaatttcttctccctttgcctaagcaatttttcttctaaaaccagtccccccctccctctctctctcccctattttcctcccctcgccaatgtccgtccgtccctctccttctccgaccatggcttgtgatctgctcctcctcctcctcttgctgctgctgttcggtgcttcgttcttcaccagcgacttttgttctctcgcttttcctctccgtgtctgcctttctttttaccatactatttttttcctttaactttctttcacttccgaaatgcacttttctctccctgtctttcttactttgtctccttctttcttgatcaaatgctttttttcttttgtctcgtgtccatttttctataacctatcatttacctctctccttctctctctctctctctctttcctcttcgctatttctttctttcttctctcgattgggtttccttctctaccgccatttatcaatcaaattaacgaattttttcaccgtagcccttcggcggggtaattaggtgtttccccgcccgccggcgacgaatgaatgaacgtcttcgcctctgctgaacttcagcagcaacagcaacaaattggggataatgggggaaaaacgatgccgtttttgactgactttttcggcatttgatttggtgtctttttaaactttgtccgtttatctgtgaatttctttttggcatttcaactctttttttggcatctcttaaaaagtgcgttcatcggtcaccgatcaatcgatcgatcgttcgcttcgctttttccatgtaaaagtgtccaatttttctctttttctgctgctgctgttcacaatgaatgaaaatgagagcaaaagtcgcacaatttgcacaaatagggggagggggtgaagcttataattcgtttcgtttttggaagaaaatccatcgacagaaaataaataaataatccatgcaaaaaacaaattggaaaatgatttgaaatcgaaattgttaagccttcgttgtaaacacaaagcatttaaacgttatgttctgtgctgatcagtgtccgctgatcacacacaaattttcattttggattttggtctttcctgaaattaactgatttaattgcaactttttccttttgatttctttatttgaatctgatcaaatcagtcagtccaccaaatcaatggtccgatcagcggagagtcaatgggcggggggcaattggcacacaatttaaaatattccgaatttccacttgtttttttgcccataatttttgcgcgtttttctgcgtctctgccttcctgtttcgcctcaggcgctgcctttttctttcgccgctttctctgtctgtctgtattccgtttttctgccttcatctcgttgtccagtcaatcttttcttctctgtcgctctctcctgttgcctctctctctctgctctccgttggctccgcccctttggctccgcccccggggcaacaaaaaacagcgaacaaaatgtgttcttcgccctcgtccattttcacaaattgcgccttaagaaaaacacttcgccccgtcggggaaattaagtggctctttccgaagaaagaatgggcgacgggggaaagggctgatgaccttgcgaaaaacgcacccttttcaatgccaaaaaagtgccaaaaaaagtccctaagggcaaaaaaatcaaaaaaaattctatattaaaacgtacgccataaaacttttttggacaaaaaacctaattaaataaccgtttgtatgggggcaaaagcgtttttatgaacgtgtggcgatgctccgccgctccgccaacacttcgcttgaccttgcggcgttaagcgatcgcgtcgcctcccctgggggaaacggagaatctccccccgggttgggtggcatcaccttgagaggaaaaacaagtggacagatcagatcaaagcaaacagatcaaacggcattttttgtcttttttaaaccgaaaatatttttatatgccaaatttaattcaaaagttacgataaataagctacgctcttaggcaaaagcttatcagcgcgttgcttggatacttttcaaatataccaaaatttattagagataaaagagagcacaaacaaatcgcctaccatattcattcatttcgtttttaacggtatttctcaaacaaaaataatttttgcagaaaaaattgtttttaaaatttttaataaaaacatttttattttttaaaattccaaatcaaaaaagctgatttaattattttgttgcagaatattttcctcaaaaaattgatgggacgaaaagagggaatttagtctgttttaattccaaaatatttttgatcggagattttcatcagtttgatcagtcaatttgtcagacaaacatcgtacaaatcccccaaaattgtatgttcgttcagaattcggtgtccaactcatccgaatccgccagcagtgatcagcaccagcaaaagccgtccctcgtgctgcactcgtcgacagcagccaatcgcccgccgatgttcccccattcgctgctccagggcttcactgcttccgcctcctcctcgtcgtcgtccgccgcctcgggcggcggtgccgtgccgaacggcgctgggggcggtgccgtctccggcgcttcgcccgccacgccgtcgtcgctgctgcagacggacagcaaaccgtcgcccaccgaaatgctgctgtccacgtccgcaacggtgccgcgcacattaatgattgttaaattaatgatcaaaaaggcttccttccattcattaattgcttttaggcttccgcgaccgccgctcaattggccgttgccgcacaaatgtcggcgatgaccccaaatcagcagcagggtgtgttcagttggaagaaggaatagtagggtccaaacagaatgatttgatgctggaatctgaagcagttcattcgcaaaaaacaacgaaattcccggctaaaaaaatgctaaaaaccccaaatctttggaattatccatgtaaaaattgttttgtcattttgttggtcgaggcggactttttgtggcactttttttttaaatcgtctcttcggccaaatcactccatatttgatcctttcccccttttaggctccaatcgcgagccaaagccgttcaaatgcgggcactgtccgaaggcattcgccaacaattcctacctctcgcaacacatgcgcattcatttgggcattcgcgcgttcggaccgtgccaattctgtggcaaaaaggtggcacaaacaaatttcgaggaagacaaatgaacaattgtccaatttaaattttaaaaaatgcataatgccatgtcttcttctttccccgatcagttcacccaattgtcccacctgcagcagcacattcggacacacaccggcgagaagccgtacaagtgcaaatacgcaaactgcgacaaggcattctcccaggtatcttctgccgatgactgacgtactgaacggcacaaaaccattaaaaaaagggggggggaggtaaacggagaaagcatcccccccaaattttgaaaaagcatttgccggatcaaaagatttttccgccccattgggtacccccaaacgagccacaaaaaaacaaaaaaattttgtgtacaaattgccgtgcaaaacatcatcattttccctctgttcagttgtccaatttgcaatcgcactcccgatgccaccaatctgatcggccatttaaatgcaacaggtctgaccagcatgggcttttgctgatctcttctctctgcctttatgtgcttactttatatgtttgcttatgatcatcccttgtttttcctgaatgttttctcctgatcattttcatttgatcagaaattttttctgttcattttttaatttcctttttccctgatcatttcttttcccattcttttccccttcttctgatgatcactttccctcttccaattgatctcccacttctttctcacttttaagctgttacaaatgcttcgctgatgaagccactctgttggagcacatcccaaagcacaaggagagcaaacacctcaaggcaagtgcaaaggcaagtgtgttgtcattgttgtcctcgttggagttgatgttgttcatcgccttcgtcttactgacccgacttgaaaagcttgtttttggatgcccccatgcctaattcgattatctgctgtttatcactttgagaatccccaccaaaaatcattgattacgccctaatttgtccatttaagagggtattattaattttaaattgtttattttccatttaattttccatttttcgttccctcatttgtcaggtgcacatttgtcccttttgtggcaagtcctattcgcaagccctttatttggacaagcacatgaccaaacacacggatcggcgcaacgaaataaggtaagccgaaaaatttgccgaaaatccatatcaatttttcaaaaaaaaaattcagcaaaaattactacgccaatgggctgaacggcgtggaggtgggcaatgcctttggcattttggacagcagcaacagtccgtccaccgttctgttcgacggcctcggcggtcatcttgggcaacttggacagcaacaacaacagcaacagggatcagcagcagctgcagcggcggcggaggaattcagtttaagtaagtgccatttgtggggagggggcaagtgccggacttaagcgaatgccaaaaagttgaatttcactttttcggtgtcatgacaactcgtacaatggcttaggctagcctaagatttaggcttaggcttaggcctaagctttaggcttaagctttatttttgtaaaatttttagtacgaattgcctttgtacgagttaccattggcccaatttttcaatctcactcatataccataagattgaaaagtataaaaccaattttgaggataggcgcaaatgccacaatcgatgcgcacattttaaaacaaaataaattgcaaattgttttattaatttaaattttactcgggaaataccgtaatgcttctttgtttcttttttattcatttgtgttaaccttgtccc

SEQ ID NO: 5787 - DNA, 1357 bp, Heterodera glycines
gaatatgccttgtatcttttgcagtccgttgtgccttctaagccggggcgggatttgctggtcccatgcctaactcctgtatttatttgaaactgcggagaaaatcccatttttaaaactatgcaattcagcaacactttgaatttgcgtgtcccctaatgcagcataatttaaaagaaacggttccgccgcgattaaaattcgtccgttccgttcctttctacgcttttccttcatattcacctgtttctgcgctccttcgccgcttcttctctttccaatttctctaaatatttttctgcttgattccgatttttctcagtttcttgattattttttttcactttttcataattttcttcgctcattagcattccgtctatgctaacaaattggcttgtttcgccaaacatcaattttattgggccgtcaatttgtggtggattgccgaacaaatcgcgcacatattttgatcctacatacaaaaacatttattacaatagaaaccgtactatcggtcttttaatcgatattttttgaattttttcggtcccatttttcgcttttgtattgaaataatattcatttttttaggtctcgataaatcactagtaaatttcgaaaattttcactacattttatttggaaaaaatatatattttatttattttggacttttatggagaaattgccggcttaatgccggacccggtagaaaaaaatcgctgataaattatcgatctttttggatttttcgatattgtataggaaaagccgatcgagctattttaaaaagcgcataatcataacattccaactccgataatgtttcggtcacgggttttgctattctcggccaataatattatgcttaccggacttcccttgcttcacttcgattttgacccattcgcccgtgtcatccatgaactcggcaattttgtcaagtccattagtctctgttgggtatttctcttttacatcaaattgtcctcctaccgccacgaggtgttcggcgtggacaggcaattggtattttgtccaactgtaaattatctctgccggatacagaatttccgtgccatttgttcttaaaaatcgtttcttcccgccaaatgtcaaatcctttggttcttcaatttgcggcagattaccaaacaaatcgcgcaaatatataaccactgaaatcaaaaacaaaaaaaaaagtcaatttgtataaaatttggtgtcttgaaaaatgagaaaattattttgtttaaaaaataaatatattagagcccggaattttgaaagtaccgggcccgggaccgggcttcgacaattgaccgggaccgggccgcccgttaaaaaaaagccc

SEQ ID NO: 5788 - DNA, 3815 bp, Heterodera glycines
ccttgctttacttcgattttgactcattcgcccgtgtcatccatgaactcggcaattttgtcaagtccattagtctctgctgggaatttctttttaacatcaaattgtcctttcgctataagctctttgggatgaacaggcaatcggtgatttgtccatttgctaattggcacttttgggtactgagtcggcatttgattgcccgcattgtccgcaaatggatcatgggaattcttttttttacgtggtttagaagtagtcgttttatcatttggtcgtacggtttctgtgctatttgccaaatttgcgggagcaatggccatttgttgagcctgattttgtgaggtatcccccaaacttaacatatcgagactaagtacttctgttggcaagttatgtgttagtttggtttggccaattggttgtggattaattggtatttggtaattggtttgggcaattagttgcggatttggattttgataattggtttggccaattagttgtggatttggattttgataattggtttggccaattagttgtggatttggattttgataattggtttggccaattagttgtggatttggattttgataattgggttggccaattagttgtagatttggattttggtaaattgtttggccacttgcttgtggcttaatgtgcaacgattcgctggacatatcagcagcagcagcatttaatgattctattaaacaatactaatacacgttaattaataaaaatgaattacttacttccgtaatattgaatcacatatattattttattaggaattattctttttatttaagaaacccaatgaatacgttcttggatggccaaatcgtttagctgcttggtaattggttcattttctgcaatgctaggccttcgggttcttcgacttttcgtaatatctactgtttgcctcctgctggaatggctgctatccgcttgggtactgcttgagcttgtgacatttgccgcttcggctgacgccgtttcagccgctctttccggcaaatgccatgcatttgccgctccttttttgttctgtccaattgatgatagatcggtcagcgacggcttttgatttgggcgatcgcgcgggggcgaagcgtcgaaaatgggcccattttttgaagcggcttttacttgactcaatggcacgcagaaaaaggaggcacaaaaaaggaaaaaaggaagcaattccatgggagaacaattcctgaaaaaatatgaatatagtaaatgatatgcataaaaagaaatataataaagccaaaagaatttttgctttgaaaaatggcaaaaaatgccaaatcgattgccaacgcacttaaattcattttcttatatgctctctggctgaatctctgcttataatatagacgtggctttacgccgctgaaccatttccttgaaaaactaatactgacaggcaattattattaatattaatatgtagagctcgacattttgaaaaaagcctggacctggattccatgttggacctggattccaggtccaggaaaaatccaggctcatcgagacctggatccaggatttatttgatctttttttgaaaacttgaaaaaacatcggtcacttgaaataataaattctaaaaatttgtccaggaaaatccagattttttcgggttttgcctggacctggatttttttttcacattagacctggacctggatttcctggacaaaaatccaggaaaatccaggtccaggaaaaatccaggctcctcgagacctggatccaggcctggactggattttttgaaatttgttttaaaaagcaaataaatttttgaaaaaatcaattaattgcttgggaacatctaaaaatatctaatttataatagacctggacctggatttcctggacaaaaaatccaggaaaatccaggttgccgaaaaatgacctggacctggatccaggaaaaatccaggcctggatccaggtccaggtcgagctctattaatatgtattataatgtgtttattttcactcgtttttcattttatgaggtaataagaaaaaatataacaaaaatttttaaattttaagccaaatttatttgaacaatatttgacttttgtaatatctttttttaaaaataaaatttttttaataaaaaatatatttgaaccattttttaaaaacaaaatagaaataaagaagaaaaatggaatttaaaaatctgagagcataggcatacgaaacgagagcaaatcactgaatcaaaagaaaatttatgtgtaaaattcaaaaaaaaatatattaaattttacacaaaaaaataactttttaattccgtggaatgctcggagagacacttccagtatgaggagggagttaagccgaacgcatcacatcgttttgaaaatgtcgtttcatccaaaaagcatatcacaaaaccctcaaaaaaaatggaaaaaacactgaaaagttcccaaaagcgctgaattgtcacacgctttcatgccaagtgtccatggagtttcggaactaaattttacatgtattggggccaatttgtcggacaaaagtgcaattccttggtggtaaagcaagaagttttggcgcgacattttggttattctgttgattggcattccttttgcggtaaatttttggattttgatttttttaatgtcaaatttgcagtttttgtctgagaaaataaacaaaattaacaacaaaatagacgaacagcaaaaggtaaattcattggcaataaattaaaatattttatttgaaggttttccttttttcaggcgatcgacaaaatttgggatcccaaagaaattcagcaggtgtaccgatttttacaaaactgaatcatttcttttgatattttcttcaaagttcattattagggtggaaaaaaggacctttgggaaaatttttagaaaaagtttataaatggaaaaaattttcaaaaattaaaatgggatggatataaattgtctaattcggataagtaattttgcatattttcagtcatttgtcagcgcatcgacctatgagaaaatggcattttttgtgtgcggaatcgtcgttggcttcacactttctgatcaaaggaaatgccaacaaaatttgggcggaaaaacaacataaatgcaaaggatgatgaggaagaggccaattgaaaagaaaattggggaggaggaggagagaatgggagacgagtggaggcaattttagaagcgaatgatgagcaagaaaaggaggaggaggataatgatgaacaggaaaaggaagatggaagtaagtgaaccatttttgagcaattggaagggatgacgaacgatgaggaggacaaggaagaattcgacaatgaggaagaggaggaattggaagaaaatgaaggaaggcaattctggtggccaatgatgagagagaaaagggggaggagaaggaggaggaggaagaattttacaatgaggaggaggaggaattggtagaatgaaaaggaagaatttgacaatgaggaggagttgacggagcagaaggccatttagtgagtagcattctcaccgagaaaaaatttttacaaaacaaaattttttttttgaaggaaatgggggaattcagcgaaatttgcgcatttttaagatttcttttagcttttcggctccattccccttggctttacactaaatttcattcatcaatgaaaaaaaataaaaattaatttgtctacatttttcagcaaccgatggcacaattgaagaagggaaaagagaaacgacgaaatttttgcgggcaagttcaaaaga

SEQ ID NO: 5789 - DNA, 2062 bp, Heterodera glycines
aatttcgatgaatttaaaacgaataaactgggatgtaaacggcaaaacatgaacagatttttctgtcaacgcacgggcatccatggcacaaaagcatcgcctttcgtcgcctataaaaaaaattaaaaattagcaaaaaaaatccaggaatttgtgtaaacatttgactcaactataaaaatttccaattttgagcatttataaaattttacgagcatatgaatattttaaggccgggtaaatttttaattttagataataaaatttgcgttcaattcatttttgttcagtgcaaatggaaactccaccttgaaaatttcgttattcagcaaacccatcacaaagtacagtttttgtttcacttcttgatcagacaaagtcgacgcgaaattcagacggaccctttccgccagctaattataagaattaagttaaattcagaattaaatgtaataagtttggtgcattagcagaaaccatacacaaaggggaggggcaggggtccgacagagtttgcgagggaatgggctgggggggggcaaaaattcgaaagaaggtcaagccatgtaatggattttttaattgtcagccaccctgttcgcgggtcttctcgaaaaattggatagtaaaggcgacccggtggcgccgcaacacatcgtcggaaaaattaaggtgaatttgttaagaatatttgtataaattttcaaaaagtttacttctctctttctcagacgacctaaccctcttcacggcactcctcgtcccgaaccccccccccctcactgggtccacaattttaaacttagattttttattttcaggttaagagtgcataaaactcacaacattgtccgtaaaattgtagtagtgaatgaagcacagagacgacaaagtctgattagcttccaaagcaattttaagatcgtccttcttaaccaaaagctttgttagaggtgaatttgagaaaatacgctcggtactagtttagatggtaccccccccttttttagggaaaatgtttttttgttttaaatccatggaaagatatttcaaagggtttttggggtcgctaataatgaatgttgcattcgtttttgcctatttagaactcggagcccaagttcgaacaaaaagtcgaaaattggaattttacaaagtttacttttatgtccgaatgactattttttggtgtaataatggtttgtgattgtttttgctagtcttaatctattttagaacaagagatttcgaaaaactcgaattttccgttttttgttcgaactcgggcccggagttctaaataatcgaaaaagaataaaaatttttcaattaaaaaaaaaggggggggggggtgccttcgaaactaataccttacgctgctcttttaagcattacatttgtaaatgaataagaaaattcgtacggccatgcgtgcggtgcgaccaggcggcagttgttcagcatcgatggtgatcaatagtagaaacaaaatggggtcgggggtctacgggaatacgaaatatatggatattgtgggggattgatgttgagccaagtatggtgtgttgtccaaatgttgtcaaatgttgggacaaatatttattaagaagtaaattgggaaatcggcggaagaaaatggagaaacgatataaaattagaagagaactgcagcaggagattaaaatataaaaacgactgaactgactgaacaacatgaatgagaaagaataatgaaaagagggatcaattttgggactgaattgggaaattgtcaaaataaatgatcgcggtaatacaaaaatattttaaaatgggatcttttgtccgtttggtatgacatctttaaaacattttttgggaatttttcccgcgattaaattccgttttttaaataaatttaaataaaaaatcattagaaattttttttttataatcacggatcaccacggctcacggatcacggaaatcacggggattttggggtgctgtgatcacggttcacgggtcacggattttttttaaagccccgtgatcacggctcacggatttccgtgattggaaa

SEQ ID NO: 5790 - DNA, 5493 bp, Heterodera glycines
cttcagttgccattttttacaggccaggggtttgctctttaaaatttttaaaaaataccaccttgtagaggacccttaggcggagtgccctttcagcgggcactttttgattcgagttttacaaaaaaagttaggggccttcaaatgcaaacaaaagtgagaattcagtccctggtactcagttggccctcggatcaaaaaacctatagttttcccagatgcgcctcaaaaagttgtaagacccttccaccactttcagggcgctcccggccttcggccgggagattttgttttttgaaacgaaactccttgtcaatataacgtatatagtaactagcgtgtgggaattgacgggggtccggtgcagcagttgaattgcacgcgcagtgattgcacggcgtataaagtgcatttgaaaatgcattggattgtgtgtgttgaaattagcgcttcgcgcaaaaagacttcgttgctagtgcttgcgcggctactttaagcagtttaataatggattctgccccacctaaagtgttcattcggccgcttcgcggcctcattttttattattcttaattaattaattttaactaatatttattctaattaaaacattaaaatattatgctgttttaaaattcatttaattaaatataaataaataataacaacatatgcaaaaataatctaaatagataaaagttacttaaaaatgcatgcacttttaaatttttctttatttattttatagaaaaattattttcattttttaaaaattgaattataaaaaataacaaaaataattttgacttaataattagcattaaaatatagcaaaaaataaatcaaaaaatgatttacaccgtccgggttcgaacctgaccaacgcaaaatgatgcctcagaatccccaatcacgcagggattctgaagtcttaacgatctctaaagtgaaatctgattacatattcgtgatcagcggcccaaataacccctaaaatcattttttggaagatttttggtgaaaaaaattttccacacaaaaatcatggtcacacccctttgatcccgaatccaaaaatcacttttatttctataacttttttcaaaaaagtgataaaaagctaaaataaaatttataaaatagagcaaaaaattgtggattttttgagtttattatttttataaaatactttttcagaaccgagttctgaattttattatgaaaaatcgaaaatttccagaatttctggaataacttttattgtttgcaagatcgaaatcccaaataaatctcaaaaaattctccctatttttctctattttttaaactttaaatggactgaattggacctttttgatgggagttatgaattttcaaaatgtagcttaaattttcaagggccaaaaaattttaaaatttcaaaaatttttaaaaaattccaaaatgtctataactcaaaataaagtccatattcatgatcagcgacccaaattacgtaagaaaatatgtttttttaaattttagagcaaaaaaatgtgtccatgaaatttccaaaggggtatccctttggattttggctccaaaatcagttttatttttataacttttttcaaaaaagtgataaaaatgctaaataaaatttatataaaagagaaaaaaattgcggattttatcaatatttttgtataccttagcacattgtttggaatgagttatgaatttttatgtgaaaaatcgaatttttcaactttttcaggaataacatttttcatattaattgtagaaaaatgcaaaaataatgataaaattctcccaatttttctgcattttttgatcatttaatcttcacatttgacccatttcaaagggagttattaatttttgaaaattcccccaaatttcccctgggcgaaaaatgaaaaattcaaacacacccaaatttggtcaaataaaaaatttaaaaaattgaaaaaaatatagaaaaattttagaaaatatttccagccccttagaacatcgttacacgtcataaaaaatcatccacacgccgcgggattcgaacccgggcccccctcccggggggcccccagcacacaccactggaccaaccggttctgcagggaaaaactttttttgagttttcaaaattttttttatatcattcgaaagctcttgaaaagttgcaacccaaaagtgccgtgcgtttttcgatggcgcaaatgtaaaaaaaattattggcaaaaaaccgaaaaaccgtcgagggggcctggattttttttggtcgaaaatttcaaaaatccaaaaacacggttggatgcagctcaaaaagatgcactgctacttgtcagggaaaccggctccgagcacttgcggccgagttattcacgaaaaacagaaatccggttttttgggtaccaatttttggccacctgtcccggtcacggatttgctcggatcgaaaaatgtttgctggcaatgttatccggcatagtccaactggatttcctcccagcaagcgtttttcgatctgagcaaaagcaaaaaatttcgtaacactgagactgcaaacaggggccatttcagcgccgctggcgctcacctggccaccggaccggaaagcccgtatttttcctgaatccgcctcaaaaagttggtcgggacatcgaatttgcaaagccctcccggcgctcgttaggctcaaaatagcaaaaaagtgcgaatccccacttctttctataatatataaactagcgggtgcgtgaaccgtcggatctgggcttgggataaagcgcttcgcgcttcttgagcttcgctacctagactgtgaagcgattcaaattgatcgaattggttggagattttttttttgaatttttaaaaaattattagaggcttttagtccacatcgaggctcaagacgggcgcttcgcgcccgttttttaaatctgttgaacttacacgggtgcttatcgcccgatgcgcaattttcgcttcccttttcttccaagtaagagtttttgagttaaaggctcgtgaaagtacgtcagcaacgtgattctctttaatggagcacctaattccatgatccatctgtctacttttgaatttccgaccgaatttttgcttttgaacatttggggaagggccttatggtcggtatatacgattgttggaagccatgcgataaaatgcttaaatttttgtacggcaaattttatgcctaaacattctaaaactgttggcccataatttgactcggtttgtttacagcgtcttgatgcgtaacaaattggtctcattttcccagattgatcccgttgacaaagcactgcacctaacccatctttcgacgcatccgaaaaaatatgaaatttaaattttggataattttgtgccaaattaaaatccgggtatttaagtacaacttcctgaacaattagcgattttaatgattcaaaactcttttttgcttcgtccgaccaaattaacaccttagcatcctgttttttcaacatttttgttaaaggtgccgcaatttttgcaaaattcataataaattttcggtgccaattgaccattcccaaaaatctttgtaattctttgattgtttttggcatcggaaattctttgatgggtttgtatttttccggatcttttgcgagtccttctcgtgtaagaatatgtcctaaatatggggtttggtctaaagcaaaaccacatttttctgccttgactttcattccgttttcattcagtttttcgaaaacctttctgagatggaccatatgatcttcaaaagtttttgaggctattaaaatatcatccaaatagacaaaaacaaaatcattcacaaattcgcccaaaattttattcataaaacgatggaaggtggcaggagcattacaaaggccgaatgggaggaccaaaaattcataaagaccaccaggtactgtaaacgccgttttttcaatatcttcttctttaactcgtacttgccaataccccgacattagatccaaaacagtaaaatagtgcttgtttcccaaatacatcaaaatttggtcaatgttcggtattgggtatgaatctttgattgtcacactgttaggttttcggtagtctacgcaaaatcggattgagccatcttttttggctactaaaacaattggagatgcccagggagagtttgatggtcgaattatttcccgtttcaaataatcatttatcatttctgtgacttttgttcggacaccgaatggaattggactaggagcagttttaattggggttgcgttttcagtttttatttcatggggaaataaatcggtttgagtgagttcaaattcatttaatgcaaaaacatcagaaaatcccagccaaaattgttgcattttatccttttcactgtctgagagagcaccaattttgttgttcagaattgaaataagttctttatttctcaaattccgttcgaattttgcatttcttagggttgattttggtcaattgttttaaaaatcgaaaacaggctttaatggaatcaataaagcaattagcgtaaaaccggaaataaaaatatactcacagcaaacaaattaaaaaattcagcacgtttcaaaacccaactattctgattttaattttttcgtgtaacttacaaatttcagatgacaaatcactgcgtcttctatttcttttgctttattgcattccataactagcgcttccatttctggtaatatttgtgaaacggctgctccccaacaaacgcccacgctcgcttcggtttttctgaattgtccagcaccgtgtttgtgtgatgccgcgattttgtgcaattcatggaaggtctcaaaagtggataaattaaataacgaaaccaaataaaattatatacattgcacatgtgtattgaattaagcgaagaaaccattttttcattgtcaatgacctcaactcattaaatatttgttttagaacaaaattttgtgaatatcgagaatatggccaaaattaacggcaattaactcctcccagtctgtctttaaccacccaaaatttaatctttttaaatttgccattttttccttttctgattgaacaggataaaacaattttaatgggttttgtctcataatataaaatttgctaaacattcatgcgtttttttaccgttggacggttcaatcccaaagtcatttggttatatcagttccgggtttgtaactattcagcgattagttgccgcaaaaaaattctttcgtgtttgctcattagaccgagaggagtaggattcaagcccaaatagaataaataaggcaaacttacccttaaagaaaacgggttgttgagcaaatcttcgcgttttttcagctcatcgttaaagaatttgtcgttgataaacggcgaagcgtcccgggcgtttcgagacatttcctcgagcctttcgccaaaatcgcccacgcggcctgggtaacggctttgatgacttcc

SEQ ID NO: 5791 - DNA, 1680 bp, Heterodera glycines
  unsure (1)..(1680): unsure at all n locations
tttcacaaataaaatctaccaacaaattcccattttcctgtttgccagtcgcataaattaaacaatttcttctctgattctttttataactcggaggaacagcgcaatttttgcggaagcattagcgatgaaactttgtttgattttgaaatggacaaagatgaatcccaagtgacaacaattgcgcatttcggtggagaaaacggtttagtttcataacttaatttaatcgattttttttcgtgctttagcgccgacaaatggcggtgccaacaaaaatcattttggccttggattcggaatattcgacacgatggacaaaaaaggcgacgatgatcacaatttcctaactgttcccacacagcaaaatgagacggactttggcatggaatttgacgaaataaataatcgaccaaacctttttgggagagaaaatgcattcgatccacgctttattaatgcaacgtccgatcagattggtgcgcacatggaataccaccaaatttgaggaaaagagtggacaaagaaaggaaaaggggggagacggatgaattcgaaattggcattttctgngggacggaccttaaaatggcaattgttaccctgcaatttgatggtctccccccatagtttcctttacacgattcaattttcattttcacaatatggtcccanattttcccaatttctcttccatttcctatttattccgattaatttgtgatatttattggcattttttatttaagtgtttatggcgattacattgtaaattgactcattcatttactaattaattaacacagttaattgcttccttttttaatattttgcataattccttctcttttgtgtgttgatttaacatatacctaaatcatcctccgtctgttgttttattatttatttgtacttttctcgtttgttttctccgttttctttgctttcgctaaacgtttcttttctcttctgtcaattccaaattcaaaaacatttcctttcctttgcacatatgtattctctctctctctctccattttcttttgtgaattggagtttatttatgagaataaagtcgtgttgttaacaaaaaaagtcaggaggccattgctctttttaccgattaattttgacaaaaattggttctactaatttctggatcccttatttgcaagagttagtttagcttttgttttttatccctctttaattggaaaatcaacccactttgggtgtgccatgattttccggcaccgtttaacgccctttggttaattgttttctattggtctgttttttgaatagtctccgttcgaccttcgtccattcccttttatttcctacgaaatcgcataatcattttcttgccgttttcctttcgccggccttttccctttctctttgccctctttctctttctcttgcatttgcccttctctcctcactctgtctgtctttctcgctctcctctctccgcattgtctctctcattctcgtgtctgttttggctctaccccccgggggattctattgacagcattcgccgcttctctgcgctttctctcattcgctcactttttgcgggaaatttctttttctgagttggacgaggacagaaaaagaaattgggacgggaaaaggcggcggcggtggaaaaagagcaacagcagagagggagag

SEQ ID NO: 5792 - DNA, 5058 bp, Heterodera glycines
  unsure (1)..(5058): unsure at all n locations
agtaaaactaattattaattagaataaaaatatctattctgtacaaaataattacccaaattattttttaattattactatttatacaaattcggcaatctctgaacgaaacataaaatggcacaacgatatgaaatgaggtgcaaattcgattccgttttttcttttttttgtgagtgttattaagcaaatttagtggaatcatcgaattggcgtcgtcttcctcctcaaattccattcagcagaacaacgacttgcgcattttgcgaaattcgcttaaatcccttaacattatgccgaccgaagaggacatccgcgcgaatgtcacggttaaaccgccatattccggtcaatcgggcgaattttattttattttttcataattaaacggtctccaattagtttcagtctcaacaaatttttggtgcttcgtttattactacgaactcaacgaaagggtaatagtaaaaaattgcaaatgttttgtcttgccccatttggtgccgaccattcattttcttgcattttttcaccacttgaaggtcggcgaagtgttcaaggccgaatggcgacaacacgcgcaattcgaacaaccccagtgagggaggggggaaagggcagagaaagggatggaataatgggggaggaggagggaaaaatgatgggaggggaagcggggatgaaggagggagagagactcaatggtggcaagggtaggggacacaattagggagagaagtaacgggatacaaaaattggagggggggggggtgatggtgagcaggggctaatggagtgccaagtagcaacgagtgggttgaaggactgcaagcggcaactctgatcaaaattggcaggttgttcatcgacggcggcgttagcggatcgtacgaaaacacgcgctactgtttgggtaaccgggggaaggaattaaaattaattggtgactaattgtgttttgaagggatcatcggcaacatcaatcggaatccggtagtgagtaagtgccaacgaacgaacctcaaaattccctttctctttcgttccttaagctgatgtccgccagtccattggtcagagaaagtccctttgccactaattgcttttcccttttcattgcctcaggcaaaggccttcgattgtttcagcgcaacgaaaacatttacttggaatgtctaagcgattctgccctttttgtccgtaaggcattgaccaattaagcgaattgccaatgtttctcacagaatgccctttctttgccaagagaaacggagatcatctcgcgaccgtttacaaattaatgaaaggccgccaaacggcgcattcggccgaatcgtcgggtgaacaaaacaatttaaatgtgaacgaatgtccaaattatgagaagagagactgaaatgatccgatggcttcctttttccgtcttttagagtccatttgcctttttgacaagaatatgttcgacgatttgctcaacgacgcctccctccggggatataattccctttacgccctcaacgttcgtccgtccgtcccttctctcaatttgaatttgcttaatgtttccatttgccttcagattttttgtcagtgtcgtatcagtttcgtgaaaggtcattagtaatttttgctaatttttgcttttaattggctgactttaaatgtttaggctggggtcagcagtaccgacggcaaaccataagtaagttatgggtgctattcgctgccaaacacttccatttcaatggtcaattgcttgctaatcagcttcctgtccgatgtggatcgaattgcaattcccacggccattacaaatattggacagggcactgatggaaagtgccagcgaaatcggcatggaagaagtgcacagcttttcctgaccaaatcaattcgtgatcagtggtgccttcggcataccgaattataaaaacaaagacattacccgtgttacaatccaaccgatcatttttcatttttattgaacaaaattcacttttgactttcgacccaacaaagtttaagtttggtaacacgggttgactaacacaagctttgattaatttatttgattcatataatcagctaaataaacttgaatttattgcaaattttacattttttttcaatttaacaaattaatatttttgaaatatcgaaatataaaaacgaaagcaaaatatcattgtttatattcaaaaatgagttcattcttggtgcagtgaagaatcaatcattcgttcttttggctttattttccccgcacttttcccaatttcgctaatatcccacggggcacgaatggaccctttttctgaagtcgttgttggccaccaaattaccctcgtcgtccgttagcaccgcctgcaccgaggcactaaaatcgcgcgagttcgttgtcatattatgcccccgggcacgcaatgattggagaatggactgaatattgaattataaattaaaatgatcaaatgttacttggggaaattcttcctcaaaatcagtgacaaaaggtgtgaattggttgtgcacgcgtggcgtgtcgatggcctccttcacggagtgattgaaggccaacagttggaccaacacttgggacagtgccgtggggatcattgtccctccgctggcaccgatcgcgagtttaacctgtggggcgaatgtgatcatttgtcggacggacttattgacatttcatttcatttgttgtttgccttgagtaagaagcctgttaaaggcgttcttagtctatcagctgaactacggcactcccttctctcgcccactaatgctcgataatattggattaattgtcgcctctattggtccattttcttcctctcggggaagcttctcctattttggcccctttgttttatttattacgtttagtgatacagtacggagtatatatattcaaatttgaattgaatctataccgttttcttttccagaagatacagtatccctttccgatagtatcccctccctctctccctccttccccctggtgcccacctttttgttctctttgtgataaacgatcagcggactcatcgacgacattggccttttcccgggttcaataaaatttgtctttgaaggtgccagtccgtaataatttgttctgttgggttggctgaagtcgtccatgtgatcgttccaaatgatgcccaattggggagatcggatcagagagccgaaactgaaaataatgcacaaattctgacggattgccaaacgattggccaattatttggccatcggttggcaattggtgccaccacttacgctttgttaattgagctggttattgacacggcgtttccatccgcgtccaccacaatcacttgcgttgtgcccccgctattttcagggaaaaacttaaaaattattcttttataattatttaaaatatgcaaaattgtgcctctttcgtcgattcggcaaaatccgcccatttggtcgcgcccattctttgaatttcactggcaatttcgtcaaccatttcacttttgctcatattcagcgcaatttcttccgaaattttgtcgaatttgacgtcgcctttaatttacagaatgtcttattgaatttttattttaaacttttcaaatctttttgcctaatttgtgtcgaattgcaaatgcgcgcttttgcgattcgatcaaacggtggtaataatcggcagaatgccaagggatcgatgcattgcttccggggggataaaattctaaaaaaaaattaaaattttaaataattaataaattcggcaccactcactaagcattacggccaaaatcagctgagtgatggcaaaactcgaggaaggcttcgcgccacagaagaccaatttgggctcggccgcgctcgtgaccagcaaaggctgttcgtccacaacagttcggtacgtgtgaaggtcttttcgcgtaataaaaccccctcaaaaaaattgaaaataaaaaatcaaaatccaaacctaaaaaattgctttgctttatccatttaatttttacgttttgttcccaatttttaccattatttgcaaattcttcggcaataattctggcaatttcgccgtttgcactgtaaaacagctgaagcggctcgtgactgagtgccaatcgtttgagtgtctcggccaaaatgccgtccctcatctgttcgccctccttgtaaaggtcgctggttgccggattaatgaagtggttccttaggaaaagtttgctttctaagtgcttttaatccctccgcccaaaattccttctctccccaaaatgccctcctcttcctttttttgcccacctcatccccaaatgggagctgttaatgattttctcgctgtacgtttccaaagtcttttccataagtttggagacgggaaatccttaattggtttttttttgttttttcaaatagatgagcatgagaccatcggtcagcaaatgaacagttggcattagcaaatccatccaagcgatttttccactgccaaagcgtttgaaagacgtccaaaagccgtgtaataagccgggagttgcgaccgatttgtagcccgaataaaaaatatttaacatttgtcaagcgctaattgttagtggtgttttgtttaccaaattgactgtcctccttcggcccattgccaaaagtgtctttggcggtacgcgcgggggccgtctcgcgggcgtcgattgttgtgcatttgccataaaagcttagtcaaataaaatgcatttaaatataattattattatatccttaccgctgataataggtcatcaaaaagccaccgccgagcccagccgagtgggggttaagcgcaccgacgcaaaaaccgaccgaaagtgccgcgtccacggcattgccgccttggaggagaacttttctaagaaataaatgaaacgaaaattaaaaataaatgaaaataattaattaattaaatcgatttaataaacaaaattaattaatttaaagttaaaaagtcttaaacaaaagccaatgaaaatgttttgccgagacaatttccgagccactattcctattttcgctngagcacca

SEQ ID NO: 5793 - DNA, 1772 bp, Heterodera glycines
aattatgaatttttctgggattggttgcggtttcaaattggcaaaagtcccggaaaatttctttaaataaaaaaatatgatattcttttgatttaattcttttgatttaattcttttgatttaataattcttttgatttaattcttttgatttaattcttttgatttaataattcttttgatttaattcttttttttaattctttccttacgctgtgaattccgtggtgttcgtaaagaatgtaaaggagaaaggcgcacagaataagcagcacaaaaatgaccacaacggcggatgccaaaagccaagggagtcccctgaaaggggaaaggaaaagcgaatgaatggcaaaaagaaaaggcaaaaaacggaattaataggggaaatgagtgattattgaaattaaaagcataaaataaatttattttttctataaaaatttaatttaactcaaatatttatatacctattataggtatattctttttaacaagaaaaaacttagattaaaaaaaaatcaatttttaaaatatttgtagagatgtcggtattccatttttattttctaaatatttggtcgaaaatttaaaaaaatacacattaaaatgagaatatttttcaaaatcaaaattatgatttttggaaggtcatttattttggtcgtgtgtaaaaaaagttccttggagtcttaacgaaaagaaattcttttttttagaaaaaaagtttttcccacccaatccgcgtatcactcctaatccattggaggtagatagggattctgatacgcgaatcgccaaaatgatccatggatcgcaaatggtaatatttatgcatacggatcgtatgcgagtctacgacccgaccttcgggtccatgtttcccttctaatttgggccatggatccggtctttatgcacacagacagctgactggtcctgacacgataaaagtttataataattatttaccctaattaaaattgcattaaaaatgaaagctgaataattaataaaaattatattcaattacattgtcttataaaataagtttaataagatttacgcactttttcctcatcaaaatattcgcagtccgttggttattattgttatgatgactattattgttgttattgttcgtattggtgccgtttcttgccatttttggcagatgaaaattcgacccattggtccgtccgctgctcggcattttgcagggcgacgaattcactgtcgatgtccctacaaatgaagtgaggaatttgtctaaaaagttcgaatcaattttgaactattcagtaggataggccacggtagtttaaccgataccgaatttctttttttctctttttcttttcctttcttctccttttccccattttccttcttcctttttgcttgcccgtttgttcctctgtggccattggtgcttcttccaaagtgtacatttgggggcggtgtttcactttttatgccgttattttgccgcgaaatgccacaaacggaagggggacgaatgtcggagaaagtgaccaatgaattggactgttggccaaaagtgtcgaccattcaaatgacgaataaaggagcagcagaataaaaattacaatttactcaatttatcaaattttttcgcggattttgcagaaaaatttttgtggtgagtaaaaaatatttaagtggcccaaattgttattttttgaggggataaaataatggtaaaaaaagggctaatgtttgggctgggatgaaacaaagggcccctggcgacgg

SEQ ID NO: 5794 - DNA, 6746 bp, Heterodera glycines
  unsure (1)..(6746): unsure at all n locations
aaaaaattttaaaattattttttttatggtaaaattgacgttgctcacggatctggcaaaaagattgtttcttttaatctctgactaacatctgcaatgacttctanncatttatacaatagactaatctttgaacagcagcgtcgctgattttatgcctttttcaatgggacttaattttgtatgtcatcgaaatggatccgatttaatctaattaatgcgctttttaaagttttgttttttggatttgtcttgttattttcttttttccatcattagacgattgtcgcaagattgagcatgcgacagcggaggatcgcatgcgaatgcataaccccgaaccggcacgagcagcacaggcaattagcaattacatggacgagccggaaagtgttctgttcgttgcaatgtcagacaaaatgaatttataaatggcaataaatattatgcaaaaatgaagttaaattttaattgattattttggcagtcatttaaaatttaatttaaaaatttagtttttttatcttaacagaacagcatatgatggcagtgccaatgtgattgcgtgttgtcggttgaaattgtgccaaaatggcaacacaataaacggaggaccatttgcgcagattggcccttttgcaacattaataggctaggctggtttcgttgatttgattgtttcaattgaagataattatttaattacactaactaatataaattataaaaatttgtgaagggattttaggtgctaaaaagtaaaaaggtacctaaaaagagctaagaaaacgccaaacagatgctaagaaagtattcacatttttttaattaaatgaattcctgctttactatttctgtaaattaaatttttatttcttttgaaaaaatgaaaaatttccttaaatacaaaatttaaaaaataattattttttctttaaaaaatttctattaaaagccgaatagccaatttagctggtagttaatgaccccttctgccgttttaggctttcaagggtttggcattggcacggctcttttaaatgaagcgcaaaaatacgcgcaaaggcaatggcacgtcgctgagatgcaattggaagtgcacggcgtcagacgaccgattggccaaggcgaaattgggccaatgacagcgcaaatgaatttctatgcaaagcgcagctatcgaaggacgggaaaggtgcgaaatgagaagcaaaacgaggagctaaatttttaggaaaaaaataaaaaattaaatatataaaataaaatgtaaataaaaaataagtataccgtaaaaattcattttaaagatttaaattatgtgatccaaaaatgttagaaaatacgttttttttctctaaaagatgttaaaataagttcaaatgattttccatataaaaatttagcaaatctatttataatgagaataattttgaagcatattttagtacttttttagagaaaaatgtttagtttgaactttttgcattttctattctatttttcgcaattattttagttattttggggtttagcaactgaaaatccgttcccaactaaataaaatagacgtagtacatttgttttggttattagcttattcagcccccttgttagctcaaattaatatttaatctaaaaatattttgcttttttggttgatttaaaaaataaaattgaaaatatattattggtacatccattactgggacgcaataactgtgaagatttttgtcaaattctacaaaactaaaaaagccaaaaagcttttttttattttaaaaagtaattttttttttatttaaaacgtatattatcaaaaaaaacaattttaagcggattttattctttccttttatcaaattcgaacgcttcttaaattgaatgaatgaattcaggtgcgatggttcaataagccatccgatgccaatttcgtggttgtgccaagtcatcttgcatatctggaattgatggtcaaacatttgagtgaatttggtgattattaatagaataattccaatcgtataatgaaattcgatccgtaaatgaataaatatttttgaaacaaaacatagagatattaacaaaaacaatggattaaactcaaaattttattaagaaattcaatgtggagataaaagattttatacatatttttataaaaaataaaagttttatatgtctattttgagggtaacatttttacttatacggtatgaacactttttgatacattttgtcggaataggacaaaacgtcgccggaaagttttttggtcaataactcattttttctttctcaattaaattcaatgttttggtatttatccaaagtctgaaccttttatcgccattttggcaatttttaatatttttagctactaagtattatcgaacaataccaagatgcttaattggtttacaatgaaaaaagttatgatttaaaaaaatcgtccggcaatgtttcggatgttttgaggtgcacagaaatgttattattattaaaaaaacgtggctttacgtcgctgcttatttctttaaatgtcatttgtcttctgtttgtgtcccctccccggcggaaagcggggagggggtgaaaatattttttgttttattcaaaatggcattaaataaatgccaaacattcactcagacacattgaaactccaaagtactcagaatttgccacattggttctgtttgtgttagctcaacattgccatttaaaattcatttctttaatttaatgtcgacaatttttcttcccttttctcagcccccgaggggacgatgaataataataattagtgacaaattaattggggcagcacaatttgttggcaaaatcaccggccaaatgtgcgtataaaagtggtgatcaaatggctgtcaaatcaccaaaacattcattcattttattattttattggcccttttcctaaaattcaatttacaaaaatggtttccaagcttcttccggtcattctctgctgcttgtttttggtatgtttaagcattcggtataaaatactgtaattcgagtagaaaatcagggagtacggtatctatgatattattaatttctaaaacagggcttaaaaaatccgtgaactattttaaataaagattaagcttaaactttactttttaggcttctttcgccctctgctcgcccaaggctgctgatgtgctggtaaatggctcatttttggcattatggaaaatcaaaataatattaatatcttgagacctaaaaactcaatttcacggacatatttgcaggattaggattcaaaatccgttaccggatgaatccgctttattaatccagcaaaatgccaaacaaatgcacacgattgtgggcccaataagccctacaaattcttccgtctccactattatccatattaaaattgattttttcagaaatttaaacgagaagcggcgatcagcagttgtggagctgtaagacatatttaaaacaatagaaatattcgacaaaatattcatggaggtcgcttaatccctaaatttgttaatgaaatttaaatttatttgtaccactaaaagcgttagatgttttttaattagccatttttgtcctgttttctattttcggcacttttagggacagtttgaatacgggggcggctgttgtacgacatgcacaagcgatgctgattgtacgggcgggaaggtgagttagccaaattttgagaagcatttgccactgttagaatgggattaatcacagatttaagtgaacgattattaattaaatcattaattatgtccaatcggagtaaagtttgacaaattttccaactattttttgtcttaactttttcaattattttccactcttttaatgtaaacttttaatttgtttttatctaatttagctttgtgtgcccatcctcaacttgctcagcgtcagtctgtgctttgccccatgcggaaattaagacagaaaagaaagcagcaaatgagggtgttgatagtgtgataaattgataggattaaatggaaaatggggagttaataattacttaaatgcatttaaatagtgattgatcaataaatatttttcggagttaatttgccttaattacctgaaaatttgactccttcgcttttgtctgcgatagagttgttttataatttgtttagtttggtgaaaggattaattaatccgagtgccgcggcacggaggcccaattttcttgcgtttcggtgacagattagagcatgatgtatgttacgaagctctttttgaaggaaaaatagagtgaattcatttaagcaaaatacatttctgcttttataaataatttatttttaatattaattgtaataaaattgaatgccttaccaaaacatgtacacccaacaatgggtgctttctcttattttaaatttttgtacagattttttatttcttttttcgtttccattttgcaaaaattttcgaaatgcaaaaagaaaaaggaaaagatagtaataccatgttatccgatcagcaaattgtcaaaatttttcaattatttttcattcttttaatgtaaattttcaaatttaagaaagcaataaaaaaggactctgatagtgtgataaagtgataggattaagtgaaagatgtgagtttaattacttcaattcatttaagcctattaaaagagctagaaaatttcttttatatttttacaaaatttccaactttcgatttcagaaaaattttgggcatcgaatgccatccctgccaaaaccaattcatttattcatttgcttcttaattaagctacaataaatgtattaaaataataaagaaaagtggggttttttttggggttttgaactctctctgaaaaaattctaaaataattttttctatggtaaaattgacgctgctcacgaatctggcaaaaagattgtctcttttaatctctgactaacatctgcaatgacttctaaccacttatacaatagactaatctttgaacagcagcgtcgctgattttatgcctttttcaatgggacttaattttgtattgtcatcgaaatggatccgatttaatctaattaatgcgctttttaaagttttgttttttggatttgtcttgttattttcttttttccatcattagacgattgtcgcaagattgagcatgcgacagcggaggatcgcatgcgaatgcataaccccgaaccggcacgagcagcacaggcaattagcaattacatggacgagccggaaagtgttctgttcgttgcaatgtcagacaaaatgaatttataaatggcaataaatattatgcaaaaatgaagttaaattttaattgattattttggcagtcatttaaaatttaatttaaaaatttagtttttttatcttaacagaacagcatatgatggcagtgccaatgtgattgcgtgttgtcggttgaaattgtgccaaaatggcaacacaataaacggaggaccatttgcgcagattggcccttttgcaacattaataggctggtttcgttgatttgattgtttcaattgaagataattatttaattacactaactaatataaattataaaaatttgtgaagggattttaggtgctaaaaagtaaaaaggtacctaaaaagagctaagaaaacgccaaacagatgctaagaaagtattcacatttttttaattaaatgaattcctgctttactatttctgtaaattaaatttttatttcttttgaaaaaatgaaaaatttccttaaatacaaaatttaaaaaataattattttttctttaaaaaatttctattaaaagccgaatagccaatttagctggtagttaatgaccccttctgccgttttaggctttcaagggtttggcattggcacggctcttttaaatgaagcgcaaaaatatgcgcaaaggcaatggcacgtcgctgagatgcaattggaagtgcacggcgtcagacgaccgattggccaaggcgaaattgggccgatgacagcgcaaatgaatttctatgcaaagcgcagctatcgaaggacgggaaaggtgcgaaatgagaagcaaaacgaggagctaaatttttaggaaaaaaataaaaaattaaatatataaaataaaatgtaaataaaaaataagtataccgtaaaaattcattttaaagatttaaattatgtgatccaaaaatgttagaaaatacgttttttttttctctaaaagatgttaaaataagttcaaatgattttccatataaaaatttagcaaatctatttataatgagaataattttgaagcatattttagtacttttttagagaaaaatgtttagtttgaactttttgcattttctattctatttttcgcaattattttagttattttggggtttagcaactgaaaatccgttcccaactaaataaaatagacgtagtacatttgttttggttattagcttattcagcccccttgttagctcaaattaatatataattttaaaatattttgcttttttggttgatttaaaaaataaaattgaaatatattattggaacatccattactgggacgcaataactgctgaagatttttgtcaaattctacaaaactaaaaaagccaaaaagctttttttattttaaaaagtaattttttttttatttaaaacgtatattatcaaaaaaaaacaattnttaagcggattttattctttccttttatcncatttgaacgcttcttaatttga

SEQ ID NO: 5795 - DNA, 1369 bp, Heterodera glycines
  unsure (1)..(1369): unsure at all n locations
tgattaatgaattttttaattttattttctatttaaataaatttataaattgatttatgcggggggtggaagggatcaaacccaaacaaaaaattttttgcgaattgtccgctattttgttccttttataagcaaaggaaggggggcgggggcggtagaccttcgcccgtttttcatgtatgttttccttgatttttcctggacttggattttcctggattttaccaattttccagttaaatgtgaaaaaaaatcgaggtccccagcttttctggaagatattttaaaattttttgttaaagagaccaacgttttataaataaattaaattgtcaattgaattttatagatgtgttcctaaaaatcaatcgattttttcaaaaaattgttcaaaaaaatccgagtccaggtccaacatggaactcaggtccagaattttccaaaatgcccatttctactttataccataaatatttaactataaaattatcgattacaaataaaattgagccatttaaaaattctcatttttgcgaatgggtccgcgccactttgggctccatttgtggcgcacatttgttttaaacaaatttcaaaaaaatccaaatccatggtctaaatccaggcctcgaagcctggaaattaaaataatctattgccaaataaaattgggccttctaaaaatgacacaattttcatcccttctccaccaacagtacgtcgagtcgtttgttgatgcgtcggaccgtgagcgcctgttgctgcccgctgagcagttgctgaagccgttggtgcttgtcgcgttggacatttgcaagttggagcagttcaccggacgtacggcaccatcagtgatcacttgaagatgttgagtgacaaagataatccaaggccacaacacacattgaggatgacgacgataattatgataaataataataataatttaaattcatttaggcgattgatttgattggttttttaaggtttatagttttatttgcccaaatcggtgtaggaatttcttgccgctttttaagccctcttttcattgccattgatcgatatcgtgggcgnaaacttttggggatttgcaacttggggacccgacatttggggacccgacttttggggatcccgacatttggggacccgacttttaggggtccgacatttggggatcgaacgtcatggggatccgacacttagggaacccgaaatttggggatccgacatttggggattttaataaaacaaaaaaatattaaaaaatttaattttatgtctaaaattagacaaatttagtctgctttagccagagttaattccattgcagtgcagcaaagaatcaaaataatattttttcaaa

SEQ ID NO: 5796 - DNA, 1959 bp, Heterodera glycines
acaaaacaattaattgttgttttttcactcaagaaccaattccaaagtttatggccaaattgatacaattaaagctttcggatatgaaatttcgagtctacaaatgcttggacaaaatctcttcttttaaaagttcattaaagtttaattcagacccttttcggctcatcacatgtccgggttacccgaggtccgaaactcgaccccaacttttcggtcgacccgaaaaccaatccgatttttccttgatcagaataactgattcatatgaccatttctggccaatcaatgatcattttctttgcatatcgatcagtagcgctactaaaccgccgatggtttgttaagtgcccggctcgtttaagcaatttgtttactcttaaaggtaccacctaattgattttctttcaaaaaaaaaattgtgatttgccccaccattatataatttgtattgttgtttggatgatcgatcccttctgacatatagtgtctcacttgttattatgcttattattctatgccaaaaatattttaagcaatttaattagcgttcaacattctctattctattctttttgttattccactgtgaaattgaatttgccttccccaaagtgtgctcatcaaatattgaaaaagtgatggcttaattgaatttgcaacaattattaattttctcaattacatattcatttagtatttgataaaaatgttactctcattttaatacctaaaatgcgtcgaatttctttttttttgcttatgtttatccatccaattttatttattaaaatttgaatttttactattttacataaattagcgcattttcatttcaattttttttgttgttgatttgatttgccatattcaaaatgtttcgttcgccatcggagccgagcccgttctcgtcaactcggtgcccctacgatactcaggcgcgctgtggacgtccgtactgtccatttgcacaccgagccgacgacgctgtcgacgtcgttgaaggtgaagaaatgacaaagtttgggagcgttcggcggtaaaattgaggcttatggtgcacctttttcgacagaatcgtttgtttttgtcattttttttgttaatttcggtttctgtcactttttgtggccttccgctccttgaaattttttttagataatttggtaatactggacaaactgggctccacaaaaaaatcatatttctgtcggagattctgatcactatcagatttgcaaaaatcattgcttttgaaatttgatcactgtaatcaaatgatcctaaattaattatttgtttcgcgtaagatttttaaaatcgctgataaattttgcaaatctcatatcaaattcgggatctgaaatccaaagggatgagaactccaaaataaattgtggaacttttcattaatttgttagggggtgggttgtttcgagacaccccacggcgatgccgacagggcgccgccaagaaaaatttaaaaattttattaaaaaaattgttgcaaaagtaaaaatcggtaccgatttttaaatgccttccatttcatcagacacagcaaatgatatgcttgtgttggacagtgaccatttgtccgacggtggccggtcatcagtggggacagaaattcgacaggaaaacccgacaggtgctgtttgtgatattgggtagatgcaattgtatgcacaacacccccctcccgaagaagtttttaaaaaaaaccctacggagaatggaccctttggatttttaaattttttcttgggtacctactatggttttttcattgggtttgttaaggtacaaaagtgccgaatttttcttaaattatcaaaaaattattttcactaatccaagttttcaaaaaaaaaggatcaaaatttttttagctttttttcataaaaaaatttcttcgaattttggaaatttttttttttgataaatcttaagtactat

SEQ ID NO: 5797 - DNA, 3455 bp, Heterodera glycines
caaagacgtagttgcgttcccgcaatttccacacacttcaaatggcaacttttaatgcgccgtgccgtccattacggctgagggtcgtaaagtggtggcatttaaaatgtaattaaaaaatgcccttttaaaacgggggtccaagaaaatgggttttaacctccagacactcttgttttgttttttatgctgcttttgcataaacaattcgagccatgttcctattaagtgaaaattatgccgcccaaacccccaaacgtttggcccttctccgtgtttttctccctcgaaaacttccactgttttcctgctatggcgtaattaatttgtgccaacgacgacggcacgggcattaaactttgctcattcgattattggttttttttttctgggtgggtactcttaaacatttcataaagagtgaagaaatgcttttatggcattatggaatattaaattaagggcaaaaatatttgggaaaaaaattttaaaagttgattttatgtactgtatttgatgaaacaattttgaatgatacacaatttgtaaatttataaaaaaatattaatctctctaattaaactgttttttaaaattaattagggcttttttttacaaaaaaatttatgcacccataacacttcagaatcgaatttttttatgtacagagatgataaaaaggcaaggaaaagttttatcctaaaatttctcgaaagtttcccgcgctgttttcgtgctatgcataattaatttgtgccaacgacgacggcacaggcatattagactttttgtcttattacccctcattttgtcttggtttttttgtgaagggggattttcgttttttttttgttgttgttggatcatcttaaacattcataaagagtgtgcaatatttaagattaattcttttatgggtttatggcatattaaaattaaagggccaaaaatatttgtgccagattttgaaagttgattttatgaattgtatttggtgaaatatttttgaatgatacacaatttgtaaaatttatcataacaagaacaaaaattattaatctcaaaatttatcaaaaaaagaaaaaatattaatttcgctaattaaaccgatttaaaaaaaattaattagtgaaattttttacaaaaatttatgcacccataacacttcagaaccgaattttacagggatattaaaaagacaaggaaaagtgttttatcctaagatttggctcatatttttcgggtttttcttttttgagaattatggggaattgaaatttcaatggcctaaaaatatgtaaagaaatgtggggggggggggagtgtgtgccgggcccgagaaatgatgcaaattgtccgaattttggaaccgtctggaatttccgaaatttgttcctaatttgcccagcccacttaattattccaaaattcactttaagtgccctcctcccctctcgattgcttccgtgcagtgcccttccccattttattctcatttcattttctctttttcctttaaataaatttattgttgggctgtatggcagggcttccatcgaaaatttttcaaactcagaacatcgggccctaaaaaatcagattttggggtcgaaacccagaacaattcgcgaaattgcttcaaaacaattattttttatcctatcaaaaatgtattaattattatatttttcgcttccaattatcgattttaacaattttaggggaggaaataagtaaatcgtatatttaagtgctatcaggctcaaaacatcagattgatttttaagaattttttgcggcgtttatttccaaaaaaaaaaattttgggggaatgggcggcgggggtgtgggtccggcgcggtgcagataggcgccgccgggcaaattttggaaaatttgagtgcaatttgttaacagattttgaccaaaaaactgcctaaatttttgcaattttaagccatgtgacgactttttttgtttctaaaaaacggtttttttacggcgcggggttttttttgtgatttttctaattgtttttccccacagctttgccccaatttggaccgtccaccgccgtgccggcgcattatgtccaatcgtgcccatttgttccgacatacccctcctacccaccgcagcatcaatattccgaaccgattatggtcataaaaaagcattattgtattactgtatgagtgccttcgttacccctccccatgcatcagaaaaatggaaatttcgtgttttttcctaaattttttaaagatttttctagtgaaaaaatgaacaataaatattttttttatttgttacatgggacgggggaaccaagctgctcccatgcagagtattttattcactcttttattcgagaaaagaacgcatttacagtactcgcatccggtaccattggctaccgtatcaacaacgatgacaccaccgtttccgtcagcagctgcggcagcagttcaaccgcagacggtagcaccgagcgccgttaaacaacaccgcggcagccataaaagggtgggcgctaattatagtaacaaacacagcaattaatttttagtcataatatttcatgaaaattttgacaccaagagttttctgagtttagtgatcatgaaaccaaacatgaacttgaacaaaatgagtcaaaaacatggattttccgacttttgggttcaagattcggaattagccaatattggttttatatttatggttagcaatcccgaaaatccacggtacaaattttcacgtatacaatccttatgtgggaaccaaggagtttttcttttggttataataaaaatttcaaaaaataataaatattatttatttttatgttaccaatgcttcttttaaaaactgatatttcgtttcttttaattaaaaaatgtttaaaattaataaatttaaacaaaaattttttattttttaagcccaaaacagcggcaggccccggcggtttgcccgcgtacattccgacaccaatcgctcaattggaaaaggagcagaaagagcgtgagcggagaagagaagaaaggcgggcgagaaaggaggacggacagccaaagaaagaaaaagagcatggggcagagaagcagagcgacgatgcgaaggcggcgagacagcgggagcaaatggagcagcagaacgacagaggaaggagagagagtgttggcgagggagagagcgtgctcggcggcggcgcaggcagcagcagagagacagtgaaagagagagagggtgggcagagaaatgaaattaaaaaaaataaattaattattttttactaataaaataaagaatttcgagttaaaaatttctgcagaaatttataggatttttgtttcaataataaaactaatttttcatttatttaaaatctataccttaaattttaaaaaattttttaaaaaccaaaaagggggggaggggacaattttttt

SEQ ID NO: 5798 - DNA, 1436 bp, Heterodera glycines
cagggatgggacaaattgaaaaataaaaagcgaaatgcgaaaagcgaaactgaaaaattaaggacacaaacaagcactagaatgaaatattcaacacatcgaaaagaaattgggaaattttctttttttacagaaaaacataaaaacatctcaatttgagaggaacgaatgtgtcgtttcctgttgccttcacgatctaaaaacattataaatgaattagcattatttttattgaccaataaagcagatctcctctaaattcggatatacgtagcagggattgcacggaattccgatttccggtttccgacatttttggggtcggaattccgaaatttttggggcctcggaatcagggctggacgtaactgattttcagttacggaaatccgtaatccgtaattacggcaattttttcagttacggccatccgtaatccgtcattacggaggtccaaaaaggccgtaatttggcgtaatccgtaatacgtaattttcaaaattttttttttaaatttaaaaaatccaatctaaaaattgttaagattaatttatgatcagaatatctgcttgtttttttgaggtgaaaatcccaaaatagttttttttgcggtgtgctttttccaaaaaactggggaatgtgggggggggggggtcaggcggcgccgaaaggcgccgccggaaaaatttttgaaaaattttatgcaatttgctataagattttgtctaaaaatgactaagattttggagctaatatttaaaaataattaggaatttttggggcgggcggtgccgataagcgccgccgaggaaaattttttttcagaattttaacgaattttgttaaaaaatagccaaatttttagcatttcctcttttcccctttgctagcatcccccctcccctttatgtatgttaataatactacaaattaccaagtataagtcagattaaatcgaaatatgggtagccttttaataaaaatagaaaaaaaactcattttataaaaaataatcttgcaagaaatcgtctcgaaaaataatctaaaaagccagttacggatcaaaattacggaaaaatcccaaaaaccacgaagaatggatgaaggatgattaattttcgttgttttcatccgcttctttttcttcttcctctggtggcgacaatgggctaaaattaaattttaattctttatatgtaaaacttagagaccggacaattggggtcggagggcggtgcaccccaaaacgtcgtcggccgaaacgtcgtcggaagactttttgaaccataactttgttcactgtcaatcaaattaagaattgttggtgttgttcgataggtctatgtgtttattattaatttgcaaaatctcaaaaattttggttaagtttcaaaaaagttatggccagaaggaactcaaaaacccagtaattcgaa

SEQ ID NO: 5799 - DNA, 1786 bp, Heterodera glycines
acattcattcgcaccattggtgaatgggttgccttctttattgattacaaaaatactatctgagaaatgaattaacttgacaaaaaggaataatagttaagtaacatattggaaaagcctttgagagcaaattgatggttcttcaattccaacaacaacaaatattgtaaatcagaacaaataaatgatagcatcgccttccgttataattgtctcattgtcttagtgtcctttctttcggaacgaacacccttcgacaagtcgcgccttcccgccggtcggctgacacaaaactgtactgcaaccaacacagacctaaattagaaatgtatgcaaatttctacaaaacacagctcatttatgaccggtctaagtgtgtactattcatttgcttagctcattaaatcactaaattatttggcaagaataaatcgataccacaacagtttgagcatggctgaacactgtagtaatcttatagcagccagggcatttgacgtccataaacttaaaaaagggatgacagtatttaatttatttataataatgcatacgaaagaatttggatgttgcacgagtcttttgagcttgtgcttttgacgttccttttgcggatcaggatacaacaaatcttcagccaaaggcatttcgtttgtatgagaaaaatttaactaaaattgaaagattaactaaaattatatggaaaaaaatataaattaacaaagttcaatagattcgaatgttttttagaaaagcattatagggaatttactctaaaattgaccgagaaaataaaactactaaaatgatagagttagaatttgcggttgaaaaaacattattttaggggaaaaaatcataatctcaaaaaattgacactcaaactcaaaacagagatttttaagaaatctaattctttctctgctttttctttttttcataataatttcttttagtttggcgtattatctcttcatttttaatagaaaaacagaatttactctatgcatgaatacctcaattagttacctaaaattactagataaataggtattcaaattatttaactaattttcagcacatttttcagataaatttattaagaacaatgcgttcagtaaaacatggaggaaaaaaaggaatgcgattcagatacaaattgtcagcagttaagaggcaaaacaaaaagcagaagaaaaagcaaaggaacatagctggatggtaaaaaatattgaagttttaaattgctaatttcctgttgttgtattcaatttgctgatggtctcacattattttaatttttttttgaaattcctctttcagaaatttggaattcgattttgaattttattttcatttcaaatacatagatcaacaagctcagcaaatagatacaattaattcatggcattttttttaatacttttagctctttgatcaaaaaagcatggcaaacccaactatcatcgcggcaaaatttaagtgcaatgggactggtctatgatccaaatgaggcattgaaaaaggtatgtttttgatttaaccatggccatttaaatcgaatcctcgacaatactcatttagaatcctgaattcgccatggaaatggaccaaagcgaaattgaagtaattggattgccagaagccaaagctttgggaagcgtgaaggaacaaaaaaaggcgaccaaatcaaagaaagcattcccaagtaaaagtaaaatgcaaatttttcactatatcaaattaaggcaattcaatttagagttgaacaaatctgaggccgagt

SEQ ID NO: 5800 - DNA, 1487 bp, Heterodera glycines
tgccttagtttgtttccaatcctatttcggattcccggccataattcgatcattcgaaaaaatgaattccccatttttgttcgaaaatttgactaaaacatttcaaaaattagtcacaatattacattattataaatggtcaggttattaacttttgtttgaatacatccgcgcgggattcgtaataggccaaaatcagttgtaaaactcaattcatagaatggtcatattcgcgatcagaaccccaaagattttttcgcggctttttaaaccgaaaattttaccaaaaatttgccaattgtataaatgataattttctatttgtcagggcatgtctcgtgatcctttgaatatttggcaaaacactccaagacaaattgagcgaaagattggcgtatacaaacgaagcatcgcctgtgactgaatgtgaaaagcgaaaattgtttttctttgttgttgggcttttggttgtttaaataaataaaaaacaattctgaacacattacaccattatattgcccttatgccgttttttattcgtatttttgacttcggagatttgtcggactatttcaatttgactatgaaaagctgtttgctttagtaaggaacataaacaaatgggacaaaaatatcctggtaatggcaaaaagtgaaggacaactgccgtcttgtccctcccccccccctttccctctctcttctctctctctcctacatactctctccccctctcaatcacttgagcagttttcctgtgcattcgctttctcttttgttttatttgtgctttttccacgctcaaagtcccattcattcctttgcttttgccgatcgattgatccgaacaaaacaaaatataatcgaagtccaagagaagacgacgtaaaggaatgccttcgggaggcgacgatgaacaacagtttgaggaggcggtcaaaccggcattgggtgggcaatcgaagtgccattgggacaatggcattcattcaatgagtgaataaatgaaacggtgcctttcgcagagtcccttttggcggatttgcaaaagaccaccgaagttcttcggcaaggcaaacatggcaaaggccgacggcaacagaaggaggacgaatccgccgctttgttggacttgaagaagcttcggaagtgaggggggggggacaaaaagagtgatcagagtttggttgggttggctgatcgggttgggttgggtggtcgtcggtgtttgcgcagggcgtgcgctgaaaatatcgaatttccgcctttccccccaaagctctccccgccagcgaaaccaatcgccggcagcggtcgccaatttgcgaaacggaagaagcgaagaggtgaaatccgttcagttatttgctgttatccttatccccaaaagaaaatattacgaatttcgttaattgaacgaattcggaatggtgggcattagtcgccaaatgacccccaatggtgccattgtccgtttttgttaataa

SEQ ID NO: 5801 - DNA, 4464 bp, Heterodera glycines
ggggactgtgcttcgtgcaaccaagcagtgattgggcccgtggtaagtctttggctgtataaaaatgagcagtcggaagcgaagggtggcagaaatgggatgttttacgggatacgaagcaaaatgaaaggattttgaatgacaaagaacaaagaaatggaccattttatcaaggtgatagcccttgggaagatgtggcatcctgaacatttttgctgcgctcattgcggagattccattgaaaatcggaattttttcgagcggcaaggaaaggcgtactgtgaaagcgattaccacggtgattgggtcattagcttatttgctagtcaatgttgttgtttttccaagttacactttctcttttctctaagatttgttttcacctcgttgttcctactgtaacgggcccatcaaagaagtacggtggaagaattacaaattagaaaaaaaatacttgaagcaaagcaaaagcattcattttaattactcttacatagcctttttgtttagcgttgtgtaacagcacttggcggaaagaattttcacgtggaggttaaaaaaattaaccttttgaaacttaaaactttctcagcattttgtttgcgccgaatgcggcaaaagcttcggagacggcagattccatgagaaagtcggaaattttattggataaattaatgttatcaaattttaagtccaattccgcgtactgtcgcgattgtttctaccgtacttacgcgcccaagtgtcagtcctgcaaacagccgatcactcacaaattcatcacggcactcaacacacattggcaccccgaatgcttttgctgtcaggtaaatcggacggacattcgctgccttttcgcttctcgcaaaaagctttcaaagtttctgttggctgctgagtagtatatggcgtcaaaacctcgcgggtatctcgcgggtgtttcgcgcacaaacccttgcctatgggaggggtgcaaccctttgaaggtgccgcccggacattttcccgcacaatcccaaacctatgggaggggtgcatccccttgaagttgcccgctcacatcctgagcctatgagattttctttgaactctgccgccttggggatttccccaaattgttgcgggtgttttttttcacccgcgccgcgcagcgccgcgggaaggtcatcaatcatccacctgtcaccaaaagtgacaggtgaaggaaattcaatttttcttttgcaaatttaaatctttttgatcccaaaccttttgggccggttttattttctcaaatcctgagattttttttttatgatgatttttctgaattttgaaaatttgccaaaaccgtgcggtttttatcacctctcccctccctccccgcccgtccggcgacgcgatgccgccgccgcgaaaaaaaaatcgataacggaatttggaagaagtgtgaattaattgatattagcagcaaataattttgattatgaattgcacaataaaattgattatttaaaaataaaaatcgaaaattgaataaataaattaaaaaactttttcaaaagtaggtcacctgtcaaccaaaattgattaatggatttttatttctcttccattatttcgcaatctgcagtgactttttgttcaaattatttcgcaatatctcccctaaattaggtcaactgtcaataaaatgtgattgattggtttcttatttaatgtctccattatttttgggtccaactatttcgcaatatggcccgtaattttgcaaacctgtcaagaaaaatgattgatgacattcgaaataaagaatatccagacgatttttttttgcagttttgaataaaatgtgacagttgtctacggaaatgattgattaccctcaaaattaaggcaaacccagacagtcacgtgactagacccctccccctttttgcctatttcgcacacccggcccaaatcgcaaatcattcaactaaatagttggatttcattaaactctcttcacgctctaattttatttctctccgctctatttttatttgcattaattaaatctattactatttacctacgtctttttcttttcaaatctctgctctctttaattcttctgtttcaatttttctttttaaaatgtcttttaaacgcgtgaactcctgccaacccgccgtgccaatggccaaaaaatgggatttccgatcaatcgggcaagtgatttttaataaattaaataaaaaaataatttcttaaacaattataaatacaattataagataataccctttaagaattatttcaaaaaaaattttttgttcagaaataattttgctgaagaaatggaaaattataaattgatggattatcaaacgactacttgccaaaaatttggatttacgaaaaatattacggaatttcgtgtcaacccggacgtggaacgccccgatgaagcgatgaaggatgcgatcgacaacatgataaaggtggctttaaaaactacggaagaaaggatgaagcggaaagtgcggatgtttggagtggcaattacgggtgctgggcttgctttcccggtatgggtaccgtacagggcgtacccgcagaacaatgcggatgttatcatgcaggagattaataagttggggcagagcggggacggagatgaaaataagaaaatgcttttattatctgagccagttacgatgaaaattacttgcgtgaccatgcccagtggagaggggccgaggaatgtccataaatttgactttggattcaaggaacaccagcggatagggtaagtgtttttaataaaataaaattaaaatagaaaaaaactaaaataaaaaaaaatcaataaataaatttaaaataaatacattaaatttatttaatgaagcaaaaaaattttttaaagaaaaaaattgaaaaaataataatttaatgaaacaaaaaaaaacagaataaaattaaaaataaagaaagtaaaaaataaatttaaaataattattttaaaaaattaaatgatacaaaaaaaaacagaaaaaactaaaaaaaaaaattaattaaataataattaaagtaaagaaaaaaagaaataattatttttaattaagcaaagcagcaaaaaaaaaaacagaaaaaaaaattttaaaaataaattaaataataaagaaaaaataaatggaaataataataattttattaaggattacaaatgtggataaattatgtctgttttacgcgctcgtagcctcgaaattttatctggaattgcatgtggacagcttcaggagatttatgaaaaatattgtgagacagagggatgcagctattgaacttttacgtaattgtggaattgatggaaacgaaattagttatggtgtggagcaattgccgacggttcagaattattgggtgggtttaaaaacggtgaaaaacatagaaatgaccaatttttcaggatgagatttaccccggaaaataccggattgtggcgtttgaaaaatctgcggatccgagaaaatcgatacgtgttttgtggaagggcccaatggggcgagaaagtgtagtgccgatatttttggagaacggacattgggatggtctgaagaattatgtctgctttttcaatcgagggaaaaaattttgtgttgattgtgagtgcttttactatcaggatgttaaacatacgatggagtgcagggccaggtgttattactgcaacaaagtgggtggagtgccatgtcaaaaggagagtggagtgaagattgaatgcccgaagtgtcatcgttatttttacaattgggagtgttataattatcatcagggacatcagacttgcaaattatggaggcgttgcgtgatctgtgacaagacatatttatttaacacgaagaagggacatgaatgcggagagacttattgccagctttgtagtgtgagccacgaccccaagcggggttgctatattataccgatcgaggagaaggaggaaaaagatgtctacagaattgtagtttgggtaagttctacaaataaaatcaacaaaaataagtctttaactccaggattcggagacttcgcaggattctatttacaagggggaccagaaggagcatataattaattatatttcggcgagagtgacgtgtacagaatgctgtgatgataaaaataggacaaattgcaacatttgcagggaggtgaggaccaaggattggagtgaggctgagggacatgagccgaccaaggattttgtggagtggattttaactgcttttaccaattacgatacgtacatattcgcgcataacgccgggcgttttgacggtaatgaaaaaattaatctaaatttttaaatcctaaaatttttaggtcattttgtttttaattacctctgccgtaccgggaagaacccgctaccgctcatcaatggattgaaaagttatgaatttaaagtgcaaaactcgaagaaacattcaa

SEQ ID NO: 5802 - DNA, 5577 bp, Heterodera glycines
ccttaagccttctccgttgtccatgattcctttaagctggccagaatcggataggatatatctcaatgcttcttcttccaattggcgtcatcgaattccagtccaatcatcacacaaataccccccgccgtccctctgccgaagcattcaatccatcccattccattacatatctgtccccccccccctccctcaccagcgagtccaattgatgacattttgctggaggcattgagttataacataacgcctgaggcgaaaaaaatgaaaacacttatttttattttcataaattaaaccaaataaatccttttaatgaattttttccaacattttctatcagcaaattgttaaatttcacatattaatgacgaataacagttttttttaactatacgtcttttctatattaattttttttgtcaatttttatatagatttttttcaatttttcttgcaattttcatattaagcatttatttattttacataaaaaaatttttcaatgattaaatttaatatgttcaaattgaattgcgttttaatgaaaaaaacgattgatttaatatttttcaattaattacaaaaatttatcatttcttggagaattaaattaataatagaataatttgcttttctctattgaaggtgaaacgaaaagaaatattcaataattaattgtcatgtctgacccataaaattgcataattattaattaaattatttttcatttttgtcgctattcgcccactctttggccctttgtccgccattcccaatggtccaaaaccaacaacagcagaaagcgcacgaagttggcgaagtgaacgcggaaagccaaaagagacaaacgacgacgagagaggacgaaacagcggaaggacagaagcaaataacggagcagcaacagattaacagcaacaacagcagcaacacaacgccaacaacaacgacagtgaaagtgggaaagaagcaatttgaaaattgaaattaaatataataatagaaatcataaagttttgtaaataattaatatttattcaggttggcttctacgaggtggaccggaccattggcaagggaaattacgcggttgtaaagttggccaggcaccgaatcaccaaaacagaggtgagaaaaaacacatttacgaattatctattttaaatattattttaacatttgaaatcatttattttggtgaattttctgatactctcagcaaaaaacccattgaaattttattgtactctcgccaaatgcctaaaattggatttttagctgcgaaaaaaattcctgtgttgtaagaggaaaaacggacacaaagggttgatttaacggaattttattttaaaattttctatttaaacaataaaatattaattgatggggcgcacaaaatgcttacgggacgcataatataatattctgtgaatttggcgaacttgtactattctctataatcttacaaaaatatatatgaatataattcaaaaatgcttttatatcgttaattacctaattaatttaaataggtcgccatcaaaattgtggacaaacgtcgtttggactcggttaatttggcaaaaatttatcgcgaaattgatgtgctgaagaaactcagacatccgaacattgttcgactttatcaggtgacaaattgaggacatttattactaattgattgataattaattaattgcttaattttgtaattcaattgaaggtgatggagacgaacaacatgctttatttggtcactgaatacgcaccaaacggcgaaatttatggtcagagatttaaatttaaaaaagcatttgcattttcttttcagatttaatttcaaaacaaaaaaaactcagcgaggaaatggcaaagcaaaagttttggcaaattatttcggcggtggattatctgcacaatttgaacattgtgcacagggatttgaaggtgttttttaatttaatttaaatttggaattcatttttatttttgtatgattttactaaaatttctttcctttttgttatatttcgcatcgatttgccctcttttttacgtcattagcagtttaatttgttttatcattaggcgaaagaaggcgaaattatcaaaatttggcgaaatcaaaaaatgattaaataaagttcagtgacgtaaaatgagacctctaaaaaagcaaataaaatccctttttttctaaaagtattttaataattaataaataataaaacaaattaaggccgaaaatcttttgttggacgcaaatttgcaaataaaattggccgactttggcttctccaatttcttttcttatgatggcactttggacactttttgcggaagtccgccgtacgcggcgccggaagtgtttgagggcaaacgatacgccgggccagaaattgatgtttgggtgggcatttggccaatcattattttattttaaactaattatttaatgggttgatttaattgaagagtctcggagtgattctctatgtgatggtctgcggcgttttgccatttgagggcctcaatttgcagctgcttcgtgaccgtgtgctaagcggacgcatccgaattccctactttatgagttcgggtaataaatgttgtctgaaaggcattggtttcattttccaatattggcgttgtgttcagactgcgaaaatttggtgcgtcgtatgctaacggtggattcgcgccgccgtccgaccattgaacagatcaaacaccaccggtggatgcgctacgaagagttcgccccgaagtacgaactcaacgagcaggaacggcacgcggcgacggagcaacacgtggcggaaccgcacccgcaaatactgagactgatgaacaacattggcattgagtcggagaaaatcaaaaatgtaacacagaggaatattcttttcataaaacaatgaaagcggatattgtgcttttcgcttttttcaggccattcaagcggacgcctatgacaatttccacgcgatttatttgcttttgttggaacgccttcggggccatccgctgtcgcgcagccattccgcctccagtcatgccaaccatcctctggtcaactctccctccgcaacttctttgccctcgccgaccgcgccacacgcacaagcagtactcgcgagtccgaccacaaaggcggcaccggcagttgttctgacggagtcggcaggaggaggagacagcggagaacaaagaccaccgatcattcggggggttacggtccgtaatttaaatgatttgaactatccacattgatcgatacgatttgcagattcgtcgccaatccgatggcattgccattgtgggcggtgccgtgccgtgccattgctattgttgcagtgctgcccgagcacatccgatgctacagtcaatacagccgcaatacgcgcccttgggcatcatgacgcgatttgcgcaacatcagcagacgcgacgggacagtgatggaatcgcaatgcaatttgcatatcaaatgcagcaacagaaacaacagcagcaggaggaactcgcgcgtggcgtacaaaacacacagcaaaagcagcagcagcagaataacgtcgttgttggacacgtcgcggcacaaccacagcaaaagacaggacggcaacagaacggcacgcaactcggcaccatggtaaagggagggggagaagcaaataaattaggaaacgattaaattccgatattgccagcaccatcattccaccacttcggactacgagtcggagaattgtttttcgggttcatccgctggaggctcaacactttccagacaatcgacaatcggaacaatcagctcattcgatgatgtgattttatttaattaaatatttttattcttttaaatccttttaattgttggaaattattttcgaaatttatttttcttttggtgagacatttttggagttataataaaaaaatgtaaaatcacgcaaaggtaagtcagtgccgacgatataaacattaaataatttgtttccaaatttccccaattttagtgttgtcctgacgattctgcggccactccgtcctgttcgcatgctgcgggcggtggccccggcggtctgtcgctgttcggcggtgtcgcactgcccccgcttcaccaccaaccgccgattggtgccaccgctttttgtggtgccgaccaattgccgccctttgacagccaactgagtcaggacccgctgttctcctcacagtcgtccaacaaaagtgccacggcatttcgtcctatcagcggcagtcggtcgaccaataacagcgaaaatggtaaatttggccaaattaattactgtcataatttaagtctttttttgagtttaccataatagttttaacagtgctcatttagcttataaatgactttatcatttagcaataatttttatatttttctttaatttaatgctattattgacgtctttatgtgcggtgtgctcagtttccttttttcgtcttaactttttctaaaaattgcgatgggcgcactttcgtcgatgacgcaaattggggaaagagaagaaaggggacaaaagtgaactttttaaaatgacaaagaccagcagtttattaagtcgaaaacaaaatttattatttttgataccttaacataaaatggcgattaattaacaaaaagaaaaaatatatattattaagctttgacataaataattaggcttttgtattgcgtcattcgcttcttttcgtgctgcttgcctacttcatttttatttttctgttccaatgcttcttggctcatcatttgcgtcatccgttgttcgcccttttgttgttttttgcttgtgcaaatattttacgatggtcgagagtctcgaaaagcggcgatgcgagatgctttacgtggagggggggggggggggggggaggaatgatgatgacattttgggatgaaggatgactgacccattcacccatacattcgcagttgcgtaattgcatttttcacacgttatggaaatttgtgttgacatggccaaaacaaagtccaaatgcgtcatcaaataattgcaaatgggagggatgtttaatcaaataataataataaattggtaatcgcaggttgttgctacggtgttgcaccggcgggcattgtcgtcggcccatcaggcggaagcagcaacctgctgatcaaaaatgcacaggcacagcccccgccgatgtttccgaataatcatgcgaacactcaccttcaccatcgtctccatccccacctattgcaaccgtatcaacagcagcaattgcctccattcctccagcagcattactgccaacaacaacaacaacagttgacgacattgtcggcacgagcgcatgggacgacgacgaatgaaacgacgaacgaagacggcgccggaggggacgcagcaatgcaacgacaacaccagcaacaacaacagcagcagcagaacagcctttgtccgcaacaacacatggggatgatgtgcgagaacggatggagggcgaggtgagggatttggcaaggagtgggatcagaatccataaatgaaaagatttgtttccaatggttttaat

SEQ ID NO: 5803 - DNA, 3821 bp, Heterodera glycines
agtatcatgacaactcatacacaggcaactcgaacaatggcttagactaggcttaggctttttttgcaaattttttaaatgttagtttactgtctgtggtacgcgtaaagtgtcatgagacgcgtaaaaccgactagaaccaaatttttatccagaaaaaatattttttttaggcaatcaatttttggtaaatgtttcaattcttaggtgtatattttctgaaaaatttttgggtaatttcttaggtatgtattttcgtttttattgcatttttgttgaggacttttccgaaaatcctaaaaataggggccaaaaatttgcctaaaaaatgatgccctactaataataactaaaatcccaaaatgttaattttttttatatttatgtatttgtatggacgttaaaccgatgaactttcgcgctaacatttgtttattatataaaatttaatcaattaaaaaatgcttttaattatcattctttgatgtgatattagttgaaaactcgatctttcagtggcgtgacaacaaagatgaaacacacagcgaaaaaaggagaaccaatgatggcaccactcgttttagtgccccattaacgcggtagaagaaaggcaaagtgtcgagaggggccttaattaataatcaaataaatgtctttgaaatgtgagagaattgtacaataaagcataatttgtaatatagtataaatataattcttttaattttaaatcataaacattacttcgtaatccttcaacagtgtctctcccacaataatcgctgcttcgccccctctgttgccgtctttccattcgcctcttggcaaaaaaatgtcccgtttcgttttgcctttttgcagcactggcgcaacaacctgtgcagtgacaataacaattgaattaaatgaataaatgagttatccgccgatgtttaattaccaatttccagccgaccatgtattggtctttgcagccgtaagcaaaagtggcattgtcactggaccaccacattggactgtgcaaaaaatgtactgtttaaaaaattattacacgataaattaaatttcaatactcgttttgaaacgaacggaagggatgggggaattaagtgccccgaaacattctcgtttaaaattcagatgcaataatttaggttattttttgttgaattccctgttggtgtccatttcacagtgattactgtacttatgataccgtatcactggctctccattttttacagcatcctccacactttccagaatgtacggcatccatttggctcgcaattcgagcacatttttcacctgctccaccactttgaatttggactgattgaagctcggatgccacggaggatatgaaaattgcatggccagcagaaaggcattagcctaatggaaagaagtattaattgaattatattaaacaatttgcttgtttaattattgcaattgatgtcctcacctgagtccatctgatgtacagctcctcctcaggcggattgcctttgatgttggtggggctgtggtcaatcccattcccgccgaccatgtccggcaaattccaataatagccgtgcagtgatgcttgcaatgccctgcggggcaaaaacaaaacatttacttttttttctttttggtaaatgcgtgtatctttcaattctcaattcttaattaatttgaccatgggatcaaagtgctgagtccgccttcaccttcggatttgtccctaaacaaatccgaatgaaaaatatgtttttttaattattcagtgttcaaccaatatgaacttctgtccattgttctcataaagatattcgcgtcctgtgagttactgccgtaacggttttcaacggctggcccaaattcggccgcaaaatgggcataatcacggccgaagccttgaatgaaaatacgatcaaacaattgtttacttttgaaagaatttactgtttggattttgtccgtaattaagtgcaaaatttttcggaaaccaattagtctcgccggcatcgaatttgaatgtgtaaatgccctcctgaaaataaatttgaaataaaagcgtacgttctatccccattagccgggccggatggaatcaatagctgggtggaagagagaatgcggacagacagttaaagaccgaagaaacaatgaataatgaagagattggttgccccactccctcgtcacaaaaatcgattgaatcagtgccttttgcatgtttttgagctgtgttctccaccaatctcgggtatcagaattggtaagatccaaaatctgtaaattggacagactaaacattagcagtgagttggtctttacataatacatgcataaggggcttctcaagccaacgacggacgattaagttttagttggcaacgaagaaagggtccggcggtgccaaaaggctccgccggttctgatttgttaatcacaaccaaagggggcaagagtcttgagacaacccttgtgcatgttttggttccacaatcaaatttggttttaatcgcttctcctttacatatgcgcatggctttttctcttcattgcctgcgctgtccttggtcaccggacagtcccaccaccaggtcagcggaacgtcgccttgcgatgatttcatgaaaattgtatttcgcaacgacaaatcctggccattcttcgagtcgtcgttgacgaatgggtgaacccaggcttcaacaaacaatatgaatttaatggaataaaaatcaatttaatgcaaaactgtaccagtcagtctggcacccgttttgtttctgatgtaattaaccattccggcaaagttagggaattttgcgctgtcaatttgatagtctccgtaagcggtggtccacatgtcgtccaattccaattgcgaaattggcattccataactgttaatttcgtccacataactttcgacctgcaacaattcaaatttataattaattaaataataaaaaaatattccgaataaaaaaaatagtcctagtgcaaatatgcggccaaaggatttttacgcgtcttataattttttcaggtccgccagtatcaatccgctcatgacgaaccgcttatatgtatatcgtaaaataaaaaataaaaatgacagaaatttattttaattttttttaaaattggttaattttttgcattcaaaatttaaattcgtaatttttttagttattccgttacttttggctgtttcacttctagttaataattatcttttttaaataaaattcatccctattagatacaaataaaattttaacaaaaattgcaatttaattgtgtttgaatttgatgcgacctgtgtttggttcacagcgacccaaaaggtggcccaggttgaccaaattggcttttccataattaaactgtccggtgcagctaaagcacagaattgtctcccatatgtccttcccagtttgaaatttcttgcccgttggcgctttcaaaaatttggcaaagcattgctggtggaattccttcagagtcaaattgccgtgtttgtctaccgccagcgtgtactccaaatgattattacgcagcaaaaattgggagcccttcagctgcgccctaatgttcagttcgctcttctccaccgatgtccacaacggcactgtccacggcacactcagcgcaacttttttagaggacagccaataacgctcttgtccgctcactttggtctaaaataattatttatataattataaaatagtttaatctataggatttattttaaatatttaatctttttgagattcgtttaaagtaaaagcccacaaattggtaaatatcgtgagaacaaa

SEQ ID NO: 5804 - DNA, 4255 bp, Heterodera glycines
cacaaaatttcctgaaattttgttcaagagatactctacatctcctgcaaccgcagagatgttcaccgcgtaggagtaaaggaagggtgtaattcgtaacagtacgtcgctgggtatcagattgtacgacgacggaggagtacaaagggaggagaagctacagaagaagtgggaggataagcattggttgaaaaagacgtaagcagcggaacatttgcaaggcaaaaagggaggaaaagcctataatagtaacgtctgtgtttgtcggtggtcaatatctctaattaggcacataaataggtgccaaaaatcaaatactaagtgaatgagaaagtctgaacagggggagcggcggtatgtgttcccgaaaagggcacacatcggcatggaagacagtttgacgagtggggggagggggactcacgctgcgcggaggagaaaccaatttgagcgggggcaaaaaaaaacgccggaggggacgaatttgggggcgaaatttaattaatcatccgccgctgcgccgcgccgacgaaccgacaagcattttttagaagaattacggttgctgctgtgcctgctagaggaggtggtggtggtggtagtggtggtggcaaagagtggaagtaaaaaatgccaaaaaattgcaagtgccaggaacacttttagcaaaaatgccaaaaactgaaaatgctaggagcaatttttggcaaaaatgccaagaattgtaagtgccatttttgtgattatatggtcaagcaaaagcgagtgatcatgaggggcatttgtgattgatgaaggatggcagtgattgttcactaattgatcaaaaatgtgggaattattgattgatgattcgctaaatgatcaggatgagatgagaaaaagaatgatcaacgaactgttaaagaaggaagtaggtaattaacggtttgctatattatcaattacttatcaagatgggtaataaactttagtgatgccaattaatttgcgtaaatttctttgtaattaattaattcatcgttaattgaagcatgaacaaatttgaacaggagtagtgatttgtgaagcattgctagtaaatgtactggtttttgagaaattgagggtgagaaaatttggaaaaacacgaaaaattccatcaaatttgtaaaaaaaatttttgccgtttttgtaagaattaattttcattttaaatttgtgagcccacatcagacggagcagcaggcattttttgaggggcttctttattcatccttgaaaaatttttatggtaaatttcgtggaaaatgccaaagtgattaattggttggctcgtccgccgccgcgttttttttcctcctctacaaaaattggcattctccagacaccaaccaatttttcaccaattcttttttgaagctgttttttggcacacattatgccaatttccatggcatagaatggaattgagtgccaaaaatttagaaaaaaaaaatgaaaaatttataaaacgcgcatttaaagaaataatggaaatttgtaagtataaaaaatagatgtatggtagcaaattaatttaaaattttgaaaaaaagctaaaataaaatgccaaattgaaaaataaaaatgccaaattaaaaagccacattttaattaaaaagaattaaataaatatcacaaagtaaaagagcactttaatatacctatatgaataaaagcagcattttggcactaccatttttcaactatttgcgcagcagcagcacattatatgtccacggtaaagcaaaaaaaaaaaaaaagattttctcagacgcaatgccacgccaaatttcaaacaaaaaacgaaatgcgctttttcgcgcatacgccagtgcccgccgccaatggcactaacggcggcggtgatggtggcggcatattttgtaccctttgcgtggagaaagtttcccgcccccacctcgcgtggagggcacagcactaacaaattttataccctcggggcacggcaacggcacgcaccccatccacaaattttgtacaatgagtgaatggcatgggaaaacaacacaacaaattcttttatcggcaccgcacgctttcacatgctttgtgccagtgccaccaccgccggccgcatttgccccgcggggctcggcacttggcggcaaaggcacaaaacgccaaaacaaatcgaaattttttttcaatgattttttgtaccggcgccggcacactatgtacaaaatgtgctgttgtatggtgccacacaaaaggggaaaatttgtggccgccgctggcgagaaaatttttaaagtgacaattttcaaaaaaaaaattggcatagcaaaatttttgttttttaccgtagcctactatcgtaccgccaaagtgccatccatttttgtttattgaaagatttcggcattttacgagaaattttcggcattttacgatgggtgtttcaataaaatttaaaatgcctttttgaaatttgcattttcgctaaattaattttgaattttttcccatattcccaatttttcttgacctaacgcataactctttttttttttgaaaattcaattataaatacatatttgttgttgtttgttccgttttgtggaacggaaattcaatttttgtgccgaagggctcgcgcattttgccaaaatcggcggcacatggattgtgccgaatacaaaaagtgtgccgaagatgaatgaatgggagtttgtggcacaaccattgtggcacacaaaaggggggggggggcggaaagggaagagattatgcaaatccaatggctcacaattgcgggaggacggatgaaggatgaatgaatggaggagaaacggaaaagccggcggggcatttccatttttaaatatatctattttcatggacaaaaagcgccgaggaatcgatgggcggttaaaatggtgccaaatttgggaaatttccaggaaaaacaaaaaattctggaggggattagggggtaaattgttgttgatttttttggagaaaaaatgctgggagaggcaaaaattggaaaaattcatataaaaaaaaacggttgagagaggtgacagtaaactatgtgaaatttttataattggctgcaaaaaaaaattctgaatatcctttgatagggtaacacatttggggcaaaatgaatgaaataaatttgggaaaacaaaaatcctgcaggggttaaggggtaaattgttaaattttttgaaaattagaaaaattcatggggaaaaatgtgctgtaagagaaggtagtaaataggtatggtgtgaaacttttttttaaaaaatcctttgataggtgtcgtcgcacttgggagaaaaataaataatttgggtatttcaaaaaaatatatatcaaaaatttagaaaaaaattttcttcccctgcgttcaaaatgtggaaattggtttaaaaatgatagttattagagagagagagagagagaagagaataggataaatggcgccaaaaaaattttaaaaaatttttgaattttttttccacaaaaaaattaactgaatggaaactgtaccgaccgatttggcccaacatttggcagcttccatccaaatttgttgccccagcatttgttgtgccaatgttgtccaatgatgccaatgccgagatgccgcccattgttgttgtgctgctgctggtggtggttgtgccgccgctgccattcaacaacagcgagttggacgtgcacggctcgttgttgttgatgatgttgttgagcagtgttgtggagatggagcggtcaagggacctaaagcaaaaaattttggaatttttggggaattttttggcaaaattaagaagaaaaaatggcatattttattgaaaataagtgcgaggatcataatcatagccgaattttctttgataattttaaagacttcagcctcattagtttaatgaggcgaaaaaagtttgtgccatggtcgagattctcgatcccattttagcagagattaaaaatttttccaatttgaagagcagtgcctttgctgcgcaaagccatcaaccactgttgttgtagagggggaagatgaagcggaggatgaagccgctgccggtgccgtcgttgtcgtcgccgacgattgaatgccgacggaggaagaggcggaatgcggtggtggcaccagcaattcggcctcggcaccactagtgaccaccattttgggtgttggtgaaatcaatttcggcaccaccactgtgccctgcggggatttggggcg

SEQ ID NO: 5805 - DNA, 1339 bp, Heterodera glycines
  unsure (1)..(1339): unsure at all n locations
gcgctgagttatgcgcaaatgtgccacgtggtgcgctctcccagtgaccgacagacagaagaaattggagatgccccactataaggaaagccatttttggcaaattggaaagttttttaaatttttttatccttgggcggctaacaaattacctgtaatttaaatggtgttttttgaaaattttcaaaaattcattttgcttggaaatttgcggaccaagcgaagttgtttagaaagtaaaaagtttaaaaaaaaaatttcggctttataatttaaattttcaaaaataaacctcccaatttttcataaaaatccggactttttttagcaaattgaaggatttttttgatttttattagccttgtttttggcttcataatttaaattttgaaaaagaacccaaatttttcccataaaatttcaaaattttttttattctttcgtaccccggggctgttggttaattaattattcttcaaatgcctatgctctgcatcgaaatgatcatccgaagaacaaaaattaatcctacagagaatgtgtttggtgtgaattctgcgcgtcgtgtcctcaggggggcttccccgccgccgttggcatttaaatgaaaatcccaccgtgtttttttatttaaatttcagacatcccccgccggcggaagacaaaaatgggtacaagcgtcggcacggcacatttgaggaaggaaaaatggggggatttaggaaagcgcagtgtcacccgcaccgaccccgacgggcggggaatttcggcacaaaactcgaaaacagcagacagactggcatctctgccttccatcccctgaggagctagacttagagcaggccagtcgggcggggtatgatggcatggcacacgaattttgtgccgtaaaacgtaagggcagcgagaggacaggcggccgttcctgccagccggaccggcttgcagcaacagcagcggaacgccgattaaactatattatgtatgcactgttctggctggttggctggctggtggcgtggcgctaaaaggacgggacggcgtgccctgccctccgtcccctccggggaaatgggttgttggattgggtttgggcggtcttttttggatgctcttctgttgctgctgaggacgtccctcccccctccggcgtcggcgccgcctcaggggttgggttgngtttagagaagcggcaacgaatccctgcggacttgtagtgggggcagggggagggggaaatgggcgtttttggggggttggatacccctccgtccccgggggtgggaaggaagttccgccccctcccctccccccccccccccctcgggggggggggggg

SEQ ID NO: 5806 - DNA, 3132 bp, Heterodera glycines
gaaaaagggcatattggatctgcggaagggtcgctcctcttagtgtatggcctatttcttacttgggcgctgttggttcgagaatattcctctatgctttattaggatgaaacttagggtatctcgcaagtcataaaaggtttctccatgcaggcaatctactgtaccatgagtcataaccgcggggtgggctcaagaaaggactacagagatggggtgttcattgggggttcagcgagttactcatatagtcacatcagtacaactaatggtagcaaatgcctgcaattgggaagatgcataagaataggagcagtgtccatacgtgtgccacctgtaaccctccattaaactccttggggaaatattactatcgtgcctggcgtatgttggtcggctacgtgggtgccaaccatcccagaaattactttaatcggagagttcgcgaaccaccccccgactccggacattgccgtagccactccgcccccgcccccatgaatttgcgaccccacatagtgcgccaccccccccccccccccccccccccccctcggggggggggggggggcttgaagtgggcgaggcaaatgggcggtgacgactctccgccggcggcgcagcgcagttaccgtaattatttgggcgccgagcggggcgttaagtgttagtggtccgtcgtccccccgggggtgggcagatgagcggccggtcgtccccccgggggaagaattctctcctcttctcacaaccttttctgctgctatatgtgtgtgtctgtgtgcatttccggaccgcgctttttcccaatttcaaaaaaggcggaagaaaaaaaaaatttttattttttgaaaaataattttttagcggagaaaaattttgggttttgaatatttgtgaaaaattttctgctctcttctgtcaaacggaaaatttaattaaaaatattgttgcgcaaatttaatggacaatttttaagttaaaaaattcttttgggtttttcaatcaaaaagtttttaagagcgaagaaaatttaatttatttttagaaattaaaaaaatagacattttacaagcatgaaaatttcccatttaaaatacaaataattaaaatatatatatatatatatatatatctttacaaaggtttagtgtcaagaaaattttaaactcaaaaaaatgaaaaaacatataaaaagtttttaaattaaacagaaaatttaaatcgaacatttaaaaaatgaaaatatgtttcattcaccaccatttcaaactttttaaaattaaccacatttcgatttattcttccaaattttgcgctgtaaaaataattaatttcggcaattttttggcaaaaaaaaattaaaattaatttttgtcgcaataaatttaaaaaaaaaagaaagcgaagaaataatagcattttattcaacaataaaaaaagcgtttcacctttcctcacagcggacgagaagaaaagaataaaagtaaaaagaaaaaaaataaaataacaaaaattatctttatttatttataaaaatgtcaaaaaaataaaaaataaaataaataataaaataataaaaggcgaaaaaagcagcggaggacggggaacaaaaacagcttcagtcagaacaattggaacaaaaagtgtgaaaagttttgtctgttttttaaagggtaaaattggtgggggggggaggaaaagcacagcgaatgaaagggaaaagcaaagcaaaaatgagtcagaaaatggggaaaaaagcgaaaaaaatccgggacgaacttttccaaaaagttaccaaatttggaaagaggtgtttttttaaatttattttttgacgcacgtactcaattttcaaattcctattaatttgaatgaatttttatttaaattttatttaaaaaatagctagtttcgatttcgaaaagattttaattcaaattttatttaataaaaaatataaaaacgatgaactttcaatgaatttgagaaagaatttgaatttaaattttatttaaaatagctagcttcaattttaaaaagaattttaatttaaatttaaaaaaaaatagagaaaacaatgttgtttttctaacaaaataaatcgtctccagatcttcttaactctaaaaaaataaaattcgcgcaataaaaataaaaaaaatttcctggcaatcttttagctcaattaaagaattttttggaagaggagggcgaaagctcggaatttagaaaaaaaattagatttggtgaaatggcaattttcggaatttgaattgctaaactggcacaagtaagtattagcgagctctttgaagttgccgcctttgattggcaaattagccgtgaaaattaaaaaaaaaaagagaaagtggttgaacttataaattttggggcctgtaaaaactgaatgaaatagtgaatggcacataattggccgaaaagaaaatcctctcccattcccccccccccttgggccttgtttgggttttgcagtggtaaggaatgtgtggggcccctgaggcaccatggcttgcgcttacacattcatttccaatcagactaatggatttgccgggccggggagaggggtggcaaaattcgacaaaacccatggcaccgccggcggcaagggccaagccgagtcaaaagtgccatgggctggccgcacacgtataaatagcggaaaaggatgagccgagccaaccaacgctcgtccccccgggggaagagtgccaaaatggtggtggttgtggtggtggtgccaagccaagccgagcaaagagttaagttggtagtggcatggccataacccaaggcagctcatctccatccggcaccgccgttaacggcatacgcccccaggcgccattcgttggttagttggctcaatggcaccgccacggcatacttaaagctttaaggaggggggggggggggtaagtggcgtgagagagagagggaggtgtgcgtgctagtgccgaaatgccaacccgatttcttctacggtaatcgggcgcgccattttacttatccctcaggggcggctttttacattcgcttaccctccgctggcgccctaagcaaaatctgggattatgttggaaaggcaaagatgatttgcgattagat

SEQ ID NO: 5807 - DNA, 8573 bp, Heterodera glycines
  unsure (1)..(8573): unsure at all n locations
tgtgtcgagtgacaattgtgatggatttttaaatttgtaaacaaagaaaatttacaaatttttatgaaaaattttgcagattttttttttggaaactttttttaaatcagtaattcttcatgaaattttgaaaagtttagaataatttcaaacaaattttcttgaaacactctgttgttgtgcaatgccaacgccaactctccccacagattgacgcgtggccaaattccgatcatcggctgcggcgggatttccagcggcgcggatgcgtacgagaaaatcaaggcgggcgcctccgctgttcaggtgatgggatgggtgtttacgggaggttaacacgagcccacccagaaatttgttggtgactattttggctctctcaaatacggaagtgtcccactctgtactttttaattgaaattttcaaaaaaaaaaaattattttcagaaaatcaacctaaaagcgttgttttttagtagtgtttcactaaacaaaacctcataaaaattttgccgcttttgcagctgtacaccgccattgtgttccaaggctttccggtggtcggacgggtgaagcgcgagttggccgaactgctccaaaaggatggctatgcgcatgttgcggaggcggtgggcgcacagcataggaaaaaatgatcagttttactttgtttatgttcgttgtattggtnttgttgtntgtttttttttggcttacaaattttgtgagcaaatgacagtaaaacaattattcattttttaagaggaaaaattctacaaaaaaaatattttggcccaagaccatttatttgaaacaaatttgggcgacgccngaatgggcgccaatcaaataggcgccagccccccttttctttccctancaattttttattttttgtatcaaattttttcattactacgtatctctgcaaaatttggtgcgcccctgatcaattacaaattatttatggacgatcaaatttttagacattttttaagtgcaaaggtggtgtctgcaaaaaattttcacccgggtttaaaaaacctaggaaaatttgtaagcatttgtagtgctctgatacgtatctttgaaaaatttggtgagcccctgatcaattacaaattatttatggacgatcaaatttttagaaatcaaaaataatgcataaatattttttcagaaactgctctgaaacgcaccaaattttatttacaagttaaataaggcactctgatgcttttactatcaaaaagggagatgaataaaaactttaaaaatttgtaattgctttttaaaaagtcaatattatgctttttgctttccattatcgggtttatcaattttgggagaagtataaagtacttagtattttgacagatttgggacctcccaatcagaaaaataacacagattgaaagccctgctatcttaaaacgtcgaattcagcagaaattatgatggaacgtggcattgaaaaattattgctctgcggagtttttagtggtctttattcgaaaatttcgattcaagaatcattcaacgnagaattatgcacaaaaatgggccaaccaaccattcatggactcccatatttcttggaataaaattggttttgaattccccaaattgacgcttctttttgctcaccatcaacgctcatttcagcgaagcaaaattttttgatgtccgtctcatgccattccgtctgtttgactttggccatttcaatgattgtgctgccaagtgtttgcaacatttttgtgtcctaatacaaacaaaatacacacacacagtgttccgcatcattagctaatgaagggctgaagaatgaagaaaattgatcttccccccccccccctccgagtatcactattttggagttttcactattttggcgttttgtcactattttttcactatgtcaaaaatgcaaatacacccctaagaatcgagctaaaatttttcaaaatatactcctatgaaatgaaaaaattttctaaaaaatttactttcttggcaaaaatttttaattttaaaaatttttttaggtaactattttgggttttttggtcttaaaaatccctgtcctactcatttgcaactgcaatcagtgaataaaattatttttgctcaatttttggctgaaaattatgtcactatttcagactttttgtcactattttggcatttttactcactatttatgttaactattttttgaaaaaacgaattttgcctatattttttgttttgcttacaatgtttattcacacacacatagcatatacatacatacattcacacacgcaaatattgaaatgacaacagtttttgggggagttcatgtgaaatgggggtttacaatacaatacaacaatggggggtcagatgatccgatttctccacacgcatcgctctccgggcagttccaccatccttctgtgtgcagttagtgtgtgtgcgcgttctgtccgtccgtgttgtgttcgttaattatttgaattaacgccaaaagatgctcgtttatcgatcatccttttgacccttcgtgttgtccatttaaaccccccttttcccccattccgtgcatttctccctcattcatttgttgtttccatttaattgtgacccgctccctcccttcgctatttattatatttatttgtgtggaataaatcaatattattccattgactgttgaacggacacaacagttattggcgcagtcagcgaaagcaaagacgagcgaaacaaaagcggagaggaacgacgcaacaaatcgtcaattggaattgctaattccgagttggaatagcaattgccaaatcgtctgagaataaagctaattcccagtggaatagctgcacacccaggaggtggcattctcaattactggtgttaatccgagttggataacagccagacgtcaatcgccgaatttggagaatttctacattcaattgttaatccgagacggataacaattgcgaatcactgttaattcgagttgaataacagtgaccgtccatcatcaatttcattgttaatccggttcggataacaattgacaatcactgttaatcccagttggataacagttgaccatccatcatctttaatttgatcctagtttggacaaattataaaacgcaacaatggcagcggttgtaaaggctggcaaaggaccaggcccttatacatcggaaacgtcgtggaccatttgggaagaacgatttgagtttttcatcaaactccgaggcatcactgatgcggagacgaaaaaattgctcttcttctcggagattgggccaatatacgaagagcttcgccaaatggcgttgccagacgacgtccgcgacatgtcaattgatgagatcaaagcgctgatggaggaacgatttggcgagacgaagacgattgcggcaaaaaggtttgagctgttttcagccaaacaatcatcaggactgtccattcgtgattactcaatccaacttcggaccttaatttccaaagccgaatggcataaggattcggtcgacatgtgcctgagcgctcttttcatcaacggccttaaaaaggattcaattcgggccgagttgataaagaagggagtgaacgaaatgaagttcaaagatgccgttgaaacggcagtgcttctcgagcagtccgacttggacgcagagcaaatcggtgggcataagaaagcggaagtggcgaaagtctttgctccaaagggaggaagaaagattagcgcaccaacgcagcaaatgcaatgccatcgatgcgggaggaatggccaccgcaacaacgagtgcccgaacaaggactcaaaatgccgaaagtgcggcaatgttggacactgggctgtgatgtgcaagacaaagcagggctccaattggccaaggaggcaagggaagccggttcaccaggtcaacactgaaagccaaaaagcacacgatattggaacactggccaagtctgaagaagtcaaatcgatttcagtgccaccagcgatgataaaacttcagctgagtaaaaaggcgacagatttcgaattggactgtggcgcagatgtcacactcatcaccaagaatgattggatgtccatcggaaggccgaaacttggacaaacttcaggattgatggcatatggaaaaaagccgatcaaagtccttggatcgttcaaaacggatgtggtgtacaacggcaaagaagtgaataccgaaatttatgtcgtggacggcgaaggcaaaaatttgtgtgggagagatttgattggtgaattgcaaatcgatctcaacaaagcgttcggaatgcgatcgatcaatgaagtcaagtgcaaggcagtggatcgagagctgggagcggtgcttctaaagtacgatgaggtcttcaatgacggactcggccgatgcacaaggcaaatttcgttgaaatttaagccggaggtgcaatcgaagaagtgcaagccacgccccgtgccttttgcattgagacccgaagtggagaaggtcatcgacaactgggtcaaagatggagtgttagagcaggtgacaacgtctgagtgggcaacaccgttggtgattgtacccaaagccggaaacaaaattcgcttatgttgcgactacaaagtcacggttaatcaatggctcgacattcatcaatacccgttgccgcgcccagaagaattgttcagcgtgttgaacggaggcgaaaagttttcaaagttggatttgaaggaggcttatcttcaactaatgttggatgataaagccaaggaatgcttgaccatttgcacgcataaaggcttataccaatttacgcgtatgccttatggtgttgcgtcagcgccagcaattttccaacaagtgatggaagacgtccctcgtggaatcgacggagtcgccgtctacttggatgatattgtggtgacagcccccaacgacgcggaacatttgaaacggctggaaatgactctccaacgcatccaaaaatttgggttgcgtgtcaaaaaggaaaaatgttcctttatgcaaaagcaaattgcttatttggggcacatcatcgacaaagaagggattcgaatgtcgccggacaaagttgaggccatacagaaaatgccagcccccaaaaacttaaaggaattgcaatccttcttgggcatggttgggtattatggcaagttcattccgtcaatggcaacaatttcggagccgttgaacgagctacgccgatcagagaccaaatggcattggggacaacaacagcaaaaatcattcgaacagatcaaaattatgctgtcgtcgaacgagctgttggcccattttgatcccaaaaagccactttatttggcaacagacgcatctgactatggagttggagcgatccttttccacaaagatggaaacacaggagagtttggcgtgatcgcatacgcctcaagaacattgagcccagccgaaagaaattatgcgcagatcgaaaaagaaggacgcgcagtaatcttcggcgtgaagaaattcaaccagtacttgtacggtagaaaattcattctacagacggatcacgagcctttaaaaaggatttttggaccaaaaggtgaattgcccgtggttgcggcacgacgacttcatcgttggagtttgaagctcatgaattatgacttcgaaatcgaatattgttcgacaaaaaatttcggttacgccgatggattgtcgcggttgcctagtccagaaattgatcaggtctgtaaggaaagtctcgagctgaacaaaatccagcaggagagccaaaacgctttgccgatcactgcgaaggacattgcgaaagaaattggcaatgatccggtcttcgcaaaagtaaaaggttttgtgctcaatggatggccaacaaggatagaagacgagaaaattcgcccattttttctggtaaaagacgaattggagctgaataacgaatgcctaatgttgggatgtcggacagtgattccgagcaaattccgtgagaatcttttgaaattgatccacgagacgcatccaggaatcgtccgaatgaaggcattggccaggcaaaaagtttggtggccgggcatcgacaaagacattgaaagcatgaaaaagaagtgcaaaatttgtcaaacgaatgcgccggaaatgaggaaagtccctctccatccatgggaagtgccagaaaagccatggcagcgacttcacattgacttctgtggcccatttttcggaaaaatgtggctgatcacggttgatgccaagacaaaatggccagaagttgcaatcatgaaaagtactacgaccgaggcaacgattgaggcacttcgaaaattgatttggacccacggattgccagaacaaattgtgtctgacaacgggccgcaattcgcgtcaaaggagtttgaagaattctgctccaaacgcggaattgaacgaacgctgacggcaccataccacccgcagagcaatggggaagccgagcgttttgtccaaacattcaagaaaggaatgttgttggttaaaaaagaaaccaactgggacaatgaattggccatgaaccaattcttactcaaataccgagtaactcctcattctgcaacaggacggtctcctgcagaaatgatgttcggcagaaagctgcgaacactgctcgacctcgtgcgcccgtccgaatcgaccgaaattgaaggaggagaagagaaggcgaaagaaaatgctgaaaagcatggccaaaaatatttggctcgcgccaaaaagaactttgatcgacggacgtggaaacgatcgtttaaaactggacaaagagtctttgccaggaattacagagacggttcgaagtggatggcaggccaaatcatgagccaaataagcccatcactgtttcttgtccgaacagcccgcggggtctggaagcggcacttagatcagctgaaatcggacgagacgaagcctgatctggagagcaacaccgacgtggactcaacatcgtccataggtgatcagacggaggatgaaaaggacggaggacagcagacggacgtggaagaagagccgaacgatccgccaaatttgcacgatccgccattgagaagatcggtgcgcgaacgaactccacgacagatcttcgaccccagcgcgtgatcgctgacttcagctggtggggaggagatgttgtgttcgttaattatttgaattaacgccaaaagatgctcgtttatcgatcatccttttgacccttcgtgttgtccatttaaaccccccttttcccccattccgtgcattctccctcattcattaattgtttccatttaattgtgacccgctccctcccttcgctatttattatatttatttgtgtggaataaatcaatattattccattgactgttgaacggacacaacagttattggcgcagtcagcgaaaaaaaagacgagcgaaacaaaagtggagaggaacgacgcaacaaatcgtcaattggaattgctaattccgagttggaatagcaattgccaaatcgtctgagaataaagctaattcccagtggaatagctgcacacccaggaggttgcattctcaattactggtgttaatccgagttggataacagccagacgtcaatcgccgaatttggagaatttctacattcaattgttaatccgagacggataacaattgcgaatcactgttaattcgagttgaataacagtgaccgtccatcatcaatttcattgttaatccggttcggataacaattgacaatcactgttaatcccagttggataacagttgaccatccatcatctttaatttgatcctagtttggacaaattataaaacgcaacaatggcagcggttgtaaaggctggcaaaggaccaggccattatacatcggaaacgtcgtggaccatttgggaagaacgatttgagtttttcatcaaactccgaggcatcactgatgcggagacgaaaaaattgctcttcttctcggagattgggccaatatacgaagagcttcgccaaatggcgttgccagacgatgtccgcgacagtttgctagtattgaaaacagtggaatataaaaaaattatcgtaattttaagcaaaaaattaaagatgagcccaggggcataattgagaaaaattgaaatgttgagggggtttaagcaacaacgtgttaatgttatgaatgataattaaccacattgcatgcgattaaacactgtggagtaattagagttattttttttaatgtctttctaaattttgactatttaatataccgacaaaaggaataacaaatttgaagatatcaaatttgtttgaggatgctggctataacatagacttaatgtaactgctccaaaacaaggtgcagaaaaaagtaaaatatttgattaaaacattttcatcctatttattcaacgctctagatataaaaaagattatttttaacaaaaactaggaatatcagccttttaagtgatatggaaaagtttgctagtagtgaaaacagtggaatataaaaaaattatcgtaattttaagcanaaaaattaaagatgagc

SEQ ID NO: 5808 - DNA, 4883 bp, Heterodera glycines
ttcgtctccgactggacgcttagaagcagcagaaaattttgagcaacagctccagaacaatgggaacggcgatgaacagcagggcagcgaatgttccatttgcatgaacaacagagtgaacgcggtcatctaccggtgtggacatatgtgcatgtgggttcagcagttgtgtgaaacgattagcacaataaattattggctttattgttttctactagtgcactcaccttttacgcgtttaatattaattttatgatatgaatacacaataagcgcttcttaaattgattcaacacatgaaaaaacgtcttaccctatcttttgtttctgtgactattcactaacgcccctatctcttacaggcataatgacagcattatatcctattctaatttatctgttcaattccttctgaccttttctgaaagaataattatatacctgaatctcctattattttagttatttttcttatccttaaaaaattaaaattcagtagcaatgttattataaaatggatgattaaagttgtaataattagcaaaaaaaaatgttttctattgtaattaaccaattttgctttttatgagttgggaattgactcaaaataaacatttttcttaaatttttattaaattaacaaattttaatcagtaatattaatagaaaatttaattccgctaaattcgcttcccaaaaaattcaatgccgatttggcgctttctattttccgttaatgtcgcattaataattttggactctctttgatgaattgggcggggggggggaggggcaaaatgaacagcagcagcagtaatagtgctaataacataagcattttggaaattttactactaaaagcaccaaaatgcggaccaaaaaatgtaaaaattcaattacaaaatttttttaaaataaatttaaaagcaaagattggtaaatagaaataaatatcaattaaaataaaaaaaaataaattaaaattgacaaaacaacataatttattatttagaatttatataagtatggccatgagggattttaaatggtcaaattataacatttctttcaaaagtgccaaaagccatttttgtgccttatttgcgcgtgtaaattggcagattttacaccagaaaatgctgcatttgacagaagttttccaatgaaaatagaaaagcgcagaaattagtctttttgttaggaaagctaaaataagaaataaatgtttaaaaaaaaatagtagccaacatttttagtaaattgattaataaagtcagcgaccacaaatttggcgcttagtttttgtgtccccatacataaagcatggaatcggcagcagctttggcttaatttgagtcaaatttcaaggaattactggataaaaataggacgagaaaaacgcttggggtagttgagcacattaaaacaatttaaagagtaaaaaaatatgaataaatttttacgggaaaatttaaaataaatctaaaaaaagttttacttttccctgttggggcctatttcaattcggatcctatctcagatacgacatgtcttatatgtagatttataagtcagaggccttacactagacatacataaaacccgaaagtaaaaaattagataatttgaagaataatttttaatttacgttaatttaataataataataaaaaaaattatttaatcgaacagaaaaattatgaaaaggaaaatttaaataaaaataataatttgatcaatctacagtgtgaaacatacatatatggtcaactggttaaagcatcaatctttcttcattttctgcccggattcgatcgccacacacttaacaaaatttcattattattaattttgtaaattttcctaaagcaaaacattattttttcaaaatttaattaattgaaattttattaccaccaaaaataaataaacaattagaatatttctttacattttaaaacctagcctgaaaatcctcattgatctttttttggtgcaaaaattttttaatgcggaccaaaaatcccttttctgtcccaaaatacagagaaatggccatttttggacaaattctgttaacaatcataacaaattttatcttcgcggcgcctcccgacgccaccggccctatattttcaaaaaaaaaaattttaaaaagcccgaataaaatttttttaatttatttttttcatttataataaaattttaaaatgctgatttttgtcggccaaatgctgatttggaaattttcagttgggagccccataataagctcagtctgttcaagacttaagatttataagtttaaatagaattagacgggtctcttgatattttcgggcccaaataagccgggtattcaggtctaagtccaaacagaaaactagtacacgtctaaccttacgtttaaacagctgtaagaattgactaaatagactaaataataagatcatcaggtttcaattcttctatttttttaattttcaagaaaatataaatttttaagcacaaatttgttaaaagttattaaatttaattagttttataacttttaatgtcaagctcgccataattgtattttctcattttttgggtcattttaaatcgtatccaccatttttgagaagttttaagtttgagagctatgactaatcctcaatctttactgcctttttttaatttttgtgagtgaatgattggcaattttaattgtgaaagtccaaagcctcttatgcaaaggccatttcttttgtcacgcataagactcgaaaatgtttcattggtttgactgaacaaaatcttattttatcaaatacttttattattaccatagtcatgaattgtaagggtcaaaattgtcggtaaattttttaaaaatattgtggatcaattattaataatttcacttgtcttattttagtaatcatagtatatttaaccgaaaccgaccgaccgaagtttcggggatcctggtttggtcatctccgttctcaccattccccggtttgacgggatgtcccgctggctacgagccagcacttaagaagtggcaaaatgagagaaatatgcaatactttctcggatggcttttgaactcatggcctaccttttattcaaatagtaaataaaattataatatttggtttggtgccaaatttcttcgtccattgttgtaagttggtatatgggatgccaatttttttatcaattttatttttactaatcattttgtttctttttttcatctccttacgagtgattaaaccgaattttctcttccaacgataaattgaatcccacgaaacaccaatttttccgctatttttactttaattttccaattgggtttaaaattaaatttttttttcaaattcttcattgattttttcgaattgctcaatttttttcagcttttatttatttggtaggctctttaataaatcttaaaatgagtcaatttgtaagatttaaatattttcatttcttcttaccaaattgcttcttccattcgtaaattttatgacgacaaattcccaaattttctgtaattatattcaatatctttcttttcttatcgtcatatttaaaaccatgaattttttcttttcttaattgatcaaactttctaatcagttcaatcattgtgtccttatttatgtccttaagtacagtgcacttctgttttgtcctaattttttcttcaatttacaaattgtatttcgatcagcgcccattttttcctttccttttcttttttctacctcaaatattataaggacccattaaattaaaaaataataattatttattcgagcttgtggaagtcctatcgtatattaccgtatcattgtaatcctcatcaatttcaaaaatactctgatcagaatacggagcattttgatcaaactgctcatcaatatcattaatctcattttcaaatgatctttcgctcaattggtcgaattcaatttttggcactttgagtgttgtttttaaataattcttttgttcctccaatggttctgttttaatttcttgcttaattattggctttaggtcttcattttctttttctatgtaattttcagactttataattatttccttagcattttgttgtttataattttcattgttaccaataattgtttcctttatcgattgattttctgtgtatttttgatttttaaaacttttcgggatcgaatcgatagctgtgtatttttccataaatcatcaaataaatcttcatcaattccaccaattagtacgattaaaaataaaaagaaaataatcataagattaattttcggcattttttgcgtcaaaaaattaaatgttgttaacttaattaaaaactaaatatttttcattatataagcaaatataatgtatgatatatgtgattaataaaattaaacaacaattatcaaaatattaatcagtgctttcaaccaaatatcactgtaagaaattctgcttgtcttacattactatcagggttgccgcgggtcgaaaaaaatatcgggtcgggtttcgggtcgggtcggcagaaaattatcgggtcgggtttcgggtcgagaaaaatgtcgggtttcaggtatcgggtttcgggtcaattgacaaatttttataatatgttcaaaatcgataagaattttttttatcgaatgaaaaatcaataaaaattttcggctctagtgcactttatgagtccaatcgacttttatgagtccaattgagttttatgagtccaatcaattgacaatcccgtgtttttatacaataactttgttcatgttcgaacaaatcctatctttttggtatcattcgaaagcacaaagtctaacgaagctaaaatatataaaatcgcagcgttcagg

SEQ ID NO: 5809 - DNA, 1058 bp, Heterodera glycines
cgccaaatttcaaatgctctctcaatgagtatttggccgctgttgtggcttataacggtttttatttcaatgttccagtgaaaacaatcgcaaaaattgtattgagtttgatttttgctgttctgtcctcccaaaatttgtccacaaaacagcagcagaattctaatgagacaatttttgatggcattttgacatttgaccatttttcggtgatccgtccaaatgaatttgaatttggcgccgaagaattggcgggaaatttgaaaattgaatttaacgaaacgatggaaaatgtcaaagacccacgggaaagaacactttcgccagaacaaagagcgaaaaagcagatgatttggctgaaaaatgtgctgtttatgagccctgatcaaatcaaagtttgtcattaaccaattaattacccaattaaataaatatttttaaattaaattcaggataacagaagcacaactttggtgaaagacttggtgtggttcgtcggtttgctgctctacagaatgttgttcaacaacaaacaccccatggacaattgggagccaaagcgccgtttggacatggaatttatggcaaagatgggcttctcagggtcagattatttctacatgtacaaaagagatgattttgtgccgggagactttcgcatctttccgttgaagccaaaaagtcggtggatttggatgccggagaatgggcgagacgaaactggggaaatggcactggtggaggaacgaattggcatggaacaggtggccaattaaaatgtcaaaacggtgttattaattaatttttctttttacctaggattatatcgtcaaattgagtggcattgtctctgaaactatgcagaataatcaaattatgagctattcttattctccaagatttagttttaatcaagagaatgaagggcaggaaaagctgattgagcttaacaaagtgagcatttgtcataattataccaattaattttattgctaattattcctaatttagatgtgccatcgaacctttgctgactatagaatttcattcagtttcat

SEQ ID NO: 5810 - DNA, 988 bp, Heterodera glycines
ggaaccattacaggtccaggtccaacaaggaatccaagccagttcaagcattttcaagatagcaaactctctaatcatcaaaatattatttattaccaacgctttttgtaaaatcctcttttggtatgagtggaaaacgaatgttggacaatattgggtcaagaattttgcctcgattttcagccgaacattcgatgcctttttgacggcactgttcgtcggaccaacggagtgccttaattttagaaaataaataattgtaatttataatatttaatttaccgcattccaaatttcgatttcactgcttctcagctcatctcttttgagaatttcacacaacaaattttgatcaatttgcaaaaaggattctgatttgatcaaagcattgatatttcgatcaatgtagtgcaaacaacggagagaaaaatcccaaaaataaaaatattataaaaaattatataattattactagggattgttttttatgtaaatacatatttttttctggtttctacatgctttgaatagtaggaaaatcactttattttttgtttttgcgaacaaaagttgggacctttatttacatatttggtatatattttgggtttttctacatattacatatgtacatatttttatacatattttggacttttttcgtatatatttcgcaatctttcgtaccggactgggacagtttagtctggccggtttattctgaaccaagtttagagcatcataactcttttctttgttgaccaaatccaacaataattgtatcattcgaaagctcttaataagctctatcggcttcccaaaaaccacaaggatataccgacatataaaaaagttataagtaaaaatatgcaaaaattctgactttttggtagtattcatcttgcaacttttttataacttgttaaatcgcttaagaatagcttatcacaagcttctaaacatgtggaactttcaaatgatgctaaat

SEQ ID NO: 5811 - DNA, 1142 bp, Heterodera glycines
ccgtggatttggaaatttcattacttttgcggtgagtaattttttaacatatttacttaattggcatatctaattatggttaatcaaggaattgatggactcgaacaagagcttttacaacaaagcagaggacaaattggcattggccattgatgtcataactgttgatgagccaaaaatggagaaattcatttccgatcccaacaaatccaacggcacactttcaatggaaattgaaaaagtgtcggaatttgcgcgagaaatcttttggagtgaacgtaaaagcgaaactgtgcacatcaaaggatttccatggaaagtatgggcacgaaaaagaggggaaattggaagcactgacactgcgaaatggttgagcatttatctattgtgtgatgctactgaaaaaggtgcaaaattactaataattaatatatatattaaaaacaattaattaattgatattgagcagaaaattggagttgcaaatgctcgggaaatgttcgaattgtctcacaaaagaacggagtgttggacgaattcgttgaccttatttttgacaataagaccatgttgcaatgtgtcgctatcatttcttttgctgtgagtgacaattaaactttcccttaattgacccaattatggaaaattaaggaattgttggactcgagcaaaggattgtatgacaaaaaagaggacaaagtgacattggccattgatgtcacagtgaaagaagcaaaaacggaggacgaaacataaatgcccaatatgatctggcaaaaatctcatcattgaattatcatcctatggacctgctgtgtttagcttctttcttattgtttatcttttgggttttacaatattgatttatggattattaaagcggctttttttaagcattgaaatgaaattggcatatcccctgctgtgccttctattgcttaacaattaattggtcattaaattctgttcggtaatccgccacgccgctcttttttgaaacaacaattccttcagtttaatcttttaatttttttgggtcaccattttacttcgataaaaattatatgggaaaatggaggtgggggagggggaagataagcaaatccaattcaaatgccaatgggtaattgagttcatttttc

SEQ ID NO: 5812 - DNA, 3519 bp, Heterodera glycines
  unsure (1)..(3519): unsure at all n locations
taaaacaaaaatgtaataaaaaaataataatnttataaataaatcaaagaaaagtaataaaaaaataataattaaaataataatttgatagaaaattattaaatgtaaaaaaattaatttaaaaaaaaaaaaaaaaatttaattttcaactaatatttgaattattgttgagatgaatcgaaatcgtacgaaggagaagtaagctcatcagcagagtcatttgagaccaaattaagcaattaagcaacaaagtcagcaacaaattccgatcattgtttatcggctagaacaaagacaagcagaaaaagccgccgcacgtttttgattttatataaaaaggacaggaagggataaaatggataaaatacagtaggaagtaccgtaagaactgagaccactataatttttttattttcaaatttttgctatataatttttaggctaatctttgtcataaaattctttttttttgttgagtgtttgtcgtacattatagtaataaatttatactgtgggtgtattatactgtagggcgtttgcaattataattgtttagtgtaatctagggttaagccccgaccccgagccccccgaccccgacccccgacatttttgggacctattccccgacccgacccccgacatgtcgccccccgaggttcccggcccccgactttttgccccccgaccccccgacactaattcgggggattggggactccgagcgttttaaaaatttaaaagttatgcaaccaaaacatttaaattttacctatcactaagccaaaataaaagtttttttctcactcttttagaaaaattaataatatataatttgccaaattaaactttgcacagatttacaattttccaggaaatttaatagattttcacccaattgattacttttaatggcttcaaaagcatctgatatttggaattttttcacgaaaatttcttcagaggttgctaagtgccggctttgtgaaaaccaattagcgtgtaagaaatcgtgcacaaaaggattgtgggggcattttaaagcgaaacacgctaaagaatttgaaaactatttgcaaaaatccgacccgtcaacggtaatacaagcttccttttttattgaatataaaaaaattcagaaaaaccaaggcattacaaaattttttggcaatgaagacccacaaaaaaaggcggatgaacaaattgcaaggctgatgataagaacgaattgctcttttttatttgttgaggcaccggaattacagaatttgttctctttggcctacccgaaactccaagtaatatttttcacccatttttactattgtcatattttttaagcttcgccgaaaagattattttcggaggaatgtaattcccaaaatggccgatgaaattcaacaaaaaattgttcagggaattggtccggattttttttctgtgacctctgatggatggtcgcaaattacaaaatcacccgcactcttaaggttctctattccttttcatagtttataaaaacagactttagtgttactgtacaccatataaatcaacaatttgtacacgccgattttgtacttgatgtgattccaatgacaaatcacacaggagttgacatagcggaagaaattggaaacgctcttcggacaaatggattaaacccagaaaaaattatttgtttggttcgtgacaacgcaaaaaacatgataagggccacaaatattttgaacttgaataggttttacctaatttttgttttttataattatttttttaagctttcaatgtgtgtgccattttcttcatcttgttatgggagacgtattgggactgtctgagttggcaggactcatttccaaaattcggtcttgggttactttttttcgtacaagtaaaggcctgtccttgctccgcgactatcaagaaaagacaaattctaagccaaaaaaactcacaatggtttcataaattattgttttcacaattattcttttaaattaaggcctgcccgacccggtggaactcgacctttgaaatgatgatggcatttcgtgaacaaaaaaacgttcttttaactattgaaggagaaagacgaggatttggtgttggctcatcaaaaaagtcgcgcctagatattgtccctgaaaatttaccaaatttggaaattaacgactttgattttttgcgcgaactgtgccctttattggaaattaatcatcgagagactttaaaagcaagtgaaatatgttaaaactaaaacaattgtaaacaatttcagttttctaatgaaaaatcgtcagcatcaaccgttatttcgactataaaaagattgcgtgattttttgcaagaaaaaactttctcaaatcgcattttgggcgtttctagggtcatagtggagtctttaaatgaacgagttcgtgaactttgcagcaacccactgttgcgagtcgcaatgctacttgatcctcgatttgcttacacagaactgttttctcagcaaaattggagggttgtcgaacagcaattaatcgaatttgcaaaagagagttggttgaattattagaatatttggtaattaaaatatgaatccctttagaattggtctgcccaacaatagaaatggacgataattttgatgtgaacaactttggtcaggttgaatcaggaattgaccgttgctgatcaagaattgagtccaagcagcaacgagagcatagagaaatgtattgacgattgcatcacataaatcggagtaggacaaaacgtcgtcagccgaaacgtcgtcgaacgaatttttcgaccataacttttttctttctcaaccaaattaaacatataaatactttattttctttttagatgatatctgggcccaaccaaaatcaccatgtggtatttctattccctcaacaatttccggagatcatgactctgattttttatcaaaaattgaggctgaacttgcttgttataaggcaggccaaaggatggagtgaacggagacttattttcctggtggaatgaaaacactggccgtcttcccgaattgtcaaaacttgcaagaatggtccacagcattcctgctacatcagtcagttctgaaagactgttctcaaaagctggacttatttttgccaattcacttcgaaataggtcagaaatcaataatgtattaatttattttataatttaaggctttccggcaatactgtgcgccaaaattttgattgtgaaggccaatttggacgcacttttactggcaccaacaaatgaatatgaatcagatgagggaagtaaagaaaaagacgatttttgagttttgaagactttatttactagcattgaaaaagaaaaattattattttttggttaaaatataaatttggtcatcccccgaccggggtccccgacccccgacaattgagctccccccccgacccgacccccgacatgtcgccccccgaggtccccgacccccgactttttgccccccgagggctcggggcttaaccctaa

SEQ ID NO: 5813 - DNA, 1750 bp, Heterodera glycines
aattgtcattcctttaaaattgtcatttcctttcccaatggatggcaaagcgaatgcaaaatttttttcctccttctgacaacactgcccccaaaaaatttctgtctgaccttgaccaactacaaatccccaaagaaattgacactgacaactccattcccgattacgccaagttgcttattcacttggagcccgtcatgggtcgggcacatctgctggaggaccctcagccgcgcccccgaccctgtcgatgggcaacccaagctaagcttaccggtaccagcagcttttttgtacagctcgatgagctctacaaatggtatcaatggcgtccggctatgtctactacaaatggagaaaattggcgagaagtgatgtcaaaaattgaaaaattagaaattttgaaaatgacttgcgtcccgccgtacattagtattaaccggacggcgccgtgttttgtgaattgaataattaaatttatttatttaattttatcgatcactgagcttttttgtggaacgacctagcaccgttttgaagaaaggagctcaaaaaccgcatttctacgtttaaatttttcgattatgttgtcactatcggtcactagaaatcattatttttgagcttcgtcactaaaaatagcgaaaaaacactattttgacattttttggaaaattccttaacaaaaatgaatataaccgaaaaatacacccctaaaaatcgacccaacaattttcaaaaatacattcctaagggcgctatgtaatttcgacactgggtaaattcgacactgagtatttccgacactaagtaatttcgatactacgttttcgaaatagagaaatttcgatttggacaagacactaaaaacagcaaattttatgaatgtgtgggcattttagtggcaaaaaaattggaaaaaaaattcttgaaaattgcctttgttcatttatttatgccgtcgcaatctcgccttaaagcaatgtgaaatttgatggaccatttatggaaaaaaatgagagaaagttgtaaaatcccacattctgtccttttccgaggacatgcccaagccgttctctttgattttgggttgaatctggtattaaaaatgcacttaaagtatttgcatttaatttaaaaagaaaaaatcagaacaaaaaaaactcaacttgcggagtgacaaggacaataattaattatttgatcaggaaatgggataaacaattcatcattggcataattggcgttgcaaccaaaaaagtgccaataaaaaacatggcaagaaaaagggggacataattttgaatttgatataaatttcatttatttttgaaataatgttttaaaagttaattttttttatattttttaatttcttttttttaattttaaaagaaaaaattttatttttttaagcagcacttttttggtgttaagttcgggcacttcttattgaaaaaaaaattgtagaggcaattaataaagataaagagaagaagtgccttctgttactgatgagatggttcacttttatttattataaggtggggaggataaataattcacggcaaaatgctgacccaaaaataaaaaataagaatttgaattgggttttgcttatcttcttcttctttttttaataatttttaatttttagcaacttaaatagctaaaatggctgagaaaactgcgcaagagacagactttttttaaacgacgcatgtgttcatcttgccaagttaataagcat

SEQ ID NO: 5814 - DNA, 3148 bp, Heterodera glycines
caactcaaagtaaaaataacaaatgttttggccaaaatacgagctgttgaaatgaccatgaaattcaaattcaattttgccatttccctcacaatgccggcacttggccaattgtgccgttctgtgccacggccgtccattcgtcgctttgtccgtcgtcgttgcccacaaattgcgcaaccaaaatgaccaaagggtccgccaattggggcggatggtcgttgacgtccaaaatgtgcacgtgaattggcaccgtcgtactcagttgaccactgaaaatggccaatgccaaagtgagcgccgacattctgaaattcgaattctcagtttttgcctgatcgcttggagttcaatcgtaaatttgttttggggcgcctcaaaatcgaactgttgacgggtccggattcgaacagtgtcctgacaaatgagggataaaagggattaaaatcacaaaaaaagtgaaaacggcaagaaaatgccaaaattgtctcaaattttactccaaaatttattttcctccccatttttacttttttcttcttttccatttgttccgtttgctctctgtccaattcgaagaattttgcgtccgttccgccgaaaattcggaattcaatgcgcgcattttctgccgagtcggcatcgtccgcgctcagttcgcccaccaaagtgccaacgggcgaattttcgggcacgtaaaaatcgtaggaagaaaactgagggattatgggtgaatttaaaatttgaatttgcgcgctcattcacttcaaagtttggcgcgttgtcattcacatcctcgacgatcacttcgatcagcgtccgggcggagagagggcgagggatgccgcgatcacgggcgatcagtggcagcacaaatctaatgaatgccaatcaaatgccgtaataagcgcactcaatttttttaaatgggctactttgacacgttttccctgtccaacggttggttgacgcggagagtgccggaagttcggtccaatcggaaaaggcccaagcgaacggaagggtcgtcggagtccaacaaatggtcaatttggccattagcaccttaaatgaggaaaaattggaatggaataattccaaaatatttgtagctttaaaaacaaataaaaatgccttcgtccgggtcttccgcgttcacttgcaaaaatgaagtgccgacctaaaccaaaatggctaagaaatggcaaaaaggtaaaaaaatgggcaccgaaatgtcctcagggattgtcgcgcgatattccgaggacaaaaagcgggggacattgtcattcactgaaattggaacatattattttattattatccatttaaattcggaaatattattttcatttttcttcttttctcctcctaattcacagctcatttattccgtattgcctcccttttccacaatttttttcatttttagttgcttcttattttcccactaaaatttgttggcattggcacttaatttctctttttaatttaccccaaatatgcaaaaaaaaagagaaaaattaatgggagacaataaaatgaaatgaaaataaataaattaaaaaatttagtgaattttcatatttaattggaatttgaaccaaaaaatatttttcatggagtaattaccgattcatgaccaatttgtcaatgcttcgctgctcccattcaaaagtaaccgatgaatgaataaaatggcacagagagagagacaaaaggcaaagcgaaagacggggggggggggcagtaaaggggagatgccctccaaatttgcccatccgactgtgaatttggggaggaggaggggacatatgtcattttgacaaacggaaaagcatttaaaatttaaaatgcatcaataaacggggtccaagccgggactgagtgttcgtctcgatttgctcgtcgtttctcccccccccccccaattcgcccaccgtcgtccagctcaatttccagcgtcgtccccacactcagcggcggattgcccgcgtcctccgcccgcacttccaccgcgtacaccgccttccgctcgcggtccaactgcgcgcggacggtgaccattccgttcagagggtcaattctgaaattggaaatcttgggatttattttgagtttggctttcaactttcacacccaaattccgtcgaattcattgtgtatttgagctgtgcgttctcccctctgtcttcgtccgtcgcttccattttggtcaccggcgctccgatgggcgcattttcggcgattcgcagcaaaaattggtgggggacaaattgagggggtcggttgacatcctgcggatttacaataaataaatccctcttggatttgtatgtttaaaagtgcccaccttcacttttatggacacattgcattgtccgctcagtccgtcttcgtcggtggccaaaatttccaacaaaaattcctcgtcttttggcgaaaattcgcgcgccagggaaaggacggcgcccttaaaaatgaaaacaattaaaaaacaaaactaatttaaaatatgtcaattcgctgcctgttctgcccccattttggtcaatgcgaacaaatcgctcgccgccggcgtttgtcgcccgattcgataggaaagcttctgcgagtcgttttcgtccgcgtcatttgcccgcagggaaagcagcgaatggccgcggggcttaattaggactaattagcaaaaagagaagcagcggaagcggaccgtgtcctcctcaagttcaattcgataaagcatttgtgggaaaaaaggcgaattgtcgttgatgtctttgacgtgaatttttatctgaaatttttaaatttaaaacatttcgtttttaaatttttaccctaagggacgcattttttggcggttctccgccgtcttcggccaaaacggtcaaaatgaactccgaccgagactctcggtccaacttaaaaagtgtccaattatatttttgcgcaatgatttgcctgccttttccgtcgttcgcaatgccccgctaatttcgtccaattgaaacggcggcggtggtgatgccattttcgtttcattctcttccgtcgcggcggcaattcggtaacgaatttcgccattttcgccgctgtcttcgtccaccaccaacaaacggcccttaaaattcatttaaaatattat

SEQ ID NO: 5815 - DNA, 2514 bp, Heterodera glycines
ttctcttccgattggcgcattttcgtccacaaataattccaattggtcgtcgcctgtcttttcaatgccaataaatgctaaaaatctgttaaattatgacacattttgtgccatttgtaaccgggtgaatggtcgttgacgtcgattattgtgacggagcattgcaaagtcgaaaaaagagatggttggccgccgtcctttgctctgatcagctaaataagcaaatcaatttgaatttaatctgcttgctgaccaatgtcaggggcgactgttttgggctcgcgcgacttcgcagtgtcacttcgccactttcgtagtcaatggaaaacagcggcactgacatggagacgatgctgaagtggaccttccctaaacaaatcccaaattgcctctaattatccctaattgcctggtcaattaccatttgctcccgcgtccgcgtcgcgtgcccgagggcgaagaatcaccgatggcacgggcgcatcttccgtaacattcacagcacacgcggtcccatttgactgctcaaattgcggcgcattgtcattgacgtccaacacggcgatttccaaattggcactgatgccaaatgaataattagtttaattatctcttttcatctgcccgacttcgaccgcatcggcggttggcctccgtccgtggcgattgcctgcagcaacagaagttggggcaacgcctcgtggtcaagttgggcagcagtctgaacaactcccgacttgggattgatgcttaaaacattattaaacaaatgattttaattatttttaatttgcctaaataaatgggcaacttccgccgcttccttcacattgtccagcgaatatttcacttcgccattggcaccgtcgtcaaaatcacgtgcaaaaacactcaaaacagtcgtgccgatctgaaaaaaggaaaatcagcgaaattaaattgtttaataaatatttaagccgatgaattaataattatccttcatttcaattaccggggcgtcctcccgaatttcggcaatataagtggacttctcgaaagaaggcgcattgtcctgaatgtcgatcacttcgacgatcaccgaaacggtggccaattgggaagggtccaatcgctcgaaagcggtgaccttttggggaatagagtcgtcataattacataattaattattaattaattaatggtgtggccacccaccttcaacacgtgttttggctgcgtttctctgtccaatgctttcgcaagtcgaatttcgccactgactgtgtcaagtgaaaataaatttgtagaactgcaaaaacaataaaacaaaattaatttaatttttggcctaatcagaaaattcaaaccgcgaatcttcggagactccgaaagcgtagaaaagggactgatcagcctcattgtgggcttggacctgaacaaccaccgatcggacgggcgcattttcgggcattctttgagaaaagggaacgaattgaccaaaatcgggcataaaataatggattttgccaaattgataagctaaattacgaactcgacaacgtatttgtcctctttgaagcgaattcgcgagtttcgcgggtttctgcgatgaatccatcgcttggccaacggacgcggcctctgttttagctgtgatagcttaaaataaatgccaaaaatggcaaaaaaaatgccaaataaattgtaaaactttttacattaatttccatttttgcatttgtccaattttcgccctctgaacaacgaatttgcacttcaatggtccaatttcgacttcgccgggggcaatgcctttgttcagcgaaaacaattcccgagaaagggtccagcgaaacaaatcgagaacgaagttggggaagaggacattcttaaaaaaggacaactgatcacggacaaaacagcgacaaaagcaattgtaagaccatttggccatcggaacaacggagtgccgggacgaacgcaacggccaatggtcagaaaagaaggaaaaggataaggatgaggaataattggtgaagaggaggaggaagaggaagaaaaagtggaggaattggagcaaaatgggcaattttcaacggggaaaatttttgtgagggaaaggggaaaaaaggagagaaggaaaacggacaaaaatggcaacaacatctgtgggaggagaaagaaagtgaaacaattggccacaaaatgtaaatatttcatacaaattatcttaaaaattaaattttaaatgaatttcacctaaacaatctttgaccatttatttgtattccttttaattaagagttcctgctgctgagcttttcctttcgatttgtctcgacatttttttcctatgtacaaaaaaaacatatgtcacaaatataacaaggacccaaataattgggacggcatacaatgggaggatttattggggattaatttaggactgagaaggatggttgaagcattgggaattgtggtgggtgacatggacggggcaaagcagggcgtgggagggaaaggggggggggg

SEQ ID NO: 5816 - DNA, 1684 bp, Heterodera glycines
  unsure (1)..(1684): unsure at all n locations
ccaaaaaaaaaaaatntctgcgattaaaaaaatgctacccgtcgctaaagctcctacttaaatttttaatacaaaaaatgaaattttatttttaaatttgcaataatttactaaattttatttattttttattttacacatttttttttgtccgttcactttccaaggaaaacaattagtcaccttcaatagcagttagcagaagttgggtgccttctgctgcctgatcacaataggacacaacaattttgcagcacatccagctgcggtcggacggacggcggtccgtccgcggacagtcgtcggcggcggcgcagttgaagaaaacaatttttgccgccgtcgccgccacggccacttttttccgccccctattcattaggtgggggattggggcggggggacggacgttcatccgtcattcaaatccaatcccacaaccattttttctttattctttattgaaagcaacgaattccttttcctaagatttctaagaagtttttttaaatttttattttttgcatttttcatggccataggaattttttcatataattttttttagtaaatttcttgcgtaaatttctcatattttcggggactgttctttttcccttttatatctctgtaaataaatttttaatcttggcactaaaaaatttctaatgttaatttatagaaattagggcactgtcgggaaaaatcgcagagaatttttaggtcaaattagcaaattaattactcaaaaattttcaaaaaaaaaatactaatttttcttagaaattttaattttgaaaaattctttgtcctctttctcatcatatttatgtccaatgactaaatgttattttccatcaacttctccaaggagggtttcaaggatttttctgctttaatttttcaaaaaatccatttccttcttccagcccaaatttttgtccaaatcagacgaaaaatccaaaaatccctccccgaaaaattcaatttcattcgagaggggccaattttcccgccgccatcgtcgatcatcatcatcatcatcatcatcatcagcatccatcccatcaccgctacgaggggagggggacaggtgttgtgccgtgtgcgctgccggtggtgggttcggatttgtttggctgccgatgggacgatgatggattcgcagttgcaactctattttctcccaccctttcgctcgtttcatgcaaaaccccccgggggcggggcgggggcgacctttctcattcatttgaatggacgcggaaacccgcgggcgatgctgtggactgacggacggacaaggcaaaatggacaagggcagggctaatgagagacggaaggggcggagaaatgggcggacggacgacggcgaaagccggggggggggggagaagcgggagaaggagagggaaaaggggtgaatggccaagggggggggggcaattggccaagggaatggacggagaaaatgacagatgaaaagggaaaagcaaattcggataaaagaaattggggaatattgtcgacttttacccaaaagccgaaattctaaatctttttgttaactttaaaaaacgttatggtcataaaattcaaatttcgatcctttgttttttttgaatctaacatttttaataattggccaatttttatgattttaatgggtttatttacgtattat

SEQ ID NO: 5817 - DNA, 1299 bp, Heterodera glycines
gaaatagggagaaatggaaaaaatgaaatggatttacatatgtaatgtaataatttggtcatgattcgctacatatttttggtggcatttatttgctttagaatggcattataaaaatattttattcactgcaataaatacaataaggaagtatttagtatttattatcgatattaaccaaatgcaattcaatttattcaaattaattgaaaaatatttaattttcattttatgaaataaatattttttaaaaaatttttaataaaaaatctgaatttcttttttttatagcaaaatcaaagatttattgttaaaatgagacaatcgaaaaagaagaactttaaatttgcaattgttttttgggccattttattttttttggcactaatcgaaaaatcaaacggaggaaaagccaaaaaagtggcgaagcaaaagcaacaaaatgtgaaaaaaagcgaacgatcggcggagggaaaagcggcggcggacagtgaaacagtcgcggagaacagaaaatgtccggaaaaaggcgaaatggcagaaaattttatgggtgagcaaaaaaaaaaaagaaaaataatttcaaaataattttaaaaaataataaaaataatttaaaatgaaataattgtaagtcacgtcagcagcagatgaagacagcatcgaattgattggacaattcaaaaaatttattatcggcgaataccgcggaacactttcggcacaatttgagctaaaattccaagaaaattcgctgatttggcatttcacgcaaaaaatttccgagctcctaagcgccgacaccagtcaatttagtggaaattcggtggacgaattggaggcaaaaattgaacactttcgaaataaatgggcacaattaaaaaagtatcaaaagaatgccgacagaatgtttgtcttttgcatactgtacaaatacagtacggaaatgatcagagaaacggccgatttgaaaatcaacgattgggaccaatttctaaaggggaacagactgagagaacagattttggtcagtgatttgagaagggtgtgaaatcgagggacggtccggggctgggcccaaattagctaatgcttaatgattggtaaagtgctaattcgttatttaaaaaccatcatgatggcgttatttacaatccaaaaaaattgtttataacttttctcgaaatcaacctaattttaaatccttgatatccttcgatagccctaagtgttctctattcgattgcaaattttcaaaaaatgttaactttcaaaaaaatatggccaaaaagttgaaaa

SEQ ID NO: 5818 - DNA, 1203 bp, Heterodera glycines
taaaattttcaaattttttgctacatattaagttttatggcatttttggccataaaactttgtgtgtccgcgcagtcatcaaatggcatggcacggcactgtctcggttttccattccaattttttcgcatatttacttaaatatttaaattttatttttccaacaaaaaaacaatcggcaaaagccaaaaggcaaatccaagcgatatcgaattacccccgggcccattcagttgactgacatttggccaaagtcatttataaacaaaaacattctcatcgatttgtccccacatttgcactccgcccaaagtttgccggccttttaacggcactcactcaagaaattactttccattaaaattaaatttaaatatttttgaattttaaaggcctagaaattctttcagaatcccggcctctaaacattttcggaatcgaatcccgaccaccaaaaggctcgagaattctgtaatccggacacttggaccctggcataccccacacactcattattaaaaaaccgaaaatttaaatgtgaaattcgacactagttcgaaacattattaaatttgtcgataatttggtgattttttaatttaaattaattatttttctgtttttgatgagcccaaaaaatttttcccaaagtcaatccagatttagaactctgactgactccttcctacgcaggcactttgggttgagagagtttttagaaaaccgctaacctcgcaaatacaccggcccccatggtcaattaaaagcaattagatgagaggtggtcctatttccgtttttccgtcttcaattaacaaaccgaactccctcgaaaattggaatttaaaccgggaaatcgctaaataattctgaattattattaacgtgtgcataattttatatttttttgattctatgaattatttatctaattatcgaaaatgcattttcccaaggatttccgttttatgaatacatattctctttcaaaataaattaatctaacccattaaaacaattgatataaattttctgtcccaacaaaaaccattgtttcttctgctgcccccaggcgcgttctttttccgaattgtttttgcctgaggcgactccgttcgtctggccaaaattgcctccggcaacaacacgtcatccttttgccctccggcaagtgccaccaacactaccacaaccactgatcag

SEQ ID NO: 5819 - DNA, 6304 bp, Heterodera glycines
  unsure (1)..(6304): unsure at all n locations
tttggtggcttaattcctttgcttccctttgtcgttccttcttggattattacccccgcaggacactaattaaaatttacatgaacacaaaaatacgagaaaaagggaaataaatataatcggtccgttttatattcacagaaatgaaccccttcttaaggggccgagagggaggggaataaaagaaaaggggaggagagagaaaagagagaggaatatgaagagagaggggagagagagagagggagaggggggagagagatagagagacaggttacgggcgctttggcacttgtcattgaaggccaaggacattcccctaaaaaattttgggccaaatttaagcttaagccgtgccgaggacgggtcagagtcgtcgtcaacaaaaagtggtggtgactcatccttgccgtccccgccggcgcttgaccacgagaccaccattggttgcacattgtgccaacataaacagcaacaacatcaatccgtcgccggacaaggccgtgccagcagtgaagaaacactgaagcgcggggacagccgactgaccgtgccgagagtgagtaataatgccgtgggaagagggaggacccctcaggggatggatgacacgatttggggattttccaatggcatcgttttgctcaataagtgccaataaatacgttgactaatcttttgttatgctaagacaggggtagagccgtgcgtgcacctgagcaagatttctggtaattagtgacacaattaatggaaatatggcaaatttttgaaatttttggaatttcatttgaaaattgcgcaaatttttaattcttcaaaaaagggatgctgtttaaggattagatattggggtcttttttaaaagcttcttaaaatttggtgagcttctgatcgtttctagaataactgtgggtaattagtcaaattataaaaaataattattaaattcctgttaaattttgctaaaatttctgaattttgctccacggcgggaatcgcgtcgactctctctcggacgccaatttggaaatttttttttctcatccctatcaacagcgtattgagaaaaccgcaacccgagatactaatgtattaaaactctaaaaaaaaatacgcaaaacccagaagttaaggggtatcgaaaaatttctattaaaatttgacgtctcattgttagccccttctcttcaaattttcaaaaaattttcaaaaattttacagggctcagcgtcctcttctcagccttccccatccccaacaacagcacgttacacggaaacaattattcacagacaaactgcgacagcagctgtacagcaacagtttgtcgaggtgaacaggcagctgaacaccgttgtggcgacgacaaaaggcggcggcacgtgttgccaatgcgaggtgaattgtgtgataagtgtcggataattatcatggcacaatattggaccaaaagttttggcattttaatcaatgttacagcattgatcagagatgttaatgctttttccaattctactaatgaatatagcaaaaaaaaaaaatatcttttgggtcaatttagagatgaatcattatggctttggcatttcaatgcttttcctttttcattatggacttaggcatttataactctttttcgaattttctcggcacaaaaaaatcccacttttaattgccgttttaattgctttctaaaatttgccaaggaatgtgtgctggcgtgccgtcgtgagcagcaacaactgcagcacgagcaacagcaacaacttgccggcccgtccggaagcggcgccgggcgatcgtccggcaccggcgttgccagcggtgcgctgagcattgcactggcaaacgcgcaacttggcaccgccagcagcggtccgaccacgtcgagcagtgcgggcagcggtggcacaacgcagcagcaacaccaccatcatcagcagcaacaagcgcaacacatgatgatgtactgcaacagcactggtgccggaccatcgccgctgatcagcaccaatgcgcagaccattgaggaacagatcaagcagattgaccgcatttccaaggtgggctgggctgcttgctgctgatcgaagtgatcacacatatctttaatgctctgctggaatcttactggatttctgtaatccagtttcttggatatataaaattggacagccattaaagtgatcaattattgtaagaattaaatgaaaggggacatttgtccaaacaaaaatcaacggtcattttgctgttttttgatcagaattggctcaataagtcctgttttttttctcaatactgatgtgatcagtcttgaaaatttcggtaaagtacgatccagaaaaccattccatttaaagttcaagattaaaaaacaattttattatcaaattccattaaaatttccaaaaaatttcctcggcggcgcctattagcattgtcagacccgcattttatcatagtttattggtaattcaactcgaaaatggcaaaaatttagccattttttttttggcggaaaacggctaaaaatcccaaatttttcttcactactttttataaaaatttattgacagagttagcttttttttcttttaaaataaaagaggaaaaaattaagcagtcatttcgtgccaaatttgttaaattgcatcttcgcgtgaaacgagaaaattaaatttgtcaaaatgcaatttttcccccttttatttattgcacaaaaacaaattaagtcaattggcggtggcacccattgaaaaaaacaaaacaggaaaaatgcaatttgccctgagggcaaacgctaaatgccactaaaatgaaaaacatttatgaatgaaatttattgcctatttgagtgtattaaagaactaaaatagaaaatagaacaatattaaaaatccaaaatgaaataaaatttgttaatgaaatttcccaaaatatttgattaatttttaattaatggaaaaaccccaatttcttttgacaaaatgctaattttaaagtccactaattgcatttcaataaaaaaatatacattttttaaaactctaacgatttttattaattattaaaaaaataaatttattttggttttaatccatttaaggaatgtgataattcgcgcaaaactttggagcacatcaaccgtcggcttgacgatctgaacgacgaagtgcgacggtaccgcgaatttcttggccacgaaaaagtgaggccaaaaaatatattgacagaattgcagacactttgaaaacaaatggggagagagcctaattaactgattttgactaattaattagctattaattgagatttgtgaattaactaaaataattataattattaaaattattaattttaattaattaactaaaatattataatgatttaaatccgagttaattaatattcactttaattaattatttattaaataagttttattaattaactaaaataattgtaattatttaaatcctattcaattaattatttattttaattaatgatttgttaattaagatttattaataaccaaataatcatttaattattgatttgaaattattttaatgaatttttagtcataaaaactaaaattaattagccctaattaaaattggcttttaattttttgaaggcacgtcgtgatccgacactgtacaaaacaagcaccgcagaaccattaagctcgtacaatgacggcatttgtcggctaatcgactcattgacaacacaactcacaatggtgaggaaaaatgcggaggtccggctcgatttagttgaaattaaaaattctcgaactttccaaccgaataattcccgaaatttggtggcctgtgggcatttgattgaaatttcattttccaattatatttaaagcatgtgcacttagcattattttacatgaatcacaaatgtccctattttttcagattttacgctaaaaaatttcataaaataccaattttaccgcgacgatgcctaaataatagcatggaaattcatacaattgacatcttgtactacttttttaaattttcaatagaaaaattagcaaaattattttttagctttttctagaaaaaaaaaatcattctaattttgtggaaaaaaaattctgatttattaaaaaaaaattttacgaactgccattgattaatacgttaatttcccataaaaatttttaataattcgttttcaggaatggactgaaaaattgcgttccatacagaaccagacgattgccaaatcagtagctgaaaagggctgatcagagatgtaaaaacaaaaaaaattgacgaaaagaacaatcaactaattaattaattaattaagtaataattatgtgtattttatgggttgggaggccgcctcacaaataaaattaattggtcattcattcgctaaatggaatttattcttagatttaatattaattatgtagtaaacaatgcaaaataaaaatatttttagatggaatttatttttacattttaatataaaatacaaataaattttaatttcaaatggaaagaatacaaataattaatccatccctaattattttatgggccaaaagtataattttcaaagaattttggtcatttttcctgctgctgctcctccgcccttcttcagtgcccgcatttttgccatttcctcgtcctgctcgtcgtcgtcgttggcacttctgctgctgcttctttggcttatgtcgttgaaatactgtgctgggccctttaggcaatcctccaatgccttaaaaattaagaaaattttaaattttaataaaaaaataattaaattagattaaatttaattaaaaagaactaagaaacctacggcaaattgtgtttttgccgcggcacagcccatcctccgcaagtccctcagctgttttttgatggatgtgccaatggcaaacgatgctttggcacattttcgggaacactctgtgtctttggttgggccttccacgttcatcagaaaatcgcaacaaaaattgcctggaaaaatgaaaaaataaatttatttgaaaattcaaaaaaaacatttaattcaaattttgtggacacatttttttgttgaccttttatttgccaatcacagaaatttgtatgatttttgagaaatttattaaacacttggctgaacttgctaaaagatttgaatagtgaaatgaaaaaaagaaatatttacaaaaaacagcaaaatttggttcgtttttttaattgaagttcattaatttaaaaaagttctattttttattttaaattaaattttaattacggcaaatgtccgtcggcgagtgcactccgccgatttgacgatggaattcagtttgtgcacagctgatcgttttgaaaatgctttttagaaaattaattattgtaaataaatttaaaaaatatttttagaaattaaaaatatgaatttttgattttgttttatttcaaattcaaattttcattataacaaaaacttaatttcaaaaggaaattttaaattgcgcacaatttattgttttttctttatttggtaaacagcgttttttgatgaaatttaaatgagaaatattctcaagaattgtttttccaccactaattgtttgaacagaaaacagaggcataaaaaggagagaaaaatttaaattaaattttcgaaattttctattttttaatattatcattccatttatacttctgttatcacttaggtatatgatatatgataagaaaacgctatgctcttttggtttatgaaaatttttaagccattaaaatttttttgctaggtgtcaaaccattggcggaaagaaaatgtgaaaatacgaaaatttgggatttttaataattttatagaataagccaaaagagaacacatacataataaatatgaaaataaatataaatatatagaatttgcataggagggaggggctaaaacgaaaaaaaaaactgaaaaaccggaaaaatgctgaaaaccaggcctataataaaaacaacgtggaggagaaaaatgacaacaacctcagccagggataattactataaccatttgatcatcgacgaaagaatatttcgaataatttggtcaacgaataattaattaattaatgggggaaaagaaaaacaatcatcggcggaaataaagcagcgagatcagctgaaattgtatttccatttttgattgaattatttgaaatacgcttttatatgtatgtgtgaaaacctattattattcagccanaatatgagtannaaaacatanatatngaaaattatatatataaacg

SEQ ID NO: 5820 - DNA, 1236 bp, Heterodera glycines
tgaatatcactgcagattgcttcagcagcagtctctttttgcgttaagcttagcttcgtatgcaaaattgtatccctccctttccccccccccttttttttccttttcctccctcctccctcccctccccaccacctatctccctcgccccctatctcctcccttttcccctgctttattcgttcgtccaattcgtttccaaattccaattcattaactagtaaatatgttatatatttccgtatcaaatgcctcctaattcatacattttgcaattaatttgcttttcatcgcttctcttcctttccttcatttgcttcactttgctctttttacaactttccccccaacggattttcctttgtctctctcctgcggctcttttctttgtattctttcctttttctttggcttcattcagtctttctttccctcccaatgcttttctgactcatccgatcaatcccttccttttctgctaagtttaggcgcttcatggtggtggcttactgctgttgcttaagtcagcagatccttccccccccccctttaccccttttccctccgtccctttttaaatctttcgccttttgctcttttaccttctgccattacccccgccaattcagactcatcaaattctttttcaaatcaaaactgtccattttttctctcctttagacagcaaattctccccatttgatctgtccaaaccgagcagcatcagcaaaacgaccgatcattttgagactggggaaattacgatgacagacgaagcggtggcggaggaagaggaggacgaacggaggaacatcgcgcggaaagaaaacggcggcaagcttccgctccctgtcgtcacatttattgaacaacagaatggcatggaggcggaggaagagtcgggcgccgaaaggaggacgcctctggcggacggcgccacgtccgccgggagcggcagaccccaaaggaagaacggcttcctcttttccgccggggatgggccatgcataatcgcatgtacatgggaaaattatttttgaatttggtgatgaatcattgaattacattaagcaaatcactgtgaatcgctttcagttttatccaccattcgctttaaccattcattttggtcattcattcattcgtaactttatatatttttattttttcattttgtgtagccaaataaaataaaaatatttgtttttttaataaaaaaaaaacaattaacaatta

SEQ ID NO: 5821 - DNA, 3572 bp, Heterodera glycines
aacgatgatttcatccgcaaaatgtccacggtgtccatggaggaggccaagggggaagaagccgtcggcagcgaagaagtggcactcgaaagcgcggccattccgtaatttgcattcaattgaagaaaatgcaaagaaaaagcacaggcacatcaaccttggcaagggctaccaggcgaaggtgaagaagtggtccgagagagcgatctccgcgcaggagagagaagcgatcgcagacagagaccagccgttgttcgagagtcgggcagtcgaacacattcccgaaacggcgcgtaagtggcggaggatgcccgattactcacccatcattccgcgtttcgtttcacagttgccgcctacgaaacattggcatgttcagtggcagtgccgaaaccgggcagaaacaaagaattggcactgaacgttctggcggagaaccaagggaaccttcaggcggcggtgatggatttgctgcgctgtgacacactcgactgggagcagtacccgaacatcttcaagaactcgtacgtggacgtggacgactggagccccgaggaaatcaacacgttccaagtgggaaaaagaggggagggagcaaaagacgaactgaggaagaaactgccattcaggatgccatctacaaaagtgagaaggacttccagcaagtggcgactgaggtgtggtgggaggcgaagtgaagtgaatgttctaagaattgtgactaaaagacgggggcaatcgtaaaatgaaaggcattgccaaagagtgggctttttatagcaccaaaagaggaggggggggattcgctgagtgaatccggcgacgtttcccttctcccctccacagcttggcaatcgcagtgtgcgcgaatgcgtttctttttactacacgtggaaaaaggcatgccccgacgactaccgaaagctgagaaatttgcgcaagaagcggcaactgctggaacaacaggtgaaagggggaggggcaagccaaatgagtgacttcctacgttttcagctcgattacgcctcaatcgcatgccgacagctttcccattcggaaagccaacagaatggaggcacttcggaggaggaggagggcgaggaattctccgagacggagtccgacatcaccaacccgtccctgctgggcctgtccatggaatgttctcccgccggcctgggtcgtaagcactcgttgcctcggggcgctcttcccccgggtgacttcgccgcccatccgtcgtccgcttcttccctcctgcccaacacttcctcggcacttttcaattccgcttatccttggctgcatggggaaatctttccttcgccgtcctcctcgtcaacttcgacgacaaacaacgaccatttgcagggggcacagaacggaacaacaaacgccggaggagaaatggggacgacggacagaacagaagggacgcagcagcaccacaacgaatacggagggggacaccaccacaaccaccatcacaaagtcattagcgattattagcaacaaatggtgggccatttcagattcgaagcgtagcgaacgcaaaaaaaggtgcacagccttcggccgatggtttcttccattgtcgcctttgtgagaagaggtcgcttttcttcgtccgttttcccccacaattccccccccaaagttcagatttgaaaaggtcaaatctctgaacgcgcatatgaaatcgcacgcgatgaaagcgcgggcggaggccgaagtgcaaatgcagcacaagcagcagcagcagtcgacgtcactgccctttccggtgcctaccaaaaaggaagcggcggacagcgcttgttggggtcgttgggccgcccccctcggccccgtcgcttcgctcaatctgacaagctcacaagcagctgttgcggctgctctgaacaacctcaacaggcagttccagcacagcagggccaagcggtgcaagaagcaatgggtggcataatggggagcaatttgctgctgaggaacatgctgcagtacggaccggcagccgcagcggccgctgcccaaggcgggggcgccgcaacgcctgggggcacggcatcgcagtggaccaccacgcagcacttcaacgcgtagcgaagcggctccgctgcacatgctggaacgggatgacccaccgactgacaaaacgcacttataatttaccacccttagggggattcccccctttggttttttactttccttttcccttctttttgctccaccggtgatttgccctccctttttagcacaatgttcgctattcacctctctcccccattttcctctctttcttgccctttcattcttttgttttctatttcttcctttttcccatttactgcttctgtccaacttcctctccctttcttttgtttctcatttatccatttacaatcactcagcagagccactcactatgtcaattaccatcccggttaattaatatacaaaataacgctaataatcaaagttcgttgaataaattgtatttatacgtgtccaatcagtgggttaaaattaaatttaaaatgcctttccgtgtgcactccataaataatacagtaaactcacgaataatcagtggaaagggcgtgtccttttgtttatgggctgaaggtgaccaatttcaattctatcggagtccagaagttatttaaaaaaattggatttttctcgacggcgtctattggcgccgccggcaacctcttttctctccgggaaagtattaatgtattttagttgagaatgaattcaaaactcttgaatttaaaacaaaagctattttttaaaattggagtgactttgtgcttattgttagccataatcattaaacttttacttataaaccaatacaaaaagcatgtgtcaaaagttcccactgattatcatccattgataattgatgcataggcatacaaatggacgaaagaaaagagacgaaatgggggggggggggggggaacgaacgccgcacaaacattcgtccgccggaaattaaatcactttcacgcacattctcacaactttgttttgtccaccctgcgctgtcctccgttggctaactcagcaacatccgcccgtttttttgtcccgcaccggctgagacggaccaatgcgcacggcggacgcattgccaccggcctgttgaagagggcccatgcgatttttgatttcagtggccattgtgatgaacgcctaaattggctttttttaaagaaccaacgattttttaatgatagtgctccaatacaaagctgaaaaccccgggatttgctccatttttcccccggcgacgctatcggcactgccgacccataatgatctccttaaacagcgaaatttggcccaaattttaaatagatttgaaaacagaaacaattactaataataaataagtaatttcccaaaaagaaagagaattggcacaaatacaatttattttttcatagacaaattctcacaatcattgttttcattgcaatttgtttacagctgtgcaactctttgaaaaggctttttaaccttaaaaacgggctgatttttgttggggggggggttta

SEQ ID NO: 5822 - DNA, 2670 bp, Heterodera glycines
  unsure (1)..(2670): unsure at all n locations
aaaggttttncgagtatccaagaggaccattaattctaaatatttcaaaagccgaataagagagaaagtaagttcaattcaaaagattaaaacaaaaccctccgaaattttaaaccttggcaacattcgtctctatcgcacgtttggtggtcaaatcgcatttattcccgacaagaagtttattcacactctccgatgcgtatcggtcgatttcctggagccattgcttgacgttgttgaaggagtcctgagaatgaagaacaactaaaacaagtataaacactgtggacctggtctgtaatgtcgtaaacaacaatgattccgtgtgctccgcgataataactggacgtaatcgtgcggaagcgttcctattttgtaaaaacaaatggtcgtaaatataacggattggacaatagaaagttttttttctttttttttgctacgcgctatatggaaccaaaggcccacctgtccggcggtgtcccactaaaataaataatgaatggttaatgtatatgggtcactcacaatctgaagtttaatcgtcttcccctcaagctcaatggtgcgaattttctaaatgaatttattagcacgatttaattattatttcggatacgaaatcaacgccgatggtcgaaatgtacgactctgtgtaggtgtcatccgcaaacctaagcaacagacacgacttgccaacaccagaatcgccgatcaacagcaatttgaagagatagtcactggagaaagtgacaaataaagcaaaatgtatgatttctgagttactcactattcaggattcatggcagccattcttcaaatcaatctttaacggcaattaataagagttttgccaagttttataaaatctgaaatgtctgtattgcgcattaataaaaaaaatattaagaaaatgcaaataaaaaagctttttgcttcgtgtcttctttcacaactcatcaattcttttgcttctctttcgtcgcattcgcattatgctgcacatcacacacagcacaatgttctgttcacatttgttcatttgtccgtgtctctgtctctctgtcattgcctttctttcccttcctttgcttatgtctttgtctctatccccttttaactttctctaactttctcatcgaacagtaattttcgctttaataactaaattttattttacctaattgaaaattttgctacccctatttgtctttctgaccgcctaaaaattgggaaacaattttttagtccagttattttctttaatgttattcatagattcagtttctttttattacaaataaatgggacgtcgtatccgagctcaacgcaaaggacggggtgggattttcaaatcgcacagcaaacatcgcaagggcccggctaaattgcgcccagtggattactccgagcgtcatggcttcatccgaggcattgtaaaagacataatccacgatcctggccgaggggcgccattggccattgtacaattccgcgatccatacaaatatcgggtgaagaaagagacgatgattgcggcggagggattgcacactggacagtttatttactgcggcaagaaaggttcgtttccacttttcgattgataattatttccaatactttggtttggctatattcaagtttacgcgtccaatcagttaccatccttagtttcttaggtgataacgttttcttactcatatattcttggtatcaatcgaagcttaaagtctacagaagtttttatatagtaaaaatctgagaaaatacaacagacaaatagttattgaatatacgcaaaaaatgatgaatttcgggtttctcattacatttttcttaatgcaagtattgcgcttatcatacatagcctaagaaactgaggatagtcactgattagacgcgtaagctggaattgagactttgttttatactagggtctgtccagttttaaatgtccatagtattttatgcgtccagccatgcttttgatattaactcaacaatttatatttttagcacaagtccaaattggaaatgttatgcctattggagaacttccggaaggtacgaccgtctgcaatttggaggagaaggccggtgaccgtggacgtttggcaaggacttcaggttgttattgtgcaccttcccttttgtcccttatgtacatccgaatgttaatttattcattatctttatcataaaggtaattatgccattatcgtcgcacataaccccgacacgaagcgcacgcgaattcgtcttccatctggtgccaagaaggtcgttccatccgccaaccgtgcaatgattggtagttttactacagaatattatgtacctgagcttgggtttttggctctagttgtctagggattttggtcaacgtccacgaatctattttgaaaccaattccgaattcccaatacttcttaaatattgttagagattcgaattcgtcgaatgtgtgtcctcttggtttttattttcaaaaacattgacttttcaaatggttcgtttaaggcattgttgctggcggtggtcgcacggacaaaccgcttttgaaggcaggccgagcctaccacaaatataaggtcaaacgcaactgttggcccaaagttcgtggccatggaagaacccggtcgaacatcctcacggaggaggaaacca

SEQ ID NO: 5823 - DNA, 1024 bp, Heterodera glycines
  unsure (1)..(1024): unsure at all n locations
atcgatcgctccacgccctcacaatgggtttaatgtttggcccgccttttccaaagattgggccaagtgcttaggcgaaccattcgtcatcatagaacgaaggaaaggaaagggatcgattgagagaagggagagaaaaacggcactaatccaccggaattaatccctaagaaataatgcattcatttactgttgcaaaattaatatacattcagtagtaaaaacacaaagacaataatccgagacgaacatagccgggacaagagcttatttaccattaattgatgtttgattaaaaattcttttggttccctaatcgtttattagtataattttatatactttttaataaaatatggaaatgtacagcatacatcaaataaatgtaatgtctgatgtgaaggacccgcaaaagacgaattcgccctcgcgaaaagacacgtacctgaaagaaaaaggaatttcaaatgttaattaaaatagtcatacattcgctggggcattgctctcgacccgctcccgggatggggcagaaaactgcgcagaatcatttgctttctaaaggggaaagtcagttaaagccatctgagaatcagaaacaccgcgtcggcttcggccattccttctcttcctccgcacgtttagcgtcttcatccgtcataaagaaattgcgcaacacaccaaaaatgggaccgtacggagcatcggggatttcgcaagaaaattggacatttggaggagacaattcgtccaacaaaacattcgatggatggcacagattagcgacaaactttttcagcacattaagttcgatgtgtttgagcaaatccgcagaatgggccttaaaattgtgcttaaatgcgaattggtgcacatttttaaagtccattatagaattaataacaaaacattttaagctcgccctagaactgttgggagacttgaactttacactgtttttaaactgcttatgcgcaaattcggaggcgaaatgtgcggtggggcgggcgggggggnggggggg

SEQ ID NO: 5824 - DNA, 3019 bp, Heterodera glycines
cgggttaagggttcggaattggccaaaaaggaggccgcattcatactcatgcggccaaaaacacccctagaaccgtttttttggaatttacagaaaagtttcaaaaagaaacttcgggaccagtaaaacatatgattgccgtaattgtgccacaataagttcgtaattggtttccaatgcttggtttttccccaggacaatgaattcctccacttcggacatcgacccccacttccgagttttggttcttgctttaacagcattttttcgcttcataccgaaactgggaacattttgacacatatgtacggtgagtatgaatgacatcgtttctccggcacttttattttttcaggtgcaatagcattcattggcattttcatttggtttttggtccaagccgaagatgtcgtcagttggcccgacaaattgatattctcttctttctttgttggagccattctctgcatgggaatgtcttttgcctttcacacggtccaatgtcattccgaagatatcggcagattgtttagcaagtaatccaaatccattttggacatggcatcatgagtcattgtcaagttcgtcccctgtgggcatttgcccatgtttaggttggactatgccggcatttccttgcttatcattggctcatttgtcccttggctctattacgcgttcttctgccgagttctcccgatgaccatttacatttcgatgatcttccttcttggaattgctgcgcttgtcgtttcattgttcgacaaattttcccaacccaaataccgtattttcttcgatttttctttgttccgatttctcatttgttttgcttcattaaggccctctccgtgcgattgtttttatggcgatgggattaagcagtgagttttttacattgttttattttcacttttcttttttatgcgttgttcccgctcttcatcttttggtcactgatggcattgtgtggatgtttgaaaaggcttctttacactggttgattttgatgggaatactgtaccttagcggagcgactgtaagtgatttcgctcatttccgaatccatttcttttagatttatatggtgcgcttccccgaaagatgcttccctgggaagtgcgacattttggtgtgttcattaattttaatgggcaaagtgcacaatttttgttatcgggtaattcttacactgaccatttttgatgtcttttacggcggaccttttttactgtattttctcctgatgccccccccccccgaaaattggcttctttccgttcggagttatcattttgttctgttccgtcatccgccaccattctttttccagtgtcaatcccaccaactgttccatcttttcgtcattttcgctgccgccgtccattaccacggagtgttagaactcgcgatgaagcggttgcaggacggttcctgctcggaacaactgatttcccacagcggaagtgacgaggcaaccattcagtggtggacgaccgattacgaccatattaattgaccaaggaagacgcatttgcattctgttcatgtatacggcgattaaattttgggttccaagtacaattagttgggtttttcgtcttagtggtctgtttgttagtcaccaaaaggggagtctcaggttcgagtcccatgcaggctataactgtattttgaggtttttgaagcaaataaatatatgtgaaatggtaacacagtttttaaagaagctcaaaaattttttaaaattttatttcctgtaaaaacaaagaagaacctcatatccaattgtgtttattcaaaatcgaattgttcttctccatcgctttcttcgtccgtctcatgtcggtcaccaatttcttgtttttgttcttcacggtcaaccatggaatttgttttggaaccaaattttcaccaaactgacccgcttcatttcatcaatttttcctgtgtcgagaagccaatttgacaaaaatgatgttccaagaattgacgcatttgttcttcgtctaggcccatattttgaccccctctatcgacggaacgggccaactccgtctgagccaactttgagtcaatataactcttgaagttattgaccgaatcaaacaatcttgatatcattcgaaagctcttcacaggctctattagcctactaaaaattacagaaaatttcgaactataaaaaaagatagaaataaaaaacttcaaaaattctgccttttttgcggttttcaactgacaacttttttgagagctgattaatcactgagaaatagcttataaatatcttctaaacatctagggctttcgaatgataccatgattgtgaagtttgaacaacaacgaaaaaagttatagctttttgaacattgctgagacggagttggccagacggagttgacccctaccgctctatcgaatccctgtttattttttcggtgcagtgacaaaggacccacagacgaaggacccatagacaaaagacccacagacaagggacccacaaagacagaggacccacggacaaggacccacagacaagggacccacaaagacagagtacccacggacaaaggacccacaaaataataattaattaaaatatattaaaaatggaaaaataaaatgataatcatcaagaaaaggagatattttgaaaaattaataaagtgtattcatttttcaatgtttaatcatcttcaatcggttcctcgttttgctgccgcactggatcaacaccacgaaatttaacgaatttagaagtggcttgcaaaaaattttccgtgtccatttgatggtaacgtccaatgagggtcaaaagtcgttcgtttgcctgacggtactccactcgactgtacagtggtggttcttggccgcaatccagcttgaccgaaattgcattaactcgcacaatttcctcacgaatgccatgaagaaacgcaaaaatgttgggatggggtgaaagaaatttagcctgtatctgatggtgccatgattcaacagaatttgtcgttct

SEQ ID NO: 5825 - DNA, 3094 bp, Heterodera glycines
caataatttttgaaatatgtaaaatcattacatattcaaacgttgcattttaaattgtagataggtcacacatatatgccgggtacatgaacctcatcatgcctatgatgagtttgtcacgtcctatctgagccccagccatcagagaaatgcctaattatagaagcacacataagcaaaaaaatttgaaaatctgatttcaaaaattattctggccataactttttagaacccaaacgaaattcttcgcaattttgcaggttaatagaggacacctaggactttagaatgataccaagaatgttagatttggtttataacgaaaaaagttgtagtccaataactgggctggcgccgaaacgacccgcgccgaaacgacctagtcccctttttcaaaatttcgatctttaatcggaagggatttatgtcttcaccagcaataaaatccaattctgagaatgattgaattctaatgacaaaaagtactaatgataaataccacattcgcgtcggtatttatgcgttttgccacttcctcctaaaatacgcagccaaactatacgagagattaaaaaacaaataaaaatatatttcagagggggggagggaggaggaggtggcaaaacactaaagtaccaaaatatcgctcaaaagccacaatacgtgagaagggagaaaccatctttaatttcaaaaagaacaaaaaaaggtgaagaggcactgaaagcagaaagaaattggtaatccccggttagtccttaaaaggatagaattttgaattgaatacgaagtgataaaagaaagagggaagaggaggaaacgaagaagtcgaaagccaatgccttccgcgtaaggcgaatttgtgagggagggacagagtgaagaaaaaagagatgtagcacaagcagaaaagctgggcacattcactccatttcttccaagggtccgttgtcggtcgtcgattggtgggggtggaaactgtgaaagatggcggggccatgtctgaaaaacacaacataaatagtggctctatttgcaattcagtgacccaggaaaccccaagaaaaaacatttataactaatgcgaaaataaattttctgcagctgttttagtaaaatgcaccaataagggaatttgtactttaaagaatgcaatgtctaatttggcttcttccttcgctttcgctcacattttgcgctgttgtctcggacggaccaacgtgggttggctgacttgttcgaggacggaaggcgctatctgagaataccttccgttttttgttaggggtgtctgtccctgctcacataagtgaatccttcgaagggattgacggacattggtggcaattcggcggtcggagaatcgacgggagtcattttggtgaatttggagtcgaacagagaggcgtcctcctcactggtgatgttcggcttgtacggggcttcgatctaaacattaaatctgtcgaataaccgtaactaaaaattggcatgacttaactctcgccgataaacatttgtccaattctcgacgtggtgggtgaaaaaggcgtgtttctttatctcttcggcgtcccccggcccggccccaaggcgagtgtccacgtgtcgcttcagcaaccgttttatctgaaacaatgaattggttggcagcagaacaaacttttgaacgtaaaataccaagtctttcgcttcgaaacttaaatagggcggaagtgtaaggcgtcccttgaggattttgtcaattgtctaaaggcaaaacaattttattcgcacgaagatatatttatcggatgccgacgatgactcacccttttgcgattctctgccgaaaaaggcggtcccccggtgagcatgtcaaaagtcaacgcccccaaactccaccaatcgaccgctttgccatgcccagttctgaacacaagaggagtttatttctgaagcaccaatggtaattgcctcatcagaatttcgggtgccatgtactcaatggtaccacaaaaagtgtgcgtcttttggtccccttcgatggcctctgaatgattattacaattggacagcggaaataccacttggacgacaacctttacacaggccgaagtccgtcagttttacatggccttaaatgggcaattaattgtccaatggcaaaccaaaaatacctttacagtccaacaaaatattctccggtttgaggtcacggtaaataatgcccttaatgaaaaaaggattggaatgtatggaaccacaggtattattgccaaaaaaattttattagtatgcattttgtcgtgttcattcagaaaaatattttaaatgcattctgagaaaatgcgctgtaattctcctatttaaaattacatgtgttttttgttgaaattttaattaaataattcaatgggacgcactcgtaaaatcaaaaaaaaaaaggaataaattttaaaacagtcaccacaagttaaacatgacaacctgtcgatggaggtgttcaagtgcaattacaatctctgctagactgaaagataaaattgcgtttttctttgttgttgtttttccttcgattaaaactcactaaaatgccgcagtgtcctccataaaagtgccctccctttccaaatgcataaacaattcgccgccgctcaaatactcgaggatcagataaagcttgccgccagtttgaaaggcgtattggaggtcacaaatgaagggactctgaaaaaaaacaaaaatgcaaacgtaatccgttttgagataaaatagtgttaggcgttttcaggggttgacgagtccaattcttacattcattttgggctttgggttccgaatgggtcgaaacgaatgtcagaatcaattaccgaaccctttcaatttttcaggagcacgagccccccccccccccccacttcaccccttgaaaccatttgtcgatttgttcgttactttgacagcttcgagtatatttctctcggccttggtgtgcgccgtgtctttctgattgcgaatgaccgtcgcctttttgagcactttcatggcgaagattttgccactgtccttcccagtcacttttcgaacttggaaaacctgaaaaatcaatcat

SEQ ID NO: 5826 - DNA, 3082 bp, Heterodera glycines
  unsure (1)..(3082): unsure at all n locations
aatgaccgtcgccttttgagcacttcatggcgaagatttgccactgtcttcccagtcactntcgaactggaaacntgaaaatcaatcatgaaagtacaaatttgcgggatattcatacctttccatagctcccttacgnagcacttgagcaattgaaatcctccggccccacttttggttcggcgattcaccaactcgggatatcgcctaattcaatggtttcaacgacttccggcccatttctcaaataaaggacaatgatttttgaaagtccaacttttgctcttacatatacgaagaagagggtgacagagtgggaatttcatcctgaaaatgacaaagaaatggagaaggcaaaacttaggcaatacatattccacattctcatattcgttgtcttcgtcttccatgtcggacaatgcgtccgctgaaggccgaatttggttcctggcacggtcagtcagttcaatctcgaagatgccggccatcatcacaatgcaaaacacagtcagttgaaaaatgagggtttacggatggattaaattaacgaataaaagagcactaaatttcaaatggggtacttttccgttttgggaccaattctacgcgcttgtctgttgatttaaaaaatatatattcaacctttggccccaaaacggaaaagtatgtacctcaagtggtacatttgggtttgcggactcaaaaaattaacaggaaacgtgatcactgatcacactccaacgtatgagaccatccacagatttctcatgaggtatttttgccaaaaataatttgaatgcaaatttgaaatattcgttgggcgagggatgtgggaagacaccggcggaggacaaagcgccgtttaaccaattattaaaaactgtcataaataggaattcaaacaatcccgttttccagtattttaaaacgcagtttattatacncagtaaaattaggcgagataaacacgaatatggtgaatggatcagaggctgagttccggaccgagggattctgtaaatccaacagaaattgaaacagagtaaaaaaggcgcatttgtttattatcgaaatgaagttataataattaagctaattgtatttagaatacgaaaaaagcgtagcatcacgagggcatcaataaaattgacatgacatgcatatttttgtgaactgcaaatggattgaaataaaagaaattttttagcatgctttgaggcttctaggactgattcctttaaacatattttagaacggcccccctttaagaaaacggtaactttcgaccccctaaagtccaaaaaatttcaaaaacaaattttgtgaattttttcgaaataatttaaaaaatcagccttccaaaaattggaaatttatggaaaaaagccaaaaatgaaagcttttctcaaaattattatttttctaaactatacttaatactagagttgtacgggaccgggaattttgggcaaaaccgggaacgggactttttgggttgaaaaggttttgattacagaaatttttttgcaaagtttattggtgccccccaatcatcacaatgtgttatataaatatgtgcgtataaaaatatttctatcgatttgtgacacgattcttctcataactttcgaaaacagctttaaaccaagttgaaaatgccattgccccagggtcaggctcaatctgcaggcttttgtcggtgtaactggcacggcctgcctttgcttccatttttgccgtttctttggctcgttcttccaccgtcttatccaattaacctcatttattatatacgccacgaaatacctttacaatgtcttcccaattctctcctcgaaaacttacagctgcatgcaatgggtccacctttaaacaaacaaataggacaataatagcttttgaagcgactcaccaaagtgcgatggcccggctttgcaccggcataatattcgacgcttttcaatgcaagtttaagcgctttttttataacattggaacaaagaggactttcaaaggcattcgccgcagcattaagcattaaagcgtatagctaaaaggcaactgttagaagcaaaaacaagtgataattgctaactgctccggaagtgccaccgactgacgattcgaccaacttggacaactgcagaaaaagacccttcggatggtcaagcgctaattcaccattttccactgctattaaaattgctaaatttgatgaatactggataaaacaaaaacaaaatggacctgatgctcctatcttcatggatgtgccacagtctccgtcgccaactgaggagtcaagcctgttcaaatcgtgctcagcgttgattaaggcttgacaagcgttctcaatacagcttcttagcaatgactcttgaactaaaaatgtaaattatttaaccctgacttaaaatgaatactttttgggagttgtgggccaagactcaattggcaaggcctttcatcctcaatggaacgaactgaatcctgtccaacaatgggctccttgttaagacgagaggcaacccaaaacgatgacacagcagaatcatattcttaaattttaaatattaaattagtcgaatgatagaatggcaccagtcaaaacgtgtagccatttttggtcaacgatgcgcagaatcgacacactgaacccgtgcgcatcaattgatgtcataagcgtgcccgagatgaagcattggacatcgtaaccattcgtcactaaactactaattattgaaagttgtgcgtgtctttagggacataaataatcacaaaaattcttacatagccagctgatcacttccaatttcacaatgcccatttccaactgactaactgagcctaaaaatggttttatggagttgttaaatcgtggctaaatacccaaattattaagcagaatcgcaattggctcgcctgttaaattaaatatggagcattagtattttcaacgttttctccacttttcttaagactgagtcttttgcagtgaacaagccgttccaacagatcattgcaaatttccttggcagatagaagtttttccgctcaaccccggcttcaccgtgaactgttt

SEQ ID NO: 5827 - DNA, 4199 bp, Heterodera glycines
ttctctccattaacttttttaccatcattaccaattcgttaaattttgcatataaatagagaaaattaaacttctgaatacttttccattttgtggctacacctcaaaaatttaaaaaaaggcaaacaaaaggatgtgcaaaaaaaatttttttttcatttatataaattaatttgcaaaaaaaaatattttctcatatatgaagaatcaacaaaatgtacaattcagatccacagaagcctacagtaccttggccttttttcgaaatgcttacagcaatcatactgtagattgattaagttgaaagtgagcgccgactcttcttggaaatttaactgaatctgaggttattagtaacttctccatgctctaaatagtaggaaaaacgatgattttttaagaaaatttttattaaatatccccaaaaaaatcccaaaatttcgcaattttttcgtacatattttcattttttttttgttacaaaaatttttttgaaaaattaaaaatttttttgaaaatgtatgcctaaaaataggttttttcaaataaaaaaataccaaaaattatttttaaaatattaaaatatgattctaagcctatttttgtacctatttcagcatttacgaagaattttttttacaaaaaataaccattaaaaaattttatttacatatttggtatatattttgaccacttgtacatatttttgatttccttagtattacataatcccttatgtttgattatttattcaaaatttcaaactgaaaattcacccgcttcggggttggaacttaagtttttgcgtgacggccctaccggattaatcctattaaatttcattcaatcacgcaaatcccgcaattctaaaaatgagggatattcaaaagggattttatgtggtttgtttttgtttaatcccatttttttaatctaagacattttcttacacagcaccttcttgccactttgacagttatttttaatgaaaatttccgattttttgcaatttgacgataaaaaaagatgaataattaatagggcttccttttttaggcaaatgcctaaaactttgcgcactaaatacgcaaagataagcacgaaaaacgcgtttcacacccctaagaaatgacccaaaaaaatttcagaaaatacacccttaagaattgaaaaattttcaaaaaaatgatcccaaaatttaatatattttttcttaataaaaatttttggtttaaaattttgtccttatttaataatttcatttgcaattgaaatatttaagttttacttgttttaataccaaaaaagcgttaataaaattttttttgcctatttttgtgcctattttaaggtttttgtgccaatttaatgcctattttgcgattttttgtgcctaaaaaaggaagccctaataattaatgattgctgtttatttgttagtttataaaaatgaagtttttttgaataaaaaaaattcttcgtatttcagagttcccaagtgtccttttttctaagatttgtcctttatttgtcacgacctccttattttgtgcttattcttggatttgaaaataaaattacaaaaacgaataactgttttgaattatttatgtatcattttttatggaagcaaatatttgaattaattcgattttgaaaaaattgcgtttttatttcgttttcttgagtgtaaaatgctctaaatttcagtgaaaattttgttaaaaattgtcaacatttctatttttcctccggcggcgtctatcggcaccgccgggccttccaaaacttattttttcataaaaattgaccaaaaattgtcatattttgaataaaatttttcaaaatgctgattttttgtcggccaaatgctgattttgaaaattttcagttggcagccctggtttttccgctaataaaatattgttttaagtcgatttttcatatttttattgcgtttccttcacgctactattagttttagaaaaatcttatttttggggtccgaattttagtttttgagccattttgtcttattttgaaaaaaacatggaaactctgttttatttacctgctgaattttccctctaaccctccccctgcggtctaaatttttttgttgtgtatcgattatttttaatgctttcgatgtgaactgtctgacttctcgctgtctgcactcctacacaaaaacaaaaagaaacaaatattgctgataatttcgcaacttttaaaaaaaatcattgttttgtttttcatttttttgaccggcaccaccggggaaaaaactcataaaaatagagggaaaaattggcatagatccataaatttggcaaatacctttttaaacaatatggaagtttcagcaaatttttggccaacgatttttcaaaatttgaaaagactttcaaaaaatatcaaaaattatggtaaaactaaaattcgtttttttttaatttttatttttatcccttttataaatgcgcctcatttcagagctaatgtcaatggatcggatgaaacatttgttgagcacgggtgagcattcggatgtgcactttttggtgggggacggagacgcaaaagaggcgagtttaattaaaaataaaaatttaattttatttttcaattgcaatttcattaattatccacgttcccttttaaaggttttgccagcacatcagcttattttgaagagtgcttccgatgtttttgaggcgaatgttccgttttgacgccaaaaaagaaagaccggaaaatggtaaaaaaataataattttaagggaaaataccaattatgttatttgttcttcattttgtctctgctaatttccctaattaatttttcaattagtttctggtaattgtcctgatgttgtggagatccccgacgttgaagcagcagcattcaaagtgatgttgagcttcatttatacggaagagttgagtgatttgaatggagacaatgcaatggtagtgctttacgccggtggatttaatttttaatttaatttattaattgttgaattccctaattagccaaaaagtacaatatccctggccttattcgtccatctttgcaaattcccatctccgaattgcgcaatgttttctttgcgtatgcccaagctctccttttcgacttggaggtgagaaaaacaaatttatttttaataatgcttttgttcgaattcgggtttgttgagttcgaaacttgtcgaaattgtgtgagattcatgatccaagtgaaagcaatttttaaggatttttccatcaaatgtttgcgttacatttgtcaaaatgcggctgacttgttcggatcagatgattttttgcaaattgatcagaaaatattgtgcaatcttctcgagagtgatcgtttgttactcaacgatgaatttgaaatttggaaaattgtaatttcaatttaatttttaattgaatttaattttcgttttttttaatttaggcactccgttgggccgatgaaaaatgtcgtcagaatggcattgaatgctcctcgggaaatcgtcgttcagtacttggaccggcactgttcaaaattcgttttccaaatatccatgaggaggattttgccaaatgcgtcggtaaaatttttgaaatcgggaattaaattgaatttgttttggttgatatgaaattttacctttaatgcttgaatttcatacatggacaaggagggtcagaaatttttacataaaatttatgggaaaactggacaaagagaactgatgcctacagggtaataaattttgaaattttacagttcccttcggtgttttgtcaaaagatgaagtgatcgccgtttatcagttcaattcccatccgtttctgtatcttcgtggagtgcccgggctgtactcgttgaaattcccaagccatggacgaatttttaattggaacaaagccaggggcaaccgaagagggacactttcgatggaaattgaaaaaatgtcggaatttgcgggagagtctgtcgggagaagcagattcagtgatgccgtgtatataaatggatttccatggaaaattgaagcacaaattatgaattgcattgatgagaagaaatatttggggttttacttatggtgcgatgcaaaaaaaggtccaattttaattactattttaaaaatataatcattattaaaataggaggaccatggaactgcgttatttct

SEQ ID NO: 5828 - DNA, 1429 bp, Heterodera glycines
aatttcattacttttgcggtgagtgctaattgtgcatatttccttaattgacataattatatgcaattaaggaattgatggacccatccaatggtttttacaacagagaagaagacaaagtgacattggccattgatgtcacagtgaaagatgaaaaaatagagaaatttgtttctgatcccgacaaatccaatggaacaatttcgatggaaattgaaaatttgtcgggatttgcacgagacaccaatcagagtgaacgtaaaagcgaaactgtgcacatcaaaggatttccatggaaagtatggacacgaataaaaacgaaaattggaagcactgacaatgagaaatgtttgggcattttccttttgagcgatgctccagaagaaggtgctaattagacgctaattaataaacaatagtaattaatttgcattgtttagaaaattggagttgcaaatgttctttaacttttcgaattgtgtcgcaaaagagcggcgtaaaggattataagagagaaataagcaaagaaaaaatagacaataaaatgccctacaggggattcccgaatttcatttcatttgctgtgagtgacaataaactttccttaattgacccaattatgaacaattaaggaactgatggatccgagcaaaggcttttacgacaaaaacgaggacaaagtgacattggccattgatgtcagtgtgaaataagcataaatggagaataaatcataaattattcatatgctctgggaaatctcgtccttgaattatcatcctgtggactttttttatcatatttcttactgtttaaatttttttgattttataaaactggattggattaaatcatagattaaatgttgtatcagcgcaattgtaaatgcaaaaagacgttgtcctttttcttgccatgttttttaccataacaaattcgcatgggatgtccgccagcatactgtacccaccaatttccaagtcggaaagaatgttgacatttgtaacactttcttttgttgtttttttttgatttttcatatgccaatgccatgcaatgtattatttgtatccttacaaggctcagtcggctgaagatttcaaattttatacgtttaaatcgaattagacaggtcttgaaatttagagtccaaatagccctgtatagagtttagagccgaaactagtaaacatctgacaccacgtttaaacagctgtacaattgactaaataataaaattgtcacttttccatattttaatttttaatttttaagcgcagcttggattattaaagaatgaaatcatagcgtaattagtaatagtttttcatttttaatttaataagccccaacttcccggttcccaaatttctggtccaaaaaaattctgcttaaataaaaggaaaaaatgatcagtcattaggaatgg

SEQ ID NO: 5829 - DNA, 3961 bp, Heterodera glycines
  unsure (1)..(3961): unsure at all n locations
cacgaaaatttggagggttatggtactcttccattccaatcacttcttccaccgttaaattgcgggatggaactgtaaaaagtgtgctaattaaattaataggtgtatttttagaattcaacccaattacaaggacccgtaaatacggtattttcgagttctaattatgattaaccatattttttatgccatcggacatctcataaaaattcatttggttatagtactggtctactacttccgctgtcaacaagccgaaaggaactgaaattttggtacaaaaataaaaatctgttttatttttatatcccgattcttcgaacaacatcaatttgaattttttgttttaatttagttgcttctgttcgcattgtgaagtgttcggcataattgtggctttttgtctttgcaatgccatcgattcggaagaggcgaccaattgacaaacaagaacaaaaacagaaaaagtatctgtgctcattcattttatgttgcctttttccattagttcgttctttgctttttgtctaaatttttacattttgtgaataaaatttgattttttgaatttttttgttgttgtaaatttcgggaggaatactcccttttctctccatttttctgccagttttcccatcgttttttttaaaagcaacatttagctattgatatgggtcgaaaaatgaactcaactacccattggcatttgaattggatttgcttatcttccccctcccccacctccattttcccatataatttttatcgaagtaaaatggtgacccaaaaaaattaaaagattaaactgaaggaattacattgaccattgatatcacaactgttgatggaccaaaaaaggacaaattaattttggttcaaagcaaatccaatggaacactttttatggacattgaaaaatcgtcggaatttgcacgattttgagtaaagattgccgtggaaaaattatggcacaaataaatccgaaaaatggaagcactgacaatgcgaaatttttgggcattttccttttgggttccgcttacaatgatgtggaaattaaatcaaattaaatatttattaataaaaattaacaacctttaattaataaatttatttgagcagaaaattggagttgcaaatgtttgggaacatttcgaattgtttcaaaaaagagcggcgtggcggattaccgaacagaatttaatgaccaattaattgttaaacaatagaaggcacatcaggggatatgccaatttcatttcaatgcttaaaaaagccgctttaataatccataaatcaatattgtaaaaccaaaagataaacaataagaaagaagctaaacacagcaggtccataggatgataattcaatgatgagatttttgccagatcataatgggtatttatgaattctcctcaatattcgcttctttcacactgacatcaatggccaatgtcacttgatcataaataattggaacaataaaagtatcttcattagtaaattctcctcttctgaaattctttacgccgctcttttgcgaaacaattcgaagattttgccacaattttccatggcaatcctttgatgtgcacagtttcgcttttacgttgactcccaattatttcacgcgcaaattccgacactttttcaatttccattgaaagtgtgccgttggatctgttgggatcggaaatgaatttctccatttttggctcatcaacagttatgacatcaattgccaatgccaatttgtcctctgctttgttgtaaaagctcttgttcgagtccatcaattccttgattaaccataattatatcaattaagtaaatatgttaaattattactcacagcaaaagtaatgaaaaatccgaatccccagccatttaattcattgtcaaaaacatggtcatgaagtgtgccaatggaattctcggtgccatttttttgcgagataattcgaaaagttgccgaacgaacgtagcagcgccaattcgaatcttaatgattattactcatcgttgttaattagcatttaataacagttaatttgcacctttttcagtagcatatatttttaaaatagtaattaaaattggaccttcttttgcatcgcaccataagtaaaaccccaaatatttcttctcatcaatgcctttcgtaatttttgctttaattttccatggaaatccatttatataaacggcatcactgaatctgcttctcccgacagactctcccgcaaattccgacattttttcaatttccatcgaaagtgtccctcttcggttgcccctggctttgttccaattaaaaattcgtccatggcttgggaatttcaacgagtacagcccgggcactccacgaagatacagaaacggatgggaattgaactgataaacgccgagcacttcttccactgttaacacaccggatggaactgtaaaatttcaaaatttattaccctgtaggcatcagtttttttcggccaatttcacataaatttgaaaaatttctgacccccctccttgtccatgtatgaaattcaagcattaaaggtaaaatttcatatcgaccaaaacaatttctatttaatttccgatttcaaaatttttaccgacgcattttgcaaaatccttctcatggatattaggaaaacgaattttgaacagtgcaggaccaagtacggaacgacgatttcccgaggagcattcaatgccattctgacgacatttttcatcggcccaacggagtgcctaaatagaaaaaaatatcgaaattaaaaaatgaaaataaaaaattaaattgaaattacagttttccaaatttcaaattcattgctgagtaacaaacgatcactctcgagaagattgcacaatattttctgatcaatttgcaaaaattcatctgatccgaacaagtcagccgcattttgacaaatgtaacgcaaacatttgatggaaaattccttaaaaattgcttacacttggatcatgaatctcacacaatttcgacgagtttcgagctcaacaaacccgaattcgaacaaaagcattattaaaaataaatttgttttttcacctccaagtcgaaaaggagagcttgggcatacgcaaagaaaacattgcgcaattcggagatgggaatttgcaaagatggacgaataaggccagggatattgtactttttggctaattagggaattcaacaattaataaattaaatttaaaaataaatccaccggcgtaaagcacagccatggcattttctccgttcagttcgctcaaatcatctgtataaatgaagctcaacatcactttgaatgctgctgcttcaacgtcggggacctccacgggacaatcagcagaggctaattgaaaattattagtgtaattagcggcggctaattgaaaatttaattagagcaattagcggaggactattgaaaattaattagggtaatttgcagagactaaattgtaaatgtcattcagtaatgtttttaccgaattccgctttttcctttttggcatcaaaacggaacatcgcctcaaatacgtcggaagcgtgtttcaaaatgagcttatgggctggcacaagcttaagaggattaaattttaaaaaacacaacaaaatttaccattcactaaatttccaatttttaattaataaattaaatttttaatttaaaaactcgcctcttttgcgtctccgtcgcccaccaaaaaataaacatccgcgtcctcacgcgtgctcaacaaatgcttcatccgatcaagcactgattgggacatgataagcaatatgaaaatcgtatttatctattaatgtaatgaaatgaaataatgggaattaagtgaattaagatattcaaaattggcaataaaataaataanncaaatcggctanatccttatgattttactggactattcagctggctaatcatatgccaagccc

SEQ ID NO: 5830 - DNA, 2196 bp, Heterodera glycines
atttggattttttagaatttctcccccgtttatttattcagccatggtttttctagcaaattttaaaaattttcccaatgttgggcctatgtaatgccactttttgacatgggcaaaatattgggaaatatttaaattcccacgaattttttttgcatttaaaaaaattcaaataaaattattttaaatggccacaaattttcagaccagctctttttccgtcacatttgctcgtcgtcgaacggattgggaggaacacaaaaaagggtaggaaatttatgtaaattttttgacaaaaatgccatggattttcgaattttttcgtttttttttttataaatttttcagcacttcttcgtcccccgtgttcaccaaactgttcagtttgggcgccaaaaatttgctgcttgcggtacaatgttctgcaattccgaccaaaactgttgccatcaggccgaaagtgtaaacaaaaaaatattttagggaaaatcgttttttttttaaatttttggactcgacctgtaccatggaaccaggcctggatttttcatggacatggacttttatccagaaaatccaagtcaaatatgaaaaactaaccaggtttaagttaggcacatacattaaaaaggggggggggtcagcggcagggctggccgtgattgaatttccaatcacggaaatccgtgagccgtgatcacggggctttaaaaaaaatccgtgacccgtgaaccgtgatcacggcaccccaaaatccccgtgatttccgtgatccgtgattataaaaaaaattttctaatgattttttatttaaatttatttaaaaaaacggaatttaatcgcgggaaaaattcccaaaaaatgttttaaagaaaccaaaacatataaaccgcttttttttgcggcgaccttttccaaaaaaatgactaagtttacgatttttggcaattttttgaggaaaattagagctttttgtagaaatctccaaggaaaattttttatttttaactaatttattaagaaaatttttcaaatttttcttaaatttaaccaaaaatctatttatgtagagaaaaaaatttcctctaatttgtaagctaacttttgatgctgaaaaaaatcttttggaccaacatgctcagtccttcatgacgatctgaacaccccaaaagatactgaacgtcgggaaaattttagaaaaaattcttagagggttgggaaaattttctgaaaattttgattaggcctgtcgttttaaatttaagcgacggagagaaaaaataggatttttagcagtttatatgccaaaaatggtaatttttctgccattttggggtcaaaatttcaaaaatacggtaaaatgggggtccgtctgccggtggtgccgacaggcgccgccgggaaaaattttgaaattttgagtgaatttgttaacagattttgtccaaaatatgtccaatcattggttaatttattggtctatggacgttttaaaaaataaagaaaaataattttcaatgttatgaaatttcttgttaattaaatttcaattaaaattatcaaaacaaaatatataaattgtccaatcccaatggggaattgaacccaagggacatacaacgaaagacagaaggcttaaccaccagactacatatatatgtttactttctaatttgtaagcagaaaagaatttatttatttttctcaaaaaattcttcacaccactttcctattttctctcaataaaaattccctatataaaatgccaatcacggatcaaaatcacggaaaatttgaaaaaatccgtgatccgagatcacggcaccccaaaaaccccgtgatttccgtgagccgtgatccgtgatcacggccagccctggtcagcggccaattttgcgaaatggtcccggccatgtaaatcgacgacctttttttttttgcttttcaagaccccatttttttgcggcgcactttttccaaaaattttttggtgaaccggggggccgacggtgccggtaggcgccgcgccgtcgggaaaaaattttgaaaatttgagtgcggtttgttaacagattttgacccaaaaactgccaaattttgcgatttttttgcaagtcgacgacttttttttaaaaaaaaaaccgtttttgcggcgtggtttttccaaaaacttttgggggacaggggggttcggcg

SEQ ID NO: 5831 - DNA, 2670 bp, Heterodera glycines
ccggccccccctcgatgcgatctggtcggacattttgggcccattgcgggcgaaatggggggggggggtgtctactccacccctattttttgtatggttaggcacgaaaacctggattttttctgacaaaattaaaaaaacatccaggttagacatgaaacagttttttgtcgtcccccgtccaattttcgaaaattttttatatttacgggctaggtctttctaaattttgttttttggacaccaatttgcagtttctacctctccccccgtttcagcgaggagtccttccgtttcatttgtgccgtggacagtgcaaccgctgaaaatggcaacgcggctgctgccgcttccgcgcgcggctcccaagcggcggcggtggtgacgcgtctgtccgccacgtttgcccgtctgtacgcgctcagctcggaccagttggaccaggagcacgcgttggcatggaaagaggtgggcatagcgccggaaggcaaacaaccagacggaaagaccacccgcattttaccggtttgaagccgaatattctatttatttggccgtgatccgacggtctatgttttgttagactttcagaccttttcccggcgattgatggactttattttgtcagacttttagactttgcgatccgatggcctttgttttgttagactttttagactttgtcctccatttttggtggtttttgagttttctcctaacacataaatgtgtacatcatgccacatttttcagttgaattcggccacttttcacatttctcaatcgaaggcaccgaatgcactgaatcaggcaaataaattttaaatatttattaaatttatttacccatttaactttttttgtccccccccccctctttaagccacaaattgacaccgttcggcacgctttgttaagcacagtccgcgcgacacttttggagaatggcaccggcacaacacaaatggcaccaatggccacgaagacagccgatcagcaccaggtggatgtgccatataaattttttgcatttttttaaatatgacttacttttctactcccttaccccgtcccgatttccgtttttttttttaaatttttttggaaaaagctcgcattaaaaatcggcgtttgtaaccccttcgtaaaattggccttcacccccaccctcgcaaaaatttccgtctacctccccccccccctttttataatgtaagctaaaaaaaaatttccccaaaattaaaaaaaacaaaaatttcccaaattggcaccccctaaaaaattttatttgcaaaaaatcccggaaaaaaattgttgccctcccttttcagcgtgaaattgccgcgcgctgggcgtcggttgtgcgccgttccgcccaatgctacgcgggccattccacgctgttgacaccgtccaagctgtggcagcgctgggacgacctgcgcacggcgctcaaaacgctggacatttggaggtagagtgggcgcaattttctgcgaaaaattggaaattttttttgtaaatttccccgtttttccgccccctcccccctaaagaatgacgctggagcatcgcggctgtgcccgactgatgcgcggcccgaccggcgcccatggcgttgtccaggcatttttgctgagtctgagtgccgccacattcaccaccgcttcgtcaccgcccgcggcggcaggtggagcagaaaattaaaacaaaataaatttcaagacgaggggagggcggcataattggaggggggggggggttcagtggaaacggcattttgatttaaattcaaaaaatatgccgttttttttagataattttcaattaaaattaaagatattttttaaattttgccaatagaaaacaatcattattattaaggctgcgaggtgcgaatttggaaccattttcgaaacttcaattcttagggggcttatttttcgtttttaatatttgttaagtgattatctactacaaaaaaaaatgccaaaatattttcaatttatgaaagttttttaatgttaaatcttttagataaacagtgcatttattttaaaaaaaagaaaatttacacttttcagttggtggtgcagctcacaacaaacagcagcagctgaacagtccacagcaggaaaaggccggagatgggaccatacggcttgaaattgggctggacccggagagtgaactgcaccggcacatccaggcagggcaggcgtacaaccaccaccaccaacaagcaccagggggcatggatttctccccgtcctcccctttttatttattttttggcatcttgaaacccatcactttaaattttttggaatttttccccaaaaggatttacggatttaaaaattccatttttctatgttttttttaatgccatgacacacctagcaaaaaaaaaaaattttttccatgctcataataaattgtcaggttgacggcctcctgttcggcacgtccggcgctgttcgcctgtccatggacttccagttggacttgtcgctgaagccgtttgtgtcgttgcgcaccaacgcatcgcctgcattgcctgcatcatcatcaccagtgttgtacgcatgcactgctggtgggcaaataaaatatgcattaaaattttttggtagattttttttgccaaaaactttgtcaatggcttag

SEQ ID NO: 5832 - DNA, 3486 bp, Heterodera glycines
tttttttttggtaaaaaaatgggggttatgtcttttttttttcattttttatgttccaggttgtcgatgccccggcccatgaacaacattcggtggacttgcataagcatggcggccccggcggtgggtgtctgcccccactgttctgggtggtgttggtgctgggtattgatcgccttccacctgtttttgctcaagtctgtctctctctcgagaaaactctcggcttttgcgtctccgagtctcgggatcaaaatccactgcattgatcactgaccaaattggataattgcgatttcacaaatttttctctcccatcccttccaggcttttgtacacggaatggcaaaacgtttctggcgttcccggcggcgcgccgtactcaaaatactccaaacgcgtgctgttccggcgagaatgaagagaagcgcgcggaagctttgcatttggattgagtgcttttgatcggaaatttatttcattgctttgatcacgatgtttctaagtctttggcgttttgtttcctcccattatggcatgcctttttaattgatatgtcgcttaattattcccatttgtcctttttcgctcctcctcgttttttgtcacaaagctgctttgaatttttatgaaaaaattagctattaattaattataatgacaattaattaattagctaaaaaattattattaatctcatctttgtgacatcatttcaaaacaattaattaatacattaattatgtatgcattttgctgatgctattgcaatttacgggtcatttgtgttgtcactattaaattttttattcatttgtgtgagggcaacgttttatgtatcaacaacctttgtaaaaataataaatagcaagaaatatttatttgaacgaatttttaggtgctaaaaagcgagaaaaaatcgttgctaaaaaacagaaaaatgccaaaaaattggaaacatataaagtaaatggaattgcatcattctttatccattccgatcagggaagggcgaatctcggcttaattaattattcacatttttaatacattaattagctgaagttattgtgaattttacgggtcatttaacctatatttggacaaattgatgataatcaacattaagcaacccattggatatgctcaaaaatgcattaaatgatattaaaacattgtataaaattcgacaaaataaattaaaattgtataaaattaaaattgaaaaaaatataattacataaattactttcgctttataaaataatttgtaaaataattttaaatttattaaataattatttaataaaaattttagaaaagcaaaacaataaatgctcttgttcatcattaccaatttaaaacattttgctttttttgtaattaccgtacatcctctttttatcctccttgggggattatttttaaacctcctcagaaaggggaggcgggataattggagactgggggattaagatagagggattaattttcaaatgcttcatagactgggggataattggagactgggggattaagatagagggattaattttcaaacgcttcgtagactgggggataattggagattgggggattaatggagattggggggattacagctttctttttctttttaatttaattttttcatgcattttaatcatgaggatttttattaaaaaaaaaagtgttgaatatatgaaatttggccaaattttacagatgacaaagcccttaaactgtacaaatttgtacggtaatttatttgtgtgttaggaaattgctttttcaaactttgtcaatttttcgtcattaaaattaccagagccctatttaataccaattatccccaaattagtacagtcaaccggtcattcgtaaaatccttttattccgtatttttataatattaaattatcaaattttggttttcccaatgaataataataataatcaccaatcagccacaaaatttattcattcctttcattttcatcacaattaacccataaaaaagagagaattctctcaataaaccaaattctgtgcaaattcagtgattttattattagtgaaaattatgccatttttttaaaataaaaattgtaaataattttaaattaaaaaaaaagttttaaattattttcgaagagcaaaatgcaccttttctatgtgttaattgctgctgcttttttcaatttgcacagcttcacaaatgggcaacaaccatcgcatgggccgtaaatattttaaatttatttttattttttaaattatttaatttaatttattttttcaaggcttcaatcgacggacggcaaaaacggggaaaagccaccagcagcagttggactcacatttggctttcccccgaggggcggacattgtgacgaagggtgggcaaaaaaatgaaaattcaaaaaaaaatttcaacaaattttaggctttggatttgctaccagggcatttttcagcagcatattggcacctcaggcagcaattttcgtgcgaaacgaacatttgttgtcagagacgaaaatgtaaaaaatcaaaaatcataagtagggcttggatttttaagggcgaaaaggtccaaaataaggccgtaaatacgggcgagaaaatcgcgaaataagggcgaaacgccaaaataaggatttctaaggtcgaataagggcgttaaacacaaaattttcaaataaaaaaaaatgtgtttttcgtgcatttctcgtcgagttgaagctgcagaaaaaataaggaaaaacttataaatccggaccctattaataagttaaaaacctaactgattttattaaaaaaaaaaaaaaattcattctttgatctaaggccttgaaaagctagaccgagactaatataactcgaagccagaaaccaacggccggggcatttctcttacaattagcaccagcgggaaaatctggcaccgtgcgaaagttttacaaaaaaaaattaaactgcgacgcggatccaaatattttcgatttaaaaaagtggattaatttgtattaaaattggatttgcttccgttttttccggtttcggatttttgccatagaaaattttctctaatagtgtctgttttttccaacggtgtcgcattttcaggtgcttagagtttaagcatcgaaaagttagctttttgtttttcttaaaatctttaacaaaaaatattttttatctttatatttaatttctttttctttgttattgcttttttgggtttttattttttcaatttttctaatctttttagagactaatgggtttttttagtcttttgatcttagaagttaatttttttagtttttttttaaattttaacttaaataataaataatttttaaatttaaattataattaattaaaaaacttatcttgtgtgcccctaataaaattgtcatagttttgagattaacattttgaacctcggaattcgatttccgatttctgaaaataaatttt

SEQ ID NO: 5833 - DNA, 1219 bp, Heterodera glycines
tagaagcatctaaaaatatctaatttacaataataatgagttttgaatctatttaatcattttttgaaaacttgaaaaaacatcggtcacttgaaaaaataaattctaaaattttgtacaggaaaatccaggttgtttccgttttgcctggacctggattttttttcacatttgacctggacattgatttcctggaaaaaatccaggaaaatccaggtccaggaaaaatccaggttgccgaaaaatggcctggacctggacctggatccaggaaaaatccaggcctggatccaggtccaggtcgatctctaaaaataatttacataatgacattttgccaacatttttaaaaattatttctcagtgaagaaatgataggtaaccccgccggatggcctccacattattctcttttaaagaattcactcaaaattacaaaatttggtcattttttacaaaatctattaacaaatcgtattaaatttcaaaaaatttctacggcggtcctccccccccccccaccatgttcctagttttttgaaaaaatagcgcaccaaaaaaaagcggttttgaaaagcaaaaatattcaaatttatggatcattaggagattttggttcccgatctctttttaccgtctgctgatccatttgaaaatcttagtcgacccatcagcccctttaaatgcagccccagcccctaaaaaatttctttttcaaaatgtcaggtattttttgttttttggaaattttttgaaatataattgaaattttttcgaattttccaaagtcccgcaatcccgcgcgggatcccgcaaattttaaatgcgggatttgcgggattaatcccgcgggatcccgtcccacaaaaaattttgagttccaatcccgcagcgggatccgcaaatttgaaatttccggtctctactgattaagcacttttcaaaattatttccaaaaatcaaaaagtcattttctgataaaatctttaataaattgcaactaaattttcctattttccccagcgggcaccaccagacaaattcattttttgtgagtagcttttacggaaagtaaaatgacgaattcaccatcttcattgatcaaccaaacaacgcctttcaattaatagataatttaattttttttcacttagcgacgagaaaatttgatataattaatgaggtcgggttggattatattttttgaaaactttttcag

SEQ ID NO: 5834 - DNA, 7709 bp, Heterodera glycines
atcagcaatgttgagattgacattgagctcggcctgcaggtcggacgcttttatgatacttcaggaaacctcaaatagggacaagtacacgcttgagattgtcgactgcaggctgatagtgaagacggttgatctgatggacggactcatccttgacattgcaaagaagttggaactggagcccgccagatacggcatccggaaaacgctgatgaagtcgctgttcattaacggtggacgatacgatttttctgccaatctgttcaccgaggaagtgcctcggagggtcatcattgggctggtccccacccaaatttacattgggcgcaatgagcagcaccccttttgtttcaatcatgagaatgtaagtgtcaatctgtcatgtatttctggcagaatataaatggccaggtgatggcatattataaaatgccaatttggcagggcatactcccggcttcagtgaatgaagttgaatcagatgattcaagtgaagaaaaaggtgatttttcactctggaacactttattctatgagaatttaaaaaaaaaggtattttcgttaaaaattttgtgtgaatcactaaccgatcggggttcccggcccccgacattttgccccccccccccccgaggggtcgtggagcaaccctaatttaaaccaattccaaatcactacaaaagtgtcccacttttttttttctgggtactaaacagcaaaagtgccaataattgtatataatctaaattatatgattgcactgcacaaatccaaaaagactgagtacacactccagaaggcaaacaaatgactcaaattcgagtcaaatcaaatgttaaactaggtaaaaaaagataaggacatacaaaaatgataaaaatatattgggaatgttacggtattttttggtgtgagacaagattatttggcaggttatggcattttggtgtcaaaacgaaatttcgaaaaaaaaaacaaacaactattataaaattgaattagaatttcgtttgaattttgaattaaggacggccaatgttcgatgtattttaaatgaaataattatttttgaattaattattaagtgaaatcgtttcacattttcttctgttataatgctcaaattttaagtgaattgaattcaaaagaagaatgaaaattgttcttactccaagcttcaaaaaatggaaaagtttcaaaagttaatttcttaaggatcttaaacgatgccgcctggagaaaataaaaattaaaaccaaaaacattcgaaaaatatgttaattattaaatggtggtaaatagcgtaaataataaaataattgaaaaaataccatatttactggcaaaaatcttattgaaaattctgaaacaattaaacagttttataattataaattataaattaaatttaattcatccatcctttgctaatctgacgcaattgaaacctgaagaaaacatgaagaaatcgcggaatttaagaaaaaaaaagattgtgattaagacttgaatatccctttgttgatcattcaccaataatttttcgaatcaggcaaaatctcgaaactcgaataatcgaacaaaatgaacaaacaaaactaattttttgagacggaagtttgaagtgtgagacaaaagcttgggatcttcggttttgcttattgttgaccgtgaaacaaaatatgaccattctcatctgagttggcattcgtgagaccaaagcccaaagatcataacaaaatgtcggcacttttcgccggtagaaaatttcgaattacggtcaaagtgcgaagcacacactgacaatgatcgaattttaaaatgccggaaagccgttcaagtacgagcagaggaattgttcttactgtatttcttatcgataatttacagtatagctaatccaatacattttcaaagtcacaaaggcacacaaattttccattattgtagtcttttacatttaattcattcagtcatttgcatcataatgtgtttccctcaatcttttacagtatctcttccatttccctttatataaaatgcttttaacacataatgcttattactttttgaaaataataatattaataatttactcaaaaaaaaaaaaaaaaatttatttttgctttttttttgatcatcacaaaaaactaattacaaattcatattcatttctgaccatcgtttagcaccaaccggcaccaaccaccccattgatggaatgcacgtcctaaagtgattcatccccaatccaatccaatccaatgaatttgactgttatcgctattagcgatcagcttacccgccatcccttggctaattgtgatacgaattttttttccgtcagcttccacgggtgcgggggacagcggtggacaatttttacgcgacgtgtcacagcgccacccaccgcgtgggatgtgtgcggtgcccgcccatttgccgcgctgcttctgccgcagggaccgcccatttgggcactgtcgaccaccgcatttaagcgctgtccgatcagcgaacaatcagtcagttccaaaatttcatccagctcctaaccaaaaagcattcaactgacaaataagctggggaaaggaaataggaaaagccaaataaaaacattttttgaaaatgggtcagcgattaaaaaatttttaaataaactttttgaaaaccctttcttttttttgtttttcattttaatttagaactcaaaaaatattttttggtttaatatccattaattttgtattttattgtaacattttaggaagagatttttcctctatttctgatcccgaatcccactcttcaaagcaaaccgtcccactctcgacgttcaatatgaacaagtggtctgcacttgtgtacgttttgtggggagtgggggcttaaaccctggccaaatattaattctctgtcctctttcagtctgttgatcgcgctgatcagcgcgctggacagcgctgttgtgcgacaacagcgcgccaccaacgcggacgcatcgaaaccggaaccgaataaccaaaagccaggtaaaaaaatgaatttattaaaaataaattaataatttggtctaggaactgtggactcggacaaaggaaacgcggacaaaagccagggagcggacacggatggaaagaacccggaaaagccaaaggaaagccaagaagtggaagaggatggaccaaatccaaaggagccaacgaaaagccagaaactggaagaagatggaccaaatccgaagggagcaacgaaaagccaagaagtggaagaggatggaccaaatccgaaggagccaacgaaaagccaagaagtggaagaggatggaccaaatccgaaggagccaacgaaaagccaagaagtggaagaggatggaccaaatccgaaagagccaacgaaaagccaagaagtggaagaggatggaccaaatccgaaggagccaacggaaagccaagaagtggaggaggatggaacaaattcggacgaggacgagctcactgaaagacaggaagcggaagttgatcggatgcgtgtccgtgccggtgccacctccatgcatgggcttgacaaacttgcgccaacgccaccgccgagtgccacttctacaaatgccatcgcaatacgagaaaagcgcgtcccatggctagcactcgctggattagcgatacccattggagaaattgtgataccattcgtcaccaacaaattatgcgagcatcgtacccaatattgtccttgtgggaggggaaggtgcgtgccggtaactacgtacaaggcggacgaatgttgtgagagcaactttgaatggaagtgttgccccgatgtaagtattaagttaaaaagaaattattatcaaaaattctacattaaaatagtccgggagtgagaaggcgccgtgaaattttcttgaaaatttgagtggaaatgccattgtctgttcttgagcccattagttttatggcaaaaaccttttcagttttttgaacattagcctttttatttatttttggtgcaaagaccaaaacctagttaactttttaataataaattcaaaagaccaaaaccaaaatttggacattttttgaacaaaatcctataagaagcatataacaattttcaaaaaatctctagcaactatttgcctttatcaaaattttaaaaataaacgtgcattgcatcacctccttttagtgtttttttttcatgaccaatatctttttaaatttctggtaatcattttggttttatgcaaaaacggttttaaggagccgactacgccagcacctcaactggtattaaatttaattggaacatttatcaagtcttttgattgtataaatatagggaggtaataattgtttttaaaaaaattaaaattattaaggaaaagtgcgtgcctgttagatattattgggactggatttgtatgggattctatgggcataatgaaattcttgcgagctcacctaaatgcaaaaagtggtacgagcaatcattcacgtgcatgtgcgattttaagagcgttgattggtttccagaaattgaaggaatttgtcgaaaggtatctaattatatgcataagcatgataatttacaaacgaaaaataaccctaagaatcgatccaaaaattttcaaataaaccccaaagaaatgaaaaattttttaataaataatctcaaatttttataaaaaaattactcacttttggaatttttgtgcatttaagacacaggttttttccaatttttgcacctatttttgcaacaattttggcattttcggtgtttttagaatctcttttggacttttttggcaactgttttagtacctatttcagcatttttgcacctcaaaatcccagatctaataataatataatttaatttgaaggattgtaaaacagctacacccggagcaatcgccgaaggactctgtgactgtgggtatggaaaccattgtgcagtaattgagtaagtcaagtttagaaaattattcaaaattaaaagatgaagataattcataatacatgttaatattcctaaaaaataaatgtcaaaaatatatgaggacattaccggaccaggccaaggttgtgcctgaaattctcctggccaaattaatacccgcgccacccttgctttatagtttttaaaattatcctaaaaaccataaagctagcatttttaatttaaaaataaattttatgaaacaaaagagaaaagttttattttaataaaaactaatgaattattttgtttttttggaaaatatcgattgtaaaataatgttcttcgctttagcaaaagccgagaaattggaaagaatttctacgtttggaaatgtagttgttgtccaatttttttgggttttggttatgccaagctccgcgtctgttatgaagtgaaggtattgcaaccgtaattcgcaattgggatatagacgggcgaacatcagctcgctcgaagccgaagttcgaaacgaagccaatttctgtcgaaactcaaagccccaaaaacgcgatttggaactcggaaaattttcaattcttaatgctttcgcggtttttgagttagtttaaattttgtggtgttagcggtgccgatatccgccgcggggaatttttaagtttatatatgatttgttctgatttcagataaaaattacgggatttgaaaaaagtgtcattctcattccttgagcccatttttgaggttttttctcgaaactttattttcacaaagctcgaacgaagcccaaaaaaacgcagttttcgaagctcggttccgcccattcatgattggacagcacaaattaatcattgtttttttcttttaggaagtgaagacgccgccatccacaacgacaaccgtactgaaaaatttaaaaataataatttacaactaaaaaatgaaaatttttaattttttgttgaagcttttgaaaataaaatttttaaaaagcatttttttccttttatttatttcattttatttgatttaacaagattaatcattaaaatcaaaacatttagacattgaaaatcccaacaattggtccagaatttgcaaacgagacggtaaaaaatttagataattaaattaagtaacttaaaattgaacaataaaatttatgtagacaaaaaaaagaaattgtatggaaataacaaagattaaacatcaatgaaaagaaaccccaaatagaaaataaataataaataataatatttttttattttcatgacttaagataattaattttcattgtgtttttatttttggattaaaatgaaaaattaaattattattgttaaatattgtgtcttactttaataattaaaagcaaatacaaaaaaaaaatggcggcccctaaaatgttgattttattttttgcagaagaagctaagcgagaatgagtgcaaaattttggcaacaaaatattgcccgtgcggtcatgccaattgcgtccaagtcgaacctggttacattggcagccgatgttgccctgcggcatttgagtatcagtgctgcgttgaggaagtatatgatgccaaagaaaaaggtagggatgagatttgaggctgaattttgaaaaaaaaatggattcgtgattggaatcaatcggataggattagcgagattcaaatccaagcttttcctaggcttgagtccttgtcgggaccctgatccagaatgtcattttagagtcgggacccacgcatgatttgggttttttaagaaatttaaaatgttcaaagtaaaatttactaaaataaataactaatagagtaacgaaattttctgctaaaatagaccccattttaattaccaaaaaactggcaaatgcccgatttgttgggcaaaataacgcccatggaatgaaatgattctcaaaatcccaaaatttgtttgtgttgcttttatccaatacacaacaggtactatgtactgcaacgttgctcaaaagatgtactttgggacagaaaaaaatgtcgaaattaaatccacattctgcgaaccatcttctcacttctgctacatggcgcactgccataaaagtaagtaaaagtctaattgatcaaaaataattaaaaatcagttaataaaggtattttatgaataaattgattaacaaaaggacagtaatggtaagaaacagatggcataaatcagcagatgtttttattaagagtcgaaaatagaaaagtcaaaatttttgaagaaagaaaaatgttggcgagaaaatatgtaaaattaattaaagaattaaaatttaaacaaattaatgttgcaaagaaatttgtatacaattatatttatataataatctgaaaatcataaataaatttatactaaattatttaaaaaatgaattaatacaatttatcaaataaaaatttaataaatattttttttagattttctttatttaaaatatttttaaaattaaattaaaacatttgctaaatttactgaaatgataaaatattcacccaaatgtaaatatgacaaaaaagggataaatttctgaaaaaggttaatttcatgtaaatttttattttcagcatcggacccaatgataagttacaccgagtggggctgcaagcggcacaaagatgaatgtggcgtggaactccgtttaaagttctggctgagtgttgcgatggtcaatagcgatcggtgaccgaaattcgacccaatttacgtgttcg

SEQ ID NO: 5835 - DNA, 3946 bp, Heterodera glycines
tttatgtgcaattgcttattgttacacttaaagaacgttgtgcagaaatctttagaggctataatgagccataaacacttgaaattttgtgtagtcttatgtgccgtttctcccaaaaaatctaattatcctcgtcgcatagggctcaacatacacgaaaatttaattaaaataggccatttcgctaacgagagagggtataaatagcaagccttttccagccaaaaccccatttcttctattcatttggaaattctgcaaacatcctactgcgcgtagctcctcttacagcatttacttcacagctctgcttactatttacctattacaatacttgcatcacaaatatcttataagacatattttaaaataatataattcatttatctcataaataattaattctcattaaaaaattaaatttcctttcttaattcataaatataaaattactctcaatataacaaaatgaagcgtgtctccaatacccaatcttcatctttctccccaaaaaaatctcaaactaataaatgcattcgtaaaattgaccaatttacttccaaaagtcttaaacatcatttcatccgctctaaatcaaaatttgctatcgaggaaattgaaaaatgtgcagatccccaggttgaattccgttcatgcgtgcacaacgcggttgaggatgctattcatgatgcacaaaacaccattggaggagcaaataaggtaggtgtcataatttcttcggagcttttagaccagggtgacatcatcatgcctataactccaattacatcaaatgtcgtcgatgctgtatttaatcaattttgcaaagtggagcagagcaaagctaaacacgtcaatttttacggtgccccattttttataaccgtcactgtcctgaacactgattgtctaccccgtcgacgaacgaccaaaggaagtgcccctccaattcactcttcccaatcacacatcttcaaaattaacaacaacgacaattattgcctttttttatgcactggaactgatgcgctactactcattatatatcaggggagtaatttcaaggaaacaatttagatggctcaaagataaccaaactactgttcttcgtcaaaaagtactacttttactccgcgatgccgggattccgacaactgaaacggaatacgatgccgaaatatacatccatcaagtgcaaggattatggagcataaaatatcccggtgattttgtaaatttatgtaattataataaatattttaaaaatttaggcgaatacaaaatttttattttcaacgactatcaaacccgacccatcacaaagtctgacgtcattgactaccaatttccaattttactttatcatcacgacaaacatttcgatggcatcaaaaccttgccaaaattttggaacaaacgctactattgcctctcctgtgaatcagcattcagcaataaaccacaacattcaatgaactgcacatcactctgtcatggatgtcgggaggtgggcgttgactacccatgcgagccacaacagggatacttcaaaaaatgtgatcaatgtaacaacaatttctacaacaaggattgctatgaacgccacctacacaaggatctatgcaccaaatttcagcgatgcgaggactgtggggtaatttataatgtaaagtatcacggtaaaacaggtcaccaatgcggggaaaagttttgtcgactttgcaagcaattccatgtaaaagaggatgatgaggataatccgtgcagtagctgttttatccaacccctaaaaccccataaacttaaaccatacaggatcatcgcttatgattttgaggcgaacaggataaaaaagtaggtaataaatttgaacacgaggtaaactttgtgtcggcaatcatcatttgtaccgattgcatcaatggaaattggaaggactcacttaaaggatcctcttgcaaaattcgtggaccccaccgcacaatcaccttcgcaccattcgacttctcaaacacgatagtggaccaaaaagtcaccactcaaaacccactgcgcgactttgtccaatggctactcttcgaccacaacaaaaaatttcccacggttgcctttgcacactttgggggccgctacgacatgaccatggttatcaaggaagtcgtttcgcaaggtaaaaatttattaaatatttaattaatttttatcaatcaaggtattcataaccctgatattatcaaacaaggaaaccggctctatgaactgagaatcaatcaaaatgaacacgggcctttgaccatacttcgcgacagctacaacctaatgcccatcaaattatctggactaatcaaatcatttggtctcaaaatacaagtaaataaaaattttaagtattttcgtaattttaatttttaggataaacaatattttccccacatgttcaacaaagcatcaaactacgacaactttctctcccatctacctccttgcgaatattattgtcccgatcaaatgaaagtcccagaccaacagaaatttaacgattggtacaataataattacaaccaaccttttaaccttaaggaaaaacttcctgaatattgttgtaatgacgtacaaatccttacccatgcacttgtggaattacgccgggaattcaagcaactgacacaacggaacggaaaacacgggggaatcgacattctttggcaagcaatgaccatcgccagcgcatgcgtcaagaactttgcactcaatcatttgaagcccaactcgctcgccatcgtaccggaaaaaggttatacacctcaacagaaccaaagtgcccttgccatcaaatacctggattggtacgcccacataaacaacatcaatatacagacggctcattcccgctacggtgaatatgtctttaagcgagaaggacaggtttatcaagtggacggttatataaaagggactaatgggaagagggataaaattattgaggtaaatggatgtttatggcatggatgtgaggagtgttttgaggacttggacgaagagacgaggatgccaaacggaaagacgctgcgggagattagggagagggaggtgagaaaacacgagatccttcgccggtacgtcgacttggaaattgtatgggaacatgaaatcaatgagcagttgaaaaaggacgcagcaatgaaggattactttgacaattggaaggaccgttcccccatcaaaatcagagacgcgtttcatggaggacggactggaccaatgaagctactccacacagcaaagccgggacaaaaaatcagctacaaggacttcaccagcctttatccatggaccaacttttctacaagttatccactcggtcacccaaaaattatcaactttagattaaatgagcaaactgtcaactggcgagctccatccgacaatccatacaagggacttttaaaagttttacttttacccccaaacaggaatatcaatgtgaccgtaatgcccgtaaaatttgatgagcgactcctcttccctctctatgagaagtgcgccaaacacatcaccaatgaacacccgaatggcctcaaagacgacaactactcgtgtccacacttcaatcccaatgaccgtgcctttgtctctacctgcactcaccttgaattgagtgctgccttggaggtcggctacaccgtcagaaaactcttccatgtcctgcaatacgaccaatggagcgacaacatcttcaaatcttacgttagcgaaatgatggccctgaagatccacgcaaccggcttcccttcatggtgcagcaacgaagaggagaagaaggaatacattgaggagaaccgtcagcgatttggaattttgttagacaacgaaaagatgaaggctgaaccagggaagcggtacatcgccaagctctgcctcaactcactctggggccgcttctcga

SEQ ID NO: 5836 - DNA, 2111 bp, Heterodera glycines
  unsure (1)..(2111): unsure at all n locations
gagcagacggtcaactggcgacatccatatgacaacacgtacaagggaccttttaaaagttttacttttacccccaaacaggaatatcaatgtaaccgtaatgcccgtaaaatttgatgagcgactcctcttccctctctgtgagaagtgcgccaaaaacatcaccaatgaacacccgaatggcctcaaagacgacaactactcctgcccacacttcaatcccaatgaccgtgcctttgtctctacctgcacccatcttgagttaaacgcagcattggaggccggctacaccgtccgcaaagtcttccatgtcctacaatacgaccaatggagcgacaacatcttcaaatcttacgttagcgaaatgatggccctgaaaatccatgccaccggcttcccttcatggtgcagcagcgaagaggagaagaaggaatacattgaggagaaccgtcagcgatttgggattctgttggacaaggaaaagatgaaagctgaaccagggaagcggtacatcgccaaactttgcctcaactcactctggggccgcttctccatgcggaacctcctctccaaagcaataatcaacaacgacgaaagcctgattcgccaatataccgacgacaagaaaatcgaattagtggacttggaaatgatggatgaggacaacgatgtttttatgctgacttaccgaccaaaagaagaatttgtcgacgaaaataaatactccaatgtcgtcatctccctcttcacgacatctgcagctcgcctctacctctacgaagctcttaaaaaagtagccgacacccccgactgcgaaatcctttattacgacaccgatagcgtcatttacgtgcaccccgaggaaaacgacccactaccaacaggaaagggacaccttggagaactaacagacgaaaaccccgaccacaatatcttggagttcattagtgctggctgcaagaattatgggatgaagctgcaacgcaaggacaccggtgaaatagaacatgaattaaaaataagagggttcacccttgatgcacaaacggttcaaagaattcattacgatactgtaaaagaccaaattttacgttatgggtccgatgaccccgcggaccccattattgtaacttacccccattttattcgccctaatcttatccaaggcaaagtgtatactcattccctcacaaaacattatcaacccatattcacaaaaggtattattaatgattcattccaagtcctcgaatttggttatcgcaaatgataagtatgcattctcaattaaattttctgtatattagttttcttattgttcccttcttttctttctctctgtttatatcactcatgtgggacggaatgacccctggttgatcctctccaacactccaggccatccatctgagatgaaggtggacgagctgttcattattgtaatgcgcagcctggtgcgtgagtgtttggattggggaccgaagggtgaagccgttccctgggtgtgtttactcacttttaagggaactctaagaattctgatatgccttcaaatctatcaaaagagttgcatactttctttttataatttcctttattctctattttacacttgtatttttcatttgaatgtttattcagaaataaaattgaaaaatgtgtcattactaatattaaaaggtataaattaaaaaggtatttaatgagaaaaatagtcagggttttgtaacacaatttgtaaattattaaggaatagaagatacaattttaaaaaatacacgaacttgtcgtttttaggaagaaaagtgcataattaaacacattaacatgtatgcagaattaagcactggaagatacaatttgaaaattattaagcaattgggaatgtcgtttttaggtagaaatatgcaaaattaagagaaataagttacaatttgtaaattattaaggaatagaagatacaattttgattatgtgcacgaacttgtcgtttttaggtagaaaaatgcataattanacacattaacatgtatgcagaattagcaatggaagatancatttgtaattatttagcatttgngaacgtcatttttaggtagaaaagtgcagaa

SEQ ID NO: 5837 - DNA, 6403 bp, Heterodera glycines
cagcagcagcaaatgattggtactggccactttttggagctgatgacattgtttttggcctaggccctccgatggacactgaaaaagcaaaaatttacatgaaaaaagcggtgatggagacaaagccaatcccgagatttaagcgagaaatgattcaaagtaattagtcaaaaggaaaactcaaagaaaaatttaaagaattataagaaaaatattaaatttaaatttttgaattaaaaatatttttataatggaaaagatggaagaaaatattttaaattaaaaatatttttataatggaaaagatggaagaaaatatttaaatttaattttttatttgaaatatttttaaaatagaagttgaaaaaaacgataaaaatgacaaaaataaaaaaatgtaaggatttataacactttgtacaaattttacacaccattgctttcagcagcagaacatttagtcgccgccaccttttctgcttctttggttgagttttccgcttcatttgccgcgggcgattgtccaaagcctaaaaataattatttatgattttcggcaacagatattttacaaaattaaaaatgaaaattaaatttaacacattcttttttttaatattattgccaccatttttttgctgatgctccgttttcccagcggtgccgcccgtcgacgaatgtgccgagccggccgatgatgccgctccagtcaccgctccggcgccaacgccagcacgcattgcgcgtacgatcaacttgcgcattcgctcaatgatcaacgcgtcgtccttttcgccgggaatcaaatggagcagacgctgatcatcaaaatattttgcacttaaaaaaacagggtgggaatgtttaaaatttttttttaacattttaattttaattaatgatagcaggattaatctaattaatttttttataatttgtagcttaacaatgaaattgaaaagataaatcggtaaggtttaaaaaaaaatgcttcctaattacaaataatttgatcagaaaataatttaattcacctcggcaatgtcttttgcttgaactcatcgatacgccgttcaatcacctaatgcattttaaaattaaatttaatttttaaatttaataaattaaattaataaacacctcgggaaacaggccacgactttgcatatgccttctcagcacatcctcatcataatccaaaatcaacgccatatccaccggtctgacctgaacatattcaaattgatgagataataataattattgttagcagctaatctggcaaagaaacagaagccaatgtgaccagggttttacgctaattagactattacggataatcattatgcggtcattagcctctccaccccctcccccattctctgtggcttaattggtgtccagctgttgaagcaggtgagctcataaaaactcatgtccactcattcaaatttatgtgccgtgccgtctttcgtgccaacaaatccattaatctgctaattgctttttaattatttcactcacattgcgttcaaagtcctccacttgtcgtgcctcgcgcggaaagccctcaatgaaatacgcttttgcgtacggttggcggcccatctccgctttgactaattgctgggccaattcgttggggatcagctcaccgcgctggtagcgctcggccgccactcgccattccgatgatcggtccttgtagcgagcaatcgatgtgcggatcaaatccttagaagaaaaaaaaaggggggcgggggaatggattagacgaattcgcgcttttagaaccttttatactttttttttgcgcaataaacccataaaaaaatttaaattattttcaaattcgattgaacaaatatgcgcatttgagagtattgaaccgagttttaaaagtcatgctttttttttaccccaaaaatcgtgaaaataattgcttgatcaagattctagtcataacttttttgaaaaactttattacattcatttttgtgcctaccggcatgcaaatgtgtgcaagcccttcatcgcgcagctcctcctgcaatttggccgcgtatcgtgttttgccaccgcccgggccaccttgaaatatgttagcagatttaagcctcacgtccaagccctggcaattaaataaatacccatgaatagaataattggtgcgtccggagcaatgcaagcgtccttagccgcctgaactagcgagctgggccttgatgagttggaccaggaattgacgcgacttcttgtcccattctgctgctgagttgagctatacacacattgaaatgaattcaatcttagaaaatttttttgtgtggcaatgctttttaacatattatataactaatagaaccaattaaaaatttttaaataaaaaaaatgattaaatgaaaaaatgaaaaatttgtctgctttttaagttttaatttaaagaaaaaaaaagtaaaaataaaagaagaactaaataaatatatgtagaaaaagatgaaaagagatttttatcttcgtttaaaacttttagcattaattatattttgtgttcggacttgtaggtacttaaaaagcaaaataaatacataagtgcaaaagaattgctacgaatggtaaaatttgtgacaaaaatgcaaaaaaataaaaaaaaaattttgctcatcagcgccaaaaattttctcataattttataaatttaattaatttgaggacggttttgccgataggcgccgtcggcttaaagcattttccgcagaaaaatatggcgaaaaccgttgggcagtataattaacagctttattggtttcgcattgaatccaattcccaattagcaatgaaattataattttataattaccgaaataattctttttttaatttaaaaaaggtttcaaatttaaaacaatgccttttccgcgatggatgacttgcgtctctgctagctcgctttgacgactttggactgagtgccgtcgcatgtggcgctacaacggccgacgcaacgggcggacgcgctaaaattttaaaatttaaaaaatcattaatatttaattttggctcctaattaaattttaaaagaaaattgaaagaacaaacgttcccagtcaggcactttaagttggaccaaacaccgagaacgactcattaattatttaagaagattccaatggacaaaggcaatttgtttattaatctttaaacaactgaacatttaaaaaggttcagaatacaaattttaaattcttttaattaattttaaagatttcactagctaaggtattccaaaaaatctatagcagcatattttcaatagcgatgagtcaccggagaaaaatttggaatttttaagaaatttgaaaaaagaaaatttaaaataatgatagatttttaaaataaagataggctgaaataagttagaccaaatacagtacaatttcttaaaacgtatagatgatccgataccacatggtttaattatcttggcgagcattttttttctaattttctcgagttggaaaaagagggtgagagcctgataaattaaaaaaaaaaaatttaattttaaatattatgctttaatagacaggtatttttgttatttttgaggagttaaaggaacgagcctaaaatttggccaagacttgttcgtctgtccaagccttttgccacataatgtgacggaaacaattggacgaaggaaaagcacggcataacaataagcaaaaaaataaaatgtgagacaaaccatcgaccgggaagaaaataaaaaagtaaaataagaggagagggacaatcaaatcaatcatacaatgataaaaatttcaaaaatttatttattttagataattaaaaatcttcatttatacagggcgcgataaaattttacccaaatttttagatttattttttcgatattctcagtcccgcgccggatttgctggaccattccgcaacagcatttttattttggaaattatcctaattagtacttttttgacaaaaattcgtcataatggagattagcctaattagtacttttttgacaaaaattcgtcataacttattgaaagttgcctgctaacagagaattttaaaaggtgatcgaacggatatctaggattttgatttgattttctttaaaaaaaagttaaaattgaatttttttcgaaaattcctcccgctcatttgtcagtttgcccaccgccgtccgccgtttcattgtccgtcgattggtgccgtttcaccgcaacactttcctccccccgtttcttcttccccatattctcatcaacagctgaggaagcagttgttgtgccaatgtcgcctttttcgctgctgtttgtcgccgttttttcctcgctcattttgtttggttggggcggcgtcacaaaagaatccctcaagagaatattggatcaattaaaataaattagggtcattaaaaaagcaatgctaaaatgctaaaatttttatattttgttattttaacagtttcttattttttgcattaatataatgaactgaaacgtctttcggaacttaaaatatgtttttttaatagtttgacaatttgttggttgaattttaaaagtttcaagctaaaagcgatgaaaggataaagatgaatttatatttattaattctttcaaaagttaaataacaattaataataaaaaacaaaaaattaccatttaaatgccattcctggatttgttcgaatcttttgaatggcattctccaaaaactggatggggtcctctggcttgttgtagataaggccagccattaggccctgtggtggatggggaaggaattatttattcaatcgacagcattttgtatataaaaagaaaatgccaaaatggcacaaacaaaaattggcacagctggaagtttaatttcatttttattcatttttaaatatttttaattgtcataaattttaaattatgattacaattattagataattttattttatatggataataaatgtacctcaaaaagttgcgggatcgcatggtcctgcaaatagcgtttggcttcagtacccattgtttcgtgaactcgacatttacgtcttttttgtcactttcattaaatttttatggaaattttttacaacaaaatatttctgtaaaaaaggattaaatttattcttcctcaattaaataaatatttaaaatgaatagaaccagaagataaatcccaatttcgctttttaaaatttctatttttacttaaatttgagggttttcaacatttccccgttaaaagggagcgaaaaagccttaagcaaaaccataagctgctggccaactgtacacctccaagatgattaatatttttacgaatttggagctaaatgttttgccggctgaaatatgtcgcgtcccatcacaaaattccgaaatgaagccgtgaagtgattttgcttacgcatttaagctgctctgatgatgctgctaataggcacccgcccttttattggccgaggggaaggctttttgtggataggaaagagcttatgtggcacagccgtgggaaaagaggatcatcccttcctgtgcccatttggcaaattaaacgggcgatggggataaaaagtcggcacatttatttaatttataaatattagtgaggggaagggggaagcccccggggggggggggagggaagagaaagggaagtgcgcggaatatttcaaataaaaatgttggcatgggaaccacccgaataatctgtgcatataaggcaatcacaaaaatgaggaggatgaaacaaaaatataaggcggagggggggggggggaatgggaaggaatccagaaaaaaagggtgaaaggaacatggaaaggaaggaaaatgagaaattttaattaattataaatcctagactttctgctgggtttttcaaagaaaaatttggctttttttgggaaatcattgacaaaatcatagatttttgaacagttttgacgtcagtttgttgataaatggcctaaaactacccgagaaaagtgctttcctttgtcgggatcatgccaattttatgacgggggaggggggggggggggggacgggccaacagcgtctggccatctgcgtctgagacaactttatgaagccataacttttttctatgttggccaaatcaaacaatattggtatcattgggaagaactttgaaaaatgaatatttttttgtataaacatttggttaaaattattctttcagtagagtcttgagcctcgcctgctttcagattcctcgcgaatcgtttttagttaaaccccatattatccacaatttcttcaaaattggcatttacatttttttaaattttttgctttgccacaaatgggaattctatgtaaaaaaataatcaaatatgtaaaca

SEQ ID NO: 5838 - DNA, 3154 bp, Heterodera glycines
  unsure (1)..(3154): unsure at all n locations
attataccattttgttcacgttcggatggcatattcattatgacataacggcatattgggcatgaattattcccaccttgaagccttaaaaaatatgaatcattcgttcgtttgaatcatcaaaatttaataatatgaaaatataatccaattgggttttcaaaaaataccaagtgcttaggcaatcttcatgaaaaatatgctaaaaaatgaaattttaaattttttaaaattctaaattggcttaacattgcatgctggcaaaggcttcacacttgtgccactcggaattggatcgagacaaattgcacaatcgaattcagtgccaacaattgttgacggaatttcgttgaaagcatttaataagcctaaaaaatgttttaaaatgactaattgcccattcttaaatcggaattttaagcctataaaagtgtatctgtccattattattgacattattattattttgcaattactcaaaattatacgtcaaattaattatttaaaattcatataaattattttcgtacttattccattaattgtttgctgcgtttgatgaatcgccgccattggcgcccgattaaaaaattggttgattcgcgcatggaaaaatataaatccgagagttattacaaaaaccgtgaccaaaagtgccagtaaaattactaaagccacatttaaaagtgaaaatgctcttctgtgacgtcgaaatgagcctaaaatacgttaaattgcttcatcctgaaatattctcaaaagaaatgaaaaagaaattcggcacggaataaaaataaaaaaagaaaattttttaaatcgaaaaatcaaaaatcgaaacaaaaaattgttatgagtacaaatttctgtatataaattggtttggattaaatgggatttgaatgtttttatggattaactctcatggaatattcaaaattaattattataaaaatagaaattctaaattaatttattgcacgttttcgtctctttgccgtgccatcctcgcaaatttcaattgtttttgccacaaattgcaatttttgctttttcagtgtccatcggagggcctaggccaaaaacaatgtcatcagctccaaaaagtggccagtaccaatcatttgctgctgctggtgggcgaacggtgtcggccgccgctcttaaaacgatgacaaaagaggcggcggcggcggtgccatcggcgccggcaaaagtgccgtcgaggggtggaagtgagcgaagggaagggagcggaagcggagaaggtgtgggcagcagaggaacttcacaacagagcggcaacagaaggtcatccgcatccggcggacaatggaagacgcggaatggcggcgaaactggtaaaaaaatatatactgtagcaatacggtttctcgctgggacacagattatcatcttaactgaagttgctgatcataacagtatttgcgcataattcatggattggattgtgaatgaaggcgttatgttccattttttattacgaaataccgtgtaccgattttttccggattctctgcgtaaatctcaacagaaaatctgcttataaaactcggttaagtgttcgaaaatgtttaaaaattattggcaattaaagagatttttcaagtgaaaatcaactccctaaaataattagagtattttatttccaattttcagaaactcaaattcgaaaatcgccgtcaagcagtgccggaagtcgcaataatgaatcatcaaaaaggaatggcacttcacactccgcgagccaaaagaatgttggcactgtgccgcccaatgtgccgattgttctagtcatcggtagttttggactcaaaaccgaaaattttcgaaaagtgattttagcagggtttaatttgaaaaataaaatgcataattaaatttttttttaaataattataaatttgctttttctcagcaatttttttaaataaaatttaattggtttgaatcaaggtaaaaaataagcaagtgattgaaaaaaaaatcagtgacgtgtccaacagcgctcaaatggccaaactaagctttaaccaggctcttagcgccagttcagatttagttgtaggaccgtattacatttgtggaggattatggactttttttaaataaaaaattaacaattttgtttttaattattgttcatcaagaatcaatgtgttttcacaaggttcatttaaaatggcaatgaccaatgacggggaggctaattaacgaaaaagcattcaattagtaatttatttttgtctttaaggagcgccgggctccagcaaatcaaaatttgcgcaaaatatcgccaaaaaatatgatggattcgtgttcatcagcatgggcgaactgttgcgcagaaaagtgcagcaaaatggggagaatgaattgtgggcaaaaattggcaaaaagatggacgccggagaaatgattcccatggtgggcgaagtccaactttttttttaataaatatttattcaaatatattattaaaaattttatttattatactactcgtataaaatatggtgcgtttaatctgcaaaatttcattaaatttcaaaagttatgactaatgaaattcaaaaaattttggttttcaagtttggttgctttagcgtaaaattataagcaaaattttgtagtttttttaataacggcatagcacctaaaaatacgccttaaatggttgcaaaacaataaattttctattttttttttaaatcatcatattttaaggaaaacctcattttatttcgtaaagaaatttttcaaataccttttttaatctggcatattaaaaccaaaaaatgcactcactaatttactaattaatgccataatttgtaaattcactcactaatttattaattaatgccatcattagtgtgttttcgcctttgtcagagaatatgccgtgaattgatttacgcgtctgtccatgaacgctgtcccaacagttggggcttcgtcgtggagggctttccgcgcacgttggcccaggccgaggacatcgaggcacagctgggccacattgacttggcactgctcatcgactgcacggaacagttctgcaaggacgcgttgcgaaagcgntacacgcgggacaaggaggagggagcggagagggcgggtaatgggggaaaaa

SEQ ID NO: 5839 - DNA, 1172 bp, Heterodera glycines
accgctcttaaggcacttttgagtttcggtttcgtccgtcaaaaattttcgtttccttttgatttacgtcaaatgaaatttttacacccttaagagaatgacttttttggtaaaaaaatgatttcttcatgttttgtttttgtcttccaaaattttttcgtttcgttttctttttgattttcaaaacagcatctcactctttctctcatttctttctctacgtatctctcttgctctctatctctccctttctttccttacttctctctctcactctttttttctttgacctccctttctcgccctttacttttcctctcccttacaccctttctttatctctctccctaggtctttctctatatctcttcctcttaatctctatctttctctttcatcctttctcgtaaatcctctatctcccgcttcacaccccattttcactctctctctctctcacttcctcactcccctttttcttaatcactatctccctttctctcttaatctgttatctctctaactcaatcactatctcgtcttttttttctctccactccacctctttctctcatttcctctttctgcctctctctcctttctttcttctctttttcttcattcttcctccgttctctttttaaccttcactcacaattatttataaataaacaaaatgacaaaaccaatgccaattcaatcaatgaaaaatgcaaaaggtctcgttacatcagcagcgctagcaaagctcatttgtcagccaatcctccctctccgtctctcctcatccactcaataaacatattttctgttcacaattcaatttttatagaaatgtttatttttaaatttcaaaaaatatgtaatgtctgccccgtcaaaaatttaaaattttccttttatctcggaaatgattctcgatagcaactattctaaacaaaagctcattgccaattaatcattttaatggtgatcatatttttcaccagtttcttgctgactcccggaaaattgaactcaccattcaaaaggcaattcggtagagaatttttgtttattccaataggcttattcattttctctagaaagatttgcccaaccccctaatttatccgatttttagtgtttttggtggtgttcaggtcaacatgaaggagtgatctgatcaagtc

SEQ ID NO: 5840 - DNA, 4974 bp, Heterodera glycines
attaggcattagaggaggcaatccaacgctatccgccaaatccgtggtcagtgcacgcggccccccctatggctgtgtccatcacccaaagcacggagagcggcacgctctactcattggcacagatccgtcgcattgcgaacattgcgcattcgcatggcattcccttgcacatggacggggcgcgattcgcaaacgcagtgagaaaccgtagggacaaaattgtgcgtctaaatttttcggaattttttggttataactttttgtaaatttttttttactaaaattcctcaaaaataaacataaggctgccggacatttcgacaatgccgtttcgacaacaaaattaaatatattgttttaaatataattttaattttttctaaatgatatggacggtgaggatttgggagttttattaatttaaaatcaatttaacagagaaaaattttgttgacacaaaacccgaaagtaccaagaattttttagtcaacaaacaaagttatataagtttgaattatttgggatttttcggtgcccttagatttgagtttaaatcgggtcataaactttttccgcacattttgcatggtgcgcagtgcgcatactttcgatatgaaaaaatgaaaaggaattaaaaagcaaaaatggcaatatcgatgttaaattaatatttataatttatttagtttaaaaaatatatgatttaccctttcctttttacataatgaaaaataataattaaaattttgctaaattaattaatttctaattcttcagcgcttggcattttttttgtgtgcagattatagaactagattttttaacttttatttataaaagaattgaaaaaattaatatttcttacttaaaataattttcaatgaatttttaaacgaatgaatttttatgaaattttcgcttttcttttattagcagattttcaccaaaatgttcttagtgaagtttaatgtttaacaaaattttttcaatatcttgaaaattacagtgactttttgaaaaattagtaaatagaacaataataatttctttttctgttcataaaattctattattatattaatttaatttttatttaaatttatcttttttattcatttttattttttactagttttcaaaaactttgcaattttttcattaatttttcttagcataaaattttcgaatttttttaaattttagttagataatttttgaaaatattctaaaatattttttgattaattgggttagtattttatctacccatttgtttaatttctgagttttcattgtttatcattttgttcaattttcttgactttttctctctcttttttgtccgacccgtcgccaagtatttcgtcaaaagcatatagggccaaatctctcaattttcgagttttaaaaccggttcaaaaacaggttttttggcatttcgcaactctagacatttttcttgcttagtctcctcaagacaaatcgattggtatatcacttgaccctttttttcacggggcgttcactacagtttatcctaaattaaatttaactattaagaaatatttgtacagaaaataattgtttgtgattttatttcattgaatagatttgtttaattataatcattgattaggtttttattggctattataatgtttttacaacctaatatttcctaacttttcattaacaaaataaatattttaaatatttttaaattagttattaatttattaaatttgtctctaatcttttttttaccaacattttattatcatttattatgttgctatttaaagtttttatcattgattatgactttgcttaacgtaaattaatttggccattattataataattcattaaaaaacccaaaattactttggcacttaattatttcgtcactgattttcgggcttgcttctttggtttcaaaatattgctttatgttttttaatttttcctcattgaacaattattttttgcttgaataaataataaatcccctaaaaaatcacttatttttaaaatatttttgaattaattgtttttttcatcttcgaaatgtgtctttaccaatgctcaattccttcacaaattctttctgtttgcattggccatataaacttttaaattagggttgggcccccgaccccgaaccccgacgcttccaaccccgacaaccccgaaccccgacccttaatcacgatcggggtcggggttaaatatacacccctaagaatggaatttttgtgggggaaaaggcaaaaaagttataagaaatttgaattttttttaaccattttgccaaattttattaaataaagtaaatttcttttttttttattgtgtattgtgtggtatagtggttattgctttaacaataacaattcttttcttatgagttcgataccggttgacttttctttttaatttatttttttgtgattaatatagttttttaaacaaaattaatatttttaatattttttacaaaatataaaaaattaaattaaatttcacagaaattcataaatttttgctgaaaaactattagaaaataaagattaattttgacaaaaaaacaagaaaaaaacccaaaaattatctgaaattcataaattttttggtgaaaatctgttacaaaatagaccttacgcccctcaaaaaccctttttttaaaatcagctcaaaatcgaaaaaatttatctttttttggagaaaagatgttaacagacccatccaaattttcaaaatttttccagcggcgcctatcggcgccgccggaccctttctcctaaaggtctttagaaaaagagcgccgcgaaaaaaaagataatttgaaaaccaaaaagaaagatgatcagaaatttttgggcatttttttgaataaaatccttctatttttatttgggggccaggcgccggaggaaaaatttgaaattttgactattttacagattttcactgaaaattagcccttttaaaaatgccttatgcgattttaattaattctatactaaaataattatgaaataaaaaagcacataaattattaatgaataaaaaaataatataaagttttttgactatatggtataaggcaaaaattggaaaaaccccgaaccccgaaccccgacgcttgcaaccccgacaaccccgaaccccgaattttccaaccccgacgttgggggctcaaccctattttaaattcatcaaatcgttcaatgaattcgttctttttcatttcttaaaaactcttttccatctttttatttttttaaatttacttcatttttccatttgtatatattttttcgacttgcgcctaataattttccaatttttgactcaattttcgtttcattgtttcttttaaattttccttttgctctcaacttttctttaattgcataatttatgaattgtttctcttttttgttgatcatttgggtgtgttccatttttccactattttgattaatataattattaaattccgaatttttatttttgtcccatagttcgccgaatatttaatcgaaatttggtcggattgtgcctgtttcactattataaataagaaaaaatattataaatattaaatgccacaaattcatttttgcaattcggaaatatttatgaataaaataaattttataaatgttatattatatgaagattaacaaataatatatttaacatattataaaatcaatttttactattttttaattgactttatttgttttaaaatttttaaaaaaataaataattaattatgtttcaaaataatttcgacttaaaataaatgcataggaaaagaaaaatttaggcacaaattccaattttctggacaatttttgttgagaaaataaagttatctggaagaagtcaaacctttaataattcaagacaaatttttaaggacatgaatacttcatcaaaatttggttggattttccggtttcaattttttatgcaaagaaaaataaaataataacaaacagtaaatagcacaaattcatttttacaattttaatgtgaatttttctttgaatttcttaattttatagcttccttttcaaatataaatcaattaaaaatcaaaaatgatttgatttttcagatatgtcctatcctgttttggagaaaataattataaacaaaaattttatattttttcaaaatcttcctgaattttagggacgcaaaatatttaatgaaaaagatttatacaaatagcaaattaatgaacttttaacatttttgaaaatttccaaaaaaaattaagtccattataattgaaaaacttttgaatacatatataatttactttgtccattttggtgccataaaaattacattttcgaaattatgcaaatttctttctcttatggtattttggcatcaattcttttttccattttataaatgtcactgcagaaatgcccaattcctttgtaaattcgttctgtttgcctctgtcatataaacttttaaattcatcaaatcgttaaatgaattctttcattttctcatcaataattcttttccaaattattattttttccatttgtaaattttgacgattttcgcataatcattttaacaattttccttttaattttttgctttggagtggtaatttgggttttcttttttgctcgttttgctcaatttttgttggttttttgttaatcattatttattctttttcatttttgtcccctcagttgccaaatatttcttgaaaatttagtcggattttgccgtattcattccataaaacaataaatattaaaagccataaattcatttttacaattttgaaatatttgaataagaaaattccccggcaaatctttgtcaatccaccactcccttttcatatatgctgttaccgctaaattcttttcgaattggttatattttgtttttacaaatccaaataattctttataattc

SEQ ID NO: 5841 - DNA, 3902 bp, Heterodera glycines
cttatgcttcgctatttttttaatctcattaatcgatttcgtaccaaaaattccccttattttattgttttacctttttgtttctaatcattgtttcggccctttcagcacattccttcagaatttttctaatcaatttttcaatcatggcgcctgtttcttctgacggtttttccaccttttcaaaacaatattgtaaattttttccttgagataattaattaccaaaaagttttggtacccaatttcttcgggataaaacccatattctttgaccatagctgcagcgagctaaaattaaaaaacctcaatttatgtctaatgctactttatcatttttaatttaattacattttctcattttttaaagacttcgtagcataacgagtcttattcataactttttaatttttatatttttattaccgatgtagctttttttatgtcggtttccgatccgttgaaacggcggttataaatgacttcttcgccaatggctccagcgagtagaatttcaatatctcccaggaattcttcttttgacacgcaatgggtgttaatcctttttttttctgtctgaatattacaaattttattaatgtattttttgagaattttccggaaatcacgcccggaaaaatcacaacagtacataaaaacgtccatacaaacacaaaaagacaaaaacacatccggataaaattacgtccggacaacaatcccgaaaattttttgtcagatattggtgaaatatttaaaaaaaatttaaagtctaatctttaaaaaaaatagtgatcaataatttttttaaaacccacgaaaccactcccgtcgtaattgacggtcatttcgacagggtcacaataatccgaattggacattaacacggcatggcacgcttcatgcgtaccttaatttttagaaaaacgacaaattttagttataaaatatgtccaataaataagaattatttaatttaatttacaaattaattttttttcaaaaattgttaattttgtcgattcttgtcggagtccaactgtttggactccaatgtccctctttcccaaaatttcaacgatttggtcattttcatgttgaatttgttgtagaccgatttcaccactctttccgtcaatctaaagtttttaaaatttgttttttttcatgcctttttagtacaaattttttttgattgcttattgttttgacagcaatctcaaagtcgtcagtaatggcggttgattttcgctttgagacgacttcgagaaaggcgtaattgcagacttcgcgcaaatcggccccggtcagaccttcttcctcgcacaatttggcgattttttcataatttaaatctgccttcggaattttttgtgcaaaaatttccaaaatcttaaaaaaaattgtgatttaaaacttagaaaaaaatttttaattaattcattaatttttgtatttagctattttcgtttttggcattttacgttttatcataaaaaaatttttgattctaaaaatcccaccataaattttcagtcttccctggggcgtttatttgcaacgaaggactcctcccatttcttttataaatagaaaataatttttggaacttacactttttattgactcttgatttggtgcaaacatttttatgtagtaaaattttttaaaaaccgctggcaccttaaaataaaattttaaaggctttctaaaaaaacttatcatattattattattattattgttattattagtaatttttatttcttcattaattgttaatttcattttctcacaataattttattatatgcttatcaacaacaatattttaatattaattaggataacataatgaaaacacaattaccttgtaatcagatgtgctgattttaacaattattttaattttcccatccaatgaagaaagcaagtcggcttgaatcatatcttctaaaaaagaaacaattttgtataataattattattattttattcttcattttgtatttgtattctattatttatttatttattttgtttttaaatataattatatttctataaatttatacccatagcttcgacattttcaaataacagtattgttcgattctgacggctttttgccaaatcgataatttcttttaggcaattcttgttgttttgcgctaattcaacgaaattaatccaaattatctctgccccatgttttgcagcaaaagtcctataaattaaatatcaaaatttaaattttaatgttaaatcaccggactagcagcgttttgccgcacccagccgggccaaagaggagaatcccctttttcgtcgtaatgtcattatccagtaataattgctggttatcaaacggcaccccaaaaatctggaattttttgaattttaccttccctcatacatcattttttaattcaattaccgtttccagttctttaatttgattttgatggccaaaaaccttatcatacgataaatcttttggcttctaaataattggattttttaatatttttaaaacaaaaagttacttcgttttttaattttagttgaccttcttttcttttttcaacgccagtttgttgaaaactcattttcttaaaaatgtagtaaatatctaatttttttttgaaaatttagctattattatttttttaaaattcttccacatttcttcgtaatagttggaatagatttattaattatttattatcagaaatatattttgtttattataatctgcatttttggtttatgtctggccaaatttgcatttatgattaaaaacagatgagcagcgcttattcatagtgttaatggtataaaaaaaatctaaaacataaataaaatatcacgttttaatttattatgaaaaaataaaaaatgtgtttatgaataatgttgatcagatataattacattacagaaatataaatgaatgatctcgaccgcaagcatgttcgggtattcgtttcttgacactccaacatagatacattgcgctctatcagcttgtttttcaccattttgttttggcgctgagtatcaccgagtgactactaactgctgcaaaaatccaacctgctaagaaggattaaaatctttaattacaaactatttgtcttaatcataaaaaaataaaattttctttttatcaatattttttatatggtatttttttgttgatgttgttgtgatcactaaatggtaaagaagggtccattaaatgtaatttaactttatttcttattttggcaattgttattaaaaaagaggtttttaaaaaattatagagaaaattaatgagttctcaatgaagtttctgaaagagcatgcatacttcattctataaaaaaattgtattttattttttgatcattatcagttttattgctaattttttaaagaatatatgattggagacatacgtacagagaccacatatgcgtttgtaatataatttttttagctatttatttacaaaatttcttttttcaaatgcgtctacggcgtggccggaaaaataagggtcttacattagccaaaaatagtcaaaaattttttgcggttttgagaaatgcgcatgatgaatgatttacgtgataggatctatataatactaaattttcacatttccttccaattaaatttttccttattagcaaacaccctaattaatgctcatttataaatatttttatatattttatttattttatattggcggttccgaagaaaacatggatttcagcatagaaaagaaggacgaacaaaaaaatttgaggagaatttcataaaaacgcatttttctcatcggcatcgtttaaaaccgaaaaattttgatacgaatcttctaaagaaaaaaaaaattcaaattctccaagctg

SEQ ID NO: 5842 - DNA, 3486 bp, Heterodera glycines
caaagggaagggattaagcaaaaacaattaattaatcgattaaccatcaaaagacgtttatttgaacattgcttttaattgtgtttatttatccttttcagatcagcatcaatgcccccggggttggcccgcggcgggtgatcaatgcgttcagttgcaatttgtgccgactcgacgagaacacgcggaagacaaatgcgaaagtatgggggcacaattagtcgatgtaacggacggagaaggcgaattgaacgaggcgatggtggaggacctatcagaactgcttcaagtaatttagggaggggaatgagactgaaaatggctttttggaggaatcgctggaggcaggggtcaacgaactgatttgggtggtcggggcgggaaagtggcgatcggagtgggacgagtcgggggagagagtgcgcttcagccgcagagaggcgcaacagcagcggcaggagggggaggaggaggagggcatggagaatgtgttggcactacaaaggcgagtgaggggcggaggggacagcccaaaagggggccccgcagggagtcactttgaaatgtgagtcggaaggaattggcaatggcacaatgccgaacgcacttttcggtcagtgttctgctccatcctccctctgtgcaccctttcatttgccaactttggcccctttggcgccgtttgctgctctatgaacagtctctgctccccaaaggtttcgcttcccccccccccctcctccgtttcattcactttcttctcaatccgctgaaggtgcgcctctcctggaagagcagccgcgtccctcctatttcttcgaccccaattcctccgcctccaattcgtcctttctcagtttgccatgttccgcttcgggcgtgccctccccgacggtccgttggtttcgcaacggaggcgaagaggtcagctggcaattagcatttcgtacggttcggcaatttttgcctttctttcttcctcagattgacttccgcttctcctctttcattctctccgccggtgctttgctcgtccccgtttctcttctgtcccccgtttctccctcctccttccattgctccgtttccaattctttcggtattttcgacttttctttttctttcgacttttatttcttttcttttaggaacccttcgtggccattcgaccatcgttcggcccgcattcattgagccctttcaggagatgagattggatgcttatccgttgatggggcacggacgaagagcgggcggcacgcggttggaatgcaatgcaccggcacattacccaagtgggaaattgagagggggggagagggaagaaagagagggagagagagaaagaaagagaccgagagagcacgatgaaaacccaaaagagagagagagaatttaagaaaaaaagagaggggagggagagagaaagaaagatagctatagagcacgatgaaaacccaaaagagagagagagaatttaagaaaaaaaagagagagggggggggggagggagaggttatgaccaaaagttacaaaataacgaagaatggccgaaatttttgcctttttctattttaactagagttgtacgggaccgggaattttgagaaaaactgggatcgggacttctctggttgaaaaaccggtactttttggctggcaaaaccgggaaaaaccgggacttagatactcagttgtacgttttttcagtaccagtcccggtcccgtacaactctaatttttattttttgacgttgtatatttatcatccaacctttaaaacaaattatttgtgtaatgtcattcaatatttttgttcagtcatatttatttgtctgatttttgaatttgaaaatttttaagaaaataagtaaactttttacatcttttcctttctcgtcctttataaaaaaaatcttcaaaaaacggaaaaatttgaagggaatcgaaactcaaaaaccgagattctcgagcagtctattgctgaggaatggtaagcaaacaattaggaaagttacatcgtaagctaccgtatcaatgattacattttgattaaatactttttgttaaattttgtctccaaatattattatttaacaaccctttgtttgcttctgctattccctcacttcgtatgcctttgtttttctctttaaaatgcctttttcgatggcattttctttctttgccccctttttatttcccttctaaacaatctctcctctcattcagtgcttttccattgaaatgcttttcctcggggaatatttcttccccgacatttccttttcgacaaatttaatttgtcctgctcattcgtctttttgcttcttttatcctcctcgaaaaattcaattcatttcttctttttcactcaaaaattcatcccttcccctctctctccctcttccctcgttctctatctccctttttctctcttctcccctctctctccctcttccctctttctctatctccctttttctctcttctcccctctctctccctcttccctctttctctatctccctttttctctcttctcccctctctctccctcttccctctttctctatctccctttttctctcttctcccctctctaccctcttccctcttcatctctctccctttttctctctcttctcccctctctctctctccctctcccaattcccctcacttcccccccccccactgcaccaaattattcatatgcgagtgtcagtggtcctcatttcttcattttccatttccattgtttcggaaatgaatttttccagttggacgactcattgcatttgcagccggcggcatttccagctgagtaaccgccgcatcacttaacgcctcgctaattgcttcggtgttttcggcgcgagtgccgaatatttgcacattctttagcggcatttctgtagcactttctgtgccttcttagaacgcacccaaaagtgtgcttttccattttgcttttataataattattatttttggctttctttccctctctctcctctttctcttctcctcctttcccttctctcccatctccccattttattttcgctttttcttttctttgtgtttcattcttccaattccccccccccccctctttttccattaacccaatttccaaaagtgcatcggtagcaaaagcaatttaagaatcgccttatctccccccccccatctcttctgcttttttctctctcatttatttatttttttaatttacttttaagctctcttttcccatttttcaattttttttcttttattactttaaatgcttttccatttggctgttctcacattttgttttgtgtcctcaggcaatgggtaatttcggcggttcattcgctgagtgaatcccgtccgtaagcaaactaatgaatgatccctcctcagactaacataagtcacctgctgctgtccgtccagtatcagcttctttttcttcacgtcaatctttcgctttac

SEQ ID NO: 5843 - DNA, 3384 bp, Heterodera glycines
caactgcatccaatcctcatctcattctcatcaattcacacctccatctcccttccactttcctccttctccgcctcttcttccatttcctcctcctcttcctcatgcgtcttccgtctgtccatttcatcgtcctccttcctcccctcccgcatccattttttcatctttctttcctatgcttctctatcagcggctcttcctcttccgcattcttccacaccactcccctccccccttccctcaccactcttcctttctcttcttttcccaatgaccgattacacaagtactcccccccctttccccccatttgcgcccatgggagggaacaaaacattcgcattccatcccaaaccggttcataatcaaagcccccccccccctcccattgcattcgctggttcgtctgcctattgcagcttcattccccatagcattctctcccccctcccctttcgttttgcttgtcttccctctccccatggcttttccccattcctcggcactttttctcccaaatttccccctttttcctctctttgtttatgtgtttgtttggtttcccatatttaaggtgttccatttctcaaaatgccacttttctcctcccttttgccattcccatggctttactttcgttccatgctccgaattcattccttttttagaaatgtgactgcaaaattgacttccgctcgacgatctctcctccccccctccgtcccttttcatttttcccatttctccttgggtaattattccgattggcacgtgtaccatatcaccaacacaaacggcacaactcacaaaatggcaccaaatgtactgatggacaaaggagggaagggcagagagagaaagagatttggaggtaagggaaactttgggtacacaaattgaattgatttagcactgattaagcgggtgataaactgatgaaaagtgaactggcaaaatgatcagaaggaacagaagaaacagcgccgactgatcagctaacaaaggctttttggaatgaatgatcaaacgccaatggctaccgttttggtgtcctaccgtaggagcgatcggtccatcgatgtgacctccttagtgattactgtactgtatcttcccctccttttgttcaccattttaccgcactcatcgcacttcaccaacacactgctcatttctcggcacggcactctgcactgatcagtaaagcatagagcaatactgtatactcactttacttttctaagcattatttttgtttctaagcaatcacccatttcgatcacttttgccgttagtcactcactttgatcactttgcttctgatcactcgatctgatcacttcacattttcacagtcactttttgtttgccatttttagtctatgtcactttttgcactttggtgctttggcgcacgtttgtccacacattctaatgctttacacatacacagttagcatgtcaaatgcagtgtttttttcactgttaacaataccgtaagcacatcgcattgctttacagtacccaccaattgcacaattttcacctcacttccctctcacttttcacattttgcattttttttttttgctcaccatcgcctctgcacaattaaatatcacattttgtaattttcacttttgaaccaaattttttgagtaccaaaatgacaatacagtaatcaaacgacgtattcatttgtgtccggaaaaattgaatcgaatttaaactttgaataaatgtgaaattttcaaaaaatcaaaaaaaacttggatgtaaaagtgaatgatgtgagggtttgaaactgacgagaatagggggggaggagtcactcattaagtaattgatgctaattaggaatgttagataattttttctcattgaacatttaattgctttcttagagtctttcgcattttcgtgggtacgcggcggaaactatgggaaatttgttgaagtttctacacgaatattcatttcaatggacggcactcttttcttctcgtataatgtgcgggaggatgaagacaggtgagaggcagcagaagcggagaaggaaacagctgatcagggtaactgatcagagcatggaaattgaccagagtaactgactgatcagacaaactgatagaagagactgataggaaaaatctgatcaaagcaatcgatcggacataatcagggcaactgatcagagcaactgataaagagattgaatatctgaacaaagcaattggtcagagtttcatctgaacaactgatagatgtgactgataagaatatctgatcaaagaaactgatcggaacattatcaggggacaattataacaaatgatcagatggtgatcattgtggcagatgaacaattagaggcaatagacaattagcagattaactgttagtatcaactgatctgcagaccattatttcttattcctgatcatggtattctgccatttgtcaatttgttttttcaaaatgcttttcctttgacttttcccagtttcgcgtgcactttgtccctcccggccactcagtccgcccaactcggccccttttttcgtctgctgcttccgctcggccacatcagtccaaatttgcaattgcctcgcggcaaaacacttcaccaccatcctcatgcgttcgccccgcgaattgacgagtttcaaccccaaatattcccggaaatgccaacacgtggtgacactgtgtttttggagtgttttgcctacggattgtatgttttagaataattgttttaaaggattaaaataaataaaaataatttataaataaaacgccatttacgcaccgtttcattcagtcccgtgccgacttatcactggtcacgtgtcgatggttatcctttgccccgtttccgccatcgtttgctcagttttggtcgcgttctccgcctcgaccgtgccgaaattggcgactcgggccgttaccgatgctccgtacagaaccgacttggcatggacagtgccgagattcggctgaccattcattgttggttcaccagtgcctcttcgtccgcttcttcaaatccattttcagcgcctccggtgctccttcgtccgctcattagccaaatggtcgcccccggtcagttgacaaattgcaaattggtttcttattacggggcgttaatccatccaatgataaatgattatttgatttgctcaggccactccatcaccttcaaatgtccaattgccgatggtgtcggaatggtttctcaggttgaatggtttctcaacggagtgccattggtgccgttgttgatggaccaaagtgatcggcaaagattcaaaatggcatctgatggacatgagtatgtccattcaaatgtgactaaacggggtccctccccgtttg

SEQ ID NO: 5844 - DNA, 2399 bp, Heterodera glycines
catcggcagatgttttcggggtcgccttacatctcttgccttcaattttgcttttccttttccaaggaatgggaagagaatacacagttcgttgtccgtggacaaaaccttcaaatacttcgatgggcaattggaaaatccgcacgaaatcgcccaaatcaagggcaatggaccgaaaaaccgtcccaacatcaccctcacagacttcaccttccacctgcgcaattggtccttcgacacctcgtgctctcataacagggtgccggtggacatccataatttgttgtgagggcggtcattattgttgtaggcatttttcaattcccatcgccgaaggctccattgtgcaatatttatgggatctaatagcctgattctcccctgcagttttcatttgttataatcttctaggaatttcaaaaaaaaaactaacttttctttattaaggatattatagccttccctctcccccccccccaatccccacagtggtttttggcatttaacccattgtttgccattcttcccaggccatgtcggcagattcgcgtgtcattcgctgttcggcggtgccactgccgagttgcgtcctcagttttcttcgttggcaatttcagtggatgagattggcacttcggaagcgaaaatcagctggcgattattgggaaaaggcacaaaaaatggggagaaaaacgcgcaaaagcgacgacggttttatgggaataaagtgagaaaataattaaaaattaaaaagaaaagtattctcaatttatttgtcctgcattcttaaaagacttttaaatttcattttcagtcagaatttgcccaaaatcacaatgtttttgtcttggaaattcgggcaaaaagagagcgaagttggcgcactgtgaaggaattgcgaatgacgtcgacggaccgtccgaattgggcggggcactttcgcatggacggattggaggcgaacgaacgctatcaggtgaattttgccaaaacggactttgatttggtaatggaatggtcgctccagttccgattgcgacccttcggcgaaggatcgcgtgccgtcgccctttcgcaatgggtgcgcacggagcaatcggtgcccgtggaagcagtccggcacattcgcttccgaatgttggacgacacgcatgtgctgctcgagtgggagccggtggagaaggtcgtgctgctatccttggcataaaacaatgccatccttcgacagaatcatcagtcggcgcccgatttacgatacaatgtcacatggaacacttttgggatggcggagggacaaagcgatggcaaaatgcaaagtcgggcggttaatgagccgcgtctggtcatttcccttccggcacaattgggcggagcaaaaagggcggaatgtgccgttttggaagttggggtgagggcagagaatgaacgtggcccgagcaaagagagaacggacacaatgatacgaacatcgtcaaaaggtgggtggggccaactgaagaaattagttaattggataattagagtctaattaggacaagattgaatatgttaattaaggaggcaattggcaatagactaatttattttctgttttagaacctcaaaggtacgcagtcgacctgcgcttggacagtgtcaacgcaacgcatttgaatttgagttggaattggcaaaatgttgacccatgtgagaatgcattaggagcgaaagtgagagttaattaataatggttgaatgggaaatggagaaagaaagttcagataatgtgcgagcaaatcgaagagggcaaagggaacagaaggaacggagggtgggtgccttttatgccttttatgccttcgtttttcgcttaaatgccaaatgcgagtgtccgtttcagtcccaattcgactctctttcgaaatgattcggcgtctgtctctgctccgccctttcagtccgtcccttcccattattcccattggctcgtccattcgctcctccctctgcgcgaatacgaatgtcgcgtggctgcgtttgaccaattcggtcggatgggcccaattcgcaccgacggagtgagagcaaagacaaaagagagagcgcccgaggggaaggccgaaattaattcaatgaaagtgggagaaaaggtagggaaagggaaaatgccgaaaaggggagacaaaggcaatggcattttggggcaacggaacgtacgcacttttggtggattggaaggcggtggaactgacaatgagactgacggagggagaagcagaaggaggaggaggaggaggagaagtgaaagaggtggaagcaatgccatcaaaagaggaggaacggtcatgggacagagggtacaaagtgagcggaagaaagaagaaaagggcgggagaagggggaagagaagggaagagagt

SEQ ID NO: 5845 - DNA, 1381 bp, Heterodera glycines
ggacaaaagcatagaggagaagaggatgaaaagaagggcaaaaggaaggggaggggggaggcagaagaagccgcccgattttggggctttgtaatttgggaacccgacatttggtgactcttttaaaagcaaattgcgcctacaaaaaattgtccaattttggcaaatatatgataataaattaaaatcatttttttgattgatatttgtccgattttttaaataagaaaatccctaaatgtcattttgtcctcaatttgtttctcatatttttcttttttgtttagctttttgtgtacgtatctgaaactgctgaccaggtgtttttccattgcaaataaatcattcggcaaatgccaccgttccgttcattttcagcccattctcctgaggttggcagaagcggagctgaacgacccacaaagaccgtccgcacgaattgatggccttcggccgatgtttttgtacacaattcaggtgataagtcaacataatgtggactgattgacgagagattaacggtttaagagaaattgaatgattaattggacaattattaattcgaattggcctaattagtcactcccccaatgattgccataataatagtccattcatcgtttttccttcccgtcagatcgccgcattcaatcccggcggcgttggtccgttcagtgagcgcatcccggtcagaatcggtgcgagactcaagcagaacccggatttggtggctgagatggagggcagcggcgcgacgccaaacggcaaaatgcggcgatcgctggcgggagaagcgctaatgcgatcgctgatcacaacggccttactcatcaaattgtgtcgttggcattggaggcggtgaccaccgatcgacgaaatgagcagcgatcgcgaagaaaagagatcaaaagatggctaatcactttttatgcaatcacttcatttcaaattcattaatatttttttgtttatttactgacaaaaaatcaaataattaattatttcgatgggaagcgacggttttggtgaagtgatcaacggcggcttattcccaaactaatttcttgagaaggccaaaaaactaatgggtaaatgagttgccctgtgggagaatgactgatgggcgaaggcgacgtgtaaagcggagatttggataaggcggaaagtgatcagagagagagagagagagagggaaaaggcaacaatctgacaactcctctgctggtgttgatcactactgttgctgctgatcgacttatccgacagctccgtcctccctccgcgctgtcgcgcccgccgtttgcgtcgtctgtcggtgtgacatgtctctcccccctcccacctccccttttccctccgtttcgcctttccccccttccca

SEQ ID NO: 5846 - DNA, 2516 bp, Heterodera glycines
ctaaaaaggggtcaatggtaaagaatttattttttcgctaaaataaatggtttttttctaaaaaaataacaaaaaattcattttgctatttttatgtgattttcttttaaatttattgaaaattatcatcagcaagacctattgggaaaaatttaaaaaaacctaatgattttccaattgctttttctggcattttttggagcaatcaatgataaaacaataaaaaaaaacgccaaattttccaatttgcccactcactctgaatgaccctcggagcactgagttggccgtgtagtcgtcgtacagtcgtgtctgaatggcctccaaccggtgaatttggtcgtccgcactggccaactttttcttgtcgtccaccgtgtgttcggcctaaaaatatttttttaaaccaaaaaaatttttgtacggggaggagacttagacgggatgggggtgtaatgtacgggtgggggacaactaggcctcaagcccgtcgtatacggcgtataactcttttcaatagttgtcccccgtgaaaaaaaaattttttttttgtttgttaactttggatagaaactccagccaggctcataaaaaatttaattgtaagctaaaatcccagaacctgggcctagcaaaaacaaagcatagtccagccagactctaactttttttttttcaaaattccactccatccaaaccaaccttgaacattgcatcggcacccaatttcaaactcattgttcggtccaccggtgccaaattgtcaattgtggacggatcaaagcgaatttcctgacgacgaacgccctccaccaattcatagtcaaaattctgggaaaaaaagttgaaattaatagtcttttaagttttgatataatttttaatatcaaaaaaaaaattgccaaaatagattgggcaccattaactttttacctttgggtctgtccgaatggtgaaatagttgtcacacaaatggcacttcatccggaactcgtagattggtgttgtgtaatacctaacaaaaatggaaagccattattataaaaaaaaactgtaaaaaagcagaggttttcattttttgaaagctccttcataacagtcccacccctctcccctaaacaaacaaaaaaaaaattttttttagagggcttacttaacatttttttttcaaaaagatttactttttaatatgaaaatcaatctaaaccttaggaatacatcaaaactcaagtaattttactttactaacccttaaatatcctctaattgtaagagatttggtcatttttttagcccctaaccctttcgtcgaaaattgggaaaaaaattttttgttttgttccgcttacatgccaactttgcgcttctccgcgttgtagcgcacgctcatgccgacatggttgttgcagccgaggcaccacacattgaacggcatctcaaagctaaaaggttggaaaaaattttctaaattttttccaggtataaaattgtgtccgcgtcttaccgaatggtgaggatgccttcatttgcacgcttgccacgctcgcgcagtgcatgcacgccatggtaacggttaagcgttttgtgcgtttgataattgaagtcgggtgggtaataatgattttgtcccttgcgttcacccattttttttttcaaaaaatcagtctaaaaatagaaattttaatgattgattgacaagaaattaaccaaagataaataaaataatgtgttagtgaagcttttatgttaaaggcaagagctgtggttgtggcttaactaaatttttcattaatataatttcgtaattaaaataaataacgccaaaatttgtaaatttaaaaactataaaggcaaaaattaatcaagttttgagtagagttgctcggtaatcggtaattgcaaaaaaaccggtaccggtactgaccggtactgcaaaaaccggtaccggtaccggtaccaactttttccaccggtaccggtaccggtaccggtaaaaaccggtaattttccaacgtaaaaatttttggacaaaattttccaaatacaaaatttttattcagttttcgcgcgagtacctgttttttagcattagaattgttcagaagtatatgtatattcaggttgaccaagttttttttttcaaattcaggacatagaacactaaaattcagatatagacctcaaaattcagattattgcaaaacaaggggtcagcagccaattttctaattttgcgaagggtctccggccatgtaaattaatgtaaatcaatgaccttttttgctttcaacaccgcttttttcgcggcacgtttttctcaagacttttggggaacaaggagggccggcggtgccgataggcgccgccgggaaaaattttgtaatttttaatgcgatttgttaacagaatttgtaaaaaaaatgaccaattgattaagttttgggtttttaggatgcttaacatgaaagaaaaaagttggaatattctttaaaattaaaattttaattaaaataatg

SEQ ID NO: 5847 - DNA, 1237 bp, Heterodera glycines
  unsure (1)..(1237): unsure at all n locations
tcatcatccccgaaaatatactgccncanccatgttgatgcgccacatttttcctgagttngaaagcattttaatgtccgaattttttttggcacctcagccagcgaagtgcggcattccgttgcaccacaccctnttgggtatttccagtgcgggtcgtccaaccgcagtcgccattttgcaggtgtttcagcgcacacatggacagcataaatgccaagccgtgcaaccaattggtcaatgaatgctgagggagtcggtgaatccggaaatttaataattttcagatttttttttgaaatcttcggcacaaaagggtgataattatttttctaattttggttttttgtttgtttgggttaggaattcggaaaaaaaatcccgaattatgagggaccgaccacattggatttttaataattttcgaaatttcgccatttgcaaatagcgcgaaaattttccgcggcaaaaaatggcaattttcaaatgccacggcaaataaaattgtttttttttggcagtttgtgggctgctgaactttctcttaggtcattttcttaatctaactcaaaatcggtctatttttcgactcgggcgccgatttcccaaaaattcgcattaaaaccaaaaaatatgcacctcaacaagtaaccagaccaagttgggcaccgcggcaagtgtttggccaagtcgggtgaggtcggctttctgttccgggcgtcgaacggatggagtgacgaaaaaaattggagggggcctcgaccgttcaacaaaaaaatttggccgccactttttgttttcgtttagggaattgccaatttccgatgggcattggcatgacggcgtaaaagaaatgttataaaatgtgaaaaatgccagtaaaagtaggacaaagaggaagaggcgaagcaggacgaattttgtgaacaatcttcgaagaattcgactcattcaatcagcaaaaaacaacttcagcaggaagaaaggcattaagcaaatggtcgccctaataatcatatttttttctaaaaattatgtttatccctgatgaaatttatattttctgacataatatattgtattgtgaacattaaaaaaacactttatttttaagagctttttgtccgtgcgtgcctagtcaaaaaaacataatgccaaatttttggctcttttctctaaattcaaaatttcattgaggtcccaaacggtgaattggaagctgtggttactgtagtaa

SEQ ID NO: 5848 - DNA, 3777 bp, Heterodera glycines
tttttatgtttttataagtcgctctaaatcaaaaattgttcggagaaaattgtaaaaaaaaatatgtaaaaacataaaatccgatctatattaataaaaatgaaaaaagaaagtttttgaaaagagaaaaaaattaaaaataaaacaagaaaaattgcataaagaaagaatttttgattatttaaacacaaccgaggcaatgaaagttaaatttaatattttttctcgataaaaaatttcatatttaaaaattttccttattcgaaaaagctataaaatattttaatattcattaaataaacaaaaatgagttttttttgattagattttacgtgttttcctctctaaaaatcctttaaaaaaatttttaaatgcctttttcggaattttcgtgcgtttttttcaattttttggtgcctattatagtgcctttttcgcgattttggtgcctttttagacggtctctaatcattaataccattatttttagaatatgttaagcattgagccgcaaaagcgaatgactgccaaaggaatcattgactatttggaggggaaatgtaagccaaaggaatatgagaaaaacgcagaaaaaatggcattgtttggcgatgtgtcggctgaaaaattgagggaattgatggaaaaggaaggatttaagcgaacaacaatgaaaaaagtcaagaataatttaaaaagtgccgaagaaaatacaaaaatatttatgcaacagttggaagaacgaagcgaattttgtgagaattaatcgccgtcctttgggtcaattgaaagagaaacggcacaacaaacggaccaattaatttaatattgcaaatttcagtttcaatttggcaaaattttccaattttgtcattttctaatttattgacttgggtggtcatcccattccctaatccctttcgtcttttttctgagagcaactcgctcaaattatcctttcgaatcgtaagtagagttgcacggtaatcggtaattgtaaaaaaaccggtaccagtactgaccggtaatgcaaaaaccggtaccggtaccggtaccaactttttccaccggtaccggtaaaaaccggtaattttccaacgtaaaaactgaagatcggagaacaccaaacattgctcaattccatttttgataggcatattggattcctttgatacacaaaaagctaaaaattatcattttccttccccattttgttaaaatattgttacttttaatatttttcatcaaataaacctttcgaacacaaattaccaactaagaattatgtttgattagatttgatcagttgggaataaaaagatttttgaatttggcgccctcgtttcaatactcatttttttttataatgttaggcaatttttgtcaaaatgatgatatatgtatgcactttaaaatagttagtaaaaataataaaaaattgttaaacccacgcggactcgaaccatcagtcaccacttcgccatcgtgcaccacttgaccaccatcacagaagtgaaaacacagccaaatgttcgatttttgaggccccataacttttttgttttcgctatcggccagtaaaattaaaaattcacaatagaaatcgaccctcctctatccagtggtatatcacacatatgcattttccgactaacagctcgcgaggttcccttgttaaacatttaggccccattaaacttccctaatgtgaagaatttatcatctctatctcacgccaaaatataaaaaataaaattgttaattaatttttaaaataaaattgccacaaaatgtaataattattttgtcaatcacattaattaatgcgcagcatttgcacacatcaatcaactcgtaatgtcgtccgacattattgtcacgacgcttgttccattactttgtgtcacactttcactgctttccttctgctgctgctgttgttgatgctttgtccgttgatgcattgtccccctgcttttcaacatgttcacaatgtcgtgcatttgttgcccacgcgtttcgggcaaaaacagccacaacggcaccaagcagcacaatgatggcacaatgtacagcgggacgaatgcccacgcgctggctttgcgaaagattagcggtgttgcccaacttaagggattggcaaacaaatgaatgaatgaatgattaaaaagggggggggggattggaattcccattttttagtgccatgaattcttgtaatttttacgacggggtatagtaaatacggcatttcgatgccaaagatgataattttgagaatttttgaaaaaatctaagggctaaccaatattcagagatatggataggcgccctaccctggttaaaatatgtcgtaatttgttaaaaattgatagaaattgaaaaaatatcccattttctttatcaaaaaaaaaaatttgttggcctaaggcgaagtccgtactcagtccagcaattagcaaactgactcaaaaatgtatgtgctaataatgttagcagcgaacaccagtgagataagccaggacgaatgtggcgacggatggggaagcagttcggcgcaaataaaataggacaaagggccaagggcaaagctaaaaacgaaaatttaaaattttccgacagttttttttttgccgaccccaatgaaatggcgaacagaaaaatgcatggaaggcacagccaacccaaccaaatggccaagtgttttgaggcccaatgggaagcaatgtacagacataggaagccgatgttgagcatcgcggaacgaataatcagcggacgacggttgagcctagcgaggggggggggagggggtagattttttaaaattttcctaaaaaattaaaaaaaaaattaaatcatgtacttcaagatccactattttggagatttattttgacattttgggtatgcatggccatgattttttttggccaagaccatgggccataaaaacaggaaaattgaaaatttcgttcctcattaaaccaaccgagtttatttttttagaaataattttcggattcgcccaatttctgctgaatttatagaatgattaaaatataatcataattttttacatttccacaaaaaataggccggtgagtgaagaaagaaaatagacagccaccagcacataggaaattggctaaaaaaaattggaaaaaatttagtttgacaggacaattacgacggtatggtacttcaacaacagaaatgctgaaatgttcggaaagtatttcagtggacgactcgagcacgggccaaccaccgacagtgatctgtgggggaaaaaaagaatacaaattaaaaattcacaaactaagaattttacaaaaaaaaaaattatagaaaaaaaattttgtaagaaaatttcataaaaaaaatttgaaattttctagcgaattttttttcaaatttttatgatgaatgactaagtttttaaaaaatttccaaaaaaattgctgaaaattttcaaaaaatttcatgccactgatcaaagaagttggaacccaatgtgttttttaatgcattctttaggatttcttagtataaaattcttagtacaatatgatcattgatcactaattggagacaaaacatttgatcagagggcaattttttagcaaaaagcaaaaaaataaattccgatcactagtgatcggaacaaatgtctatcatcctgatcatttaaatcgtgcctgaagtgtgcagaagccgatcagcacagcttttcggcgttcactccgtgcaaacaattgacccaaaattcctcca

SEQ ID NO: 5849 - DNA, 3572 bp, Heterodera glycines
tttcaaaaaatttgatcaagtttgaaaaaaagttatggacgaaataatttttttttacgatttttagtcataacttatttcgaaaagcaataaaattttctttcatcagtatgtagatagagaacattaagggctatgaatgatcccaagaatgtttaatttggtcaattttaacaaaagttaagacgatttttttgtctaaaaacagtacgagttgggcagtacgagtggtccctgaaaatacgaaactggaaaatgcgacaccgagagaaagttttcacaaagaaaatacgacaccaaacttagatttttaaaaatataaatttatatatttttttcaattaaagtctggaaatgagcatcagtacctaaaaagacttgttaagtgtggataacaccactgattattaaacgtgaaaaattggcaaaataaattagtataaaattggtagctgctcttcctccaccttccattattattttccatttgccatttacccattggttttcgtctctttttgttcgactttatctccctgacaattccttcaaaaaatgattctgtacgttttgtagatttcttcacaattttacctttttgaatttcccattttttagtctgttcgttgtgccaatgtttgttgggtgttgtgacattctttggagttattgggaccgcctcaaaaaaccaaaaaagaaaatgtaaaaacatttggccattcacacgaacaataaacacattttggtgatgattttgcacaacatttggccaatgaccgaaaaaaacattcgtgggatgcgattgtgtgcggatactttctaccatttgcgacagttggccccgtcaattctcaacgattgtccattgttacgcgttatcaatttccaagtcaccgatctcttcacagaatttcctgcagatgacagtgccatggcatcggatggacaagcggtggccaaatggcttttcactccacgttcggacaatgtgccaaaggtggttgatctgctcgtttgacacagatgttgggaatttggcagtgcgaattgaagccttcaaaacggtaattttcaatgatcatttggctcttttacattgtttgggttcgtacattgatttcgacctagtcgaaccccgaacctgggttcgaagaaaaaacggaaacactaatttcgcatttttggtcttaaaatcattactgttgtaaacttttgctttttcgtgccatcccgccaaccgaaaagtgtcattcattcattgatcatttcgtattttcttaatcaatttttccaaattttaggcatttgcctcggcttcttctcccgtcaatttcttgtcgtcatttgggttttcccgccgtctttggccgactccgttttgccatttgatcagacgaacgaattgactcgggaacatttggcattgaaaagaagcgttaatagagacgactgttttctgttggtccgttgtccaattacgcgaaatgaaagcaaatggacaaaatgggaagaagaaacgattggaggggacttttttgatcagtggaatcgaattgacattaatatttgggaggacgaaatcggagatgggtaagcaaacgctttttcaaaaattcaattttattatgtatttttgttttaagccttctcgacgcaactcccggcccaaatgatcagcagcagtagtgaatgaatgaattgttgagaagtgatcgatcaatatgaattattgaattggaaattgtcgtgctcattaaatattctttttttgtgatcaacatggatttgtaatgcgtatgtcttaaggataaatttaatgatttccttaaaccgaaatccatcggtaaaatcaaagtaaaattgaaaaagtgcactgaaattgtgcagttttgaacgcattggtcaccaccaattttcctaaacaaagcaagccaacaatttcacctatttgagggaatgggtcgtttcggcgccaagccaaaattaaaaaatcatgaatcagtgggaaatttttgagcgatttaaattttcaaaaaattaaaaattttaataaaaattgtagaacaacaacaataaactaacaaaagaaaatttaacaaaaatattcgccttgcgcttatgaatcaacggaaactgtgccatttcaattgatgaacgatcggaccaacgaaaagctgaccttgaagaaaaaaggcgatcatggaaataccggtgttgattggctaatgaagcgatgccaaattggggagacaaaggccgcgttaaacgaaaattcggcaatttgaataatatcagctttacgttttatggaaaatgcattgggtgagtggcaacagcttttgctgctttaataatgaaattaaaattgcgcttaatttaggccattgtctccaccggcagaagaagaaaaagcgggacaaagcgtcgaaaaaggggccccttctgacaaatgagtgacggacaaaagaacaacaacaaaaacaacagtgatcagcagaagaaatgaattaattccagaaataaaagatcataatatattatgatgaaaggacttttttccaaaattagattttatccaaaaattgaaattttaaagcaaattttttcaagaaattttttcggcgcgctttttccaaaaaacttttggtaaagaagggggtccggcggtgccgataggcgccaccgggaaaatttttttgcatttttaatgcgatttgttaacagatttttgtccaaaaatgactaaattttatattttttgacaaattttcaccaaaaaatgaccaattttatgcttttcagcaaaatttttaatgaaagggaaaaacgtaaaaatttggaattttttttaaaaacccgcaaaatttttcgatttttctaccccctcttctcttacgatcgacaattttcctcacaaatttatgacacctatttcgacaaatttcgaacctctgacccggattcgaacaaaaattctaaaattcaattttacaaaaaaaattcaaaatatgaaaaaatcagttcaaatacatggaatactatatcttgccttatgaatcgattttcctttttatttcatgcatcattttgcatgttttgaaaagtttttctgcgtaaaagtcccacaaatccaaacaattaattacctaaatgtatttaaacaaaagaagaaacaaataaataaatatgtgaggcaattactcgatcaatttccattcctaatgatcaattatttctcctttcccacttattcatccattcatttcttctgctctccgctgggcccgggattcattttcagacgattttttgcattcttttgtcccgaatttggtggagacaatggcataaattaaataaattattttaaacaaaagaaaatggagttgccactcatccaaattgataatgaagatgaaatctgccattgttcaaattgttcgcctttccattctcccactgaatagccatcgtttgcccaattttgcatggtgtcattatccattttctgtcccatttatcttcgctatcgagggccaatgtcagcttttcgttggtccgttcattcacca

SEQ ID NO: 5850 - DNA, 3566 bp, Heterodera glycines
  unsure (1)..(3566): unsure at all n locations
aaataatttcgatttcgcctaaaaatctgattcttggggagtaaatgagtgtatttttgaaaacatgaaaaatatatgcagatcattaggcggttcatttttcatttttactgaatttttgttaagaaattttcagaaacaccaaattacgcacaataatatgttcaattaagcgtacaaattaaatgttcgtattaagcacaaaaatctcgttagagcaaaattaagcaagaaaatttacgctagaggcaccaaaccaagttagaaattcgttttcggatcaattagttagtccaaatttgcaaaaaaaatataataaaattggtccctatttattgacgatataagtaaatacgattatacagacgattcgtatttttatgacagtttaactgaagaatttaagcccattttagccctgtcaaaatgaccgggcccgagtggccggccaaaaatagcccgttttactgcgtggcccgggcaataatttataataaatgaaataatcttgaaatatatttgaaaaaaaaatccaattttcactttaaatttccgcggctactgttttgaatttcaagtttatctcggttgtttattagggctaacaacctttgtttcccatggcattcaaacccgcatgatcaccgtgatactcgaatttaactaaagtgccagcgatgagttattctcccccgcaccctctcacaaacaacgcgtgtttcctcccgcctcccccggcatattttaattttttttttttgtatttttaattaggtctccaaatctctcactactgccaattctcattgactctgcatgctctctgtctgttatttggttttctgatcatctttctcgttcctctctctcacccactctctctcatctctctctcccttcagatcatttggtcaatccaaaaaccggtgctgaaatgggtcggacaattttttaaattaagccgataattagtattttatgattaaaaaatagtctcgttttcttcccatcgaaaactaaaaaatttaaaaattgttcaaataacacaaactattattctcccacttccccatttctgccgaaataaaaagtgaatggaaggccaaaagccagaaacaaaaagctagcagcgaaccgaggcagagctgctgctagcgattcccaaattacgtatcttttttcaatggagcacaattttgctctaggagccaaagttcacttttttcgctgtttgtttaaccattggtgagtgttaagccccgagatattctttgcttctctgcactcactcgttcgtgccacacactttttttgtgtttctctgaggcggacggaggaatggatgttccgcagtagaattttgcccgcggctggcgctaaatgaggtctcgactgactcaatcttcggcacacatagcatacacataatgtttgccattccttccctcgctacctctccttttttgtggtggtatcacagtgttggtgaagaaaaaaggcgaagagttttaattattttttttcgaaaatgcaaaaaaaaatcttaaattttattaatgaataaataatttcgatttcgcctaaaaatctgattcttggggagtaaatgagtgtatttttgaaaacatgaaaaatatatgcagatcattaggcggttcatttttcatttttactgaatttttgttaagaaattttcagaaacaccaaattacgcacaataatatgttcaattaagcgtacaaattaaatgttcgtattaagcacaaaaatctcgttagagcaaaattaagcaagaaaatttacgctagaggcaccaaaccaagttagaaattcgttttcggatcaattagttagtccaaatttgcaaaaaaaatataataaaattggtccctatttattgacgatataagtaaatacgattatacagacgattcgtatttttatgacagtttaactgaagaatttaagcccattttagccctgtcaaaatgaccgggcccgagcggccggccaaaaatagcccgttttactgcgtggcccgggcccccgtgttttttcaacatttaccgggcctgagttgccggcaaaagccctgccggcaccctaacccccgggctcgaattcttactaagatttgaattttatttgcatttttgttaaacattttcctgaaaataggtataaaaaatgtggacaggtacaaataaaggtactttactagatcggactgtatcagtattatggatggtttggcagatcaggatcccgaccccgattggtcgcgaatctcgactttttggatctcggcttcagtttttaaaataattcaaatactatcccctatttttgcaatcccagcaagattgaaaatgaacactggtatgaatttttaattttgaaataaattttttggttgtatattgtattttaagtttaatcaaatattgatttttttttttgttggaattttacagtgttttagatttaatttttgtcagtttttagtccatatttcggggcaactttagtcaatattttatgtccatatttgacgttttttagtccatataatttcaagccctagttatcaactaaatttattgccagattattttgcccacagacattgtctaatactgaaaaggcaaggtgtgaaaaaattgcgatttaacaaaaaaagaatggcggcacaaatttgactgtccctgacggcgaaagtgttgtgcagacagactgttaattacttagaatccttaaaacttttccgaataaaggtcaaaaaccgggattttaacttcttatcccctcccgatacgattcctaaatcactatcaagacaataacaaattaaaataggaattttttagatttaattttaaagaatcaaaagaaataatttaaaataaatgaaataatcttgaaatatatttgaaaaaaaatccaattttcactttaaatttccgcggctactgttttgaatttcaagtttatctcggttgtttattagggctaacaacctttgtttcccatggcattcaaacccgcatgatcaccgtgatactcgaatttaactaaagtgccagcgatgagttattctcccccgcaccctctcacaaacaacgcgtgtttcctcccgcctcccccggcatattttaatttttttttttgtatttttaattaggtctccaaatctctcactactgccaattctcattgactctgcatgctctctgtctgttatttggttttctgatcatctttctcgttcctctctctcacccactctctctcatctctctctcccttcagatcatttggtcaatccaaaaaccggtgctgaaatgggtcggacaattttttaaattaagccgataattagtattttatgattaaaaaatagtctcgttttcttcccatcgaaaactaaaaaatttaaaaattgtcgaataacacaaactattattctcccacttccccatttctggcgaaataaaaagtgatgggaggcncaaaagcagaaacaaaaagctagcagcgaaccgaggcagagctgctgctagcgattc

SEQ ID NO: 5851 - DNA, 1382 bp, Heterodera glycines
ttcagatcatttgtcaatccaaaaaccggtgctgaatgggtcgacaattttttaaataagccgataatttgctcaaaaaaatccccgatcgcctattttttaagggcgtcttctcttcgaacgtcgatgtcgaaaatttatttccgaccactaaataattaaaatagccactaatttagctttcaattcaaaaatttatttcttcactctctatggcctcccttctgaacacctcctgttgtctggtaaaatagagaaaatgattttttaatttaattttatttttttgcagttattcatcaacatcattctcattggacgtgtattggcatcagcacaaagtgaaccgggcgaaaatgagtggttcagcaatgatgtaattgttttatgaaaaaaggcgtggggcggtgggggagggggcaagtttaactgatttgactaagtttaacctaaattaggacttattatttaggaataaaaataaattaaatttaaatatttctatcattgatactttgaaaatcgcccacattaatacacgtgtaacttcgtcacatagatatttttttaagttcggctcaccacgattttgaacgtgttgcttttcagctcgttttatagcgtagtcggttgaatcccggcatggttttggcacttctttccctgcactttttaagcctgaaaaggcaatttgagtttgataactatgatcattataagagattaaacggacgcaaacaatctttcttttaatttttctccaaaacaggttcaaggcttcttaagcatattatcacgtaaaaaaatttcttttacattttcgaattcttttcatcaatcgagaaaaaaaaattaatattccattgaacttgaagtccatgtccattagtgttatcttactccggttttatgcctttttcaaaataccattctatttccttcaattatataacattttagacaaacatgctggacaagagcgcatttactctacatgccgcagctacaggatcggtcgataatgatttggtaggtttgccatttttcgcattcatgtcaaacgacattgttacgcctgaaagtccaaataagaataaaagaatatttattcaaaaaattgacaaggcgaacagagtcaaatatcgattgggaacaaaaggggatgaaataaattaaaccgatacattcggcattgacttcatccaatgctccatgaggaataggccgagccttgcagtagatcggtttattggcttcattagtagatcggcttattggcttcattagcaccaaactgacgataagtgaaagatttggaaacatcagctcctttgtgatgatttacagttcttcgatccaaggcatgccgagcaaatcctgat

SEQ ID NO: 5852 - DNA, 5442 bp, Heterodera glycines
atcgggaagaacccgactggtcagaaacatggacagccaacactctggtcctccaatctaacaaccattgtgatgattgatcaaggcagaaagccgtaggtcaatcgccaaatggacacctccaaaaactgatcggacaattggtcgaatcaaaactaattatgatcgggacacgcggtccattccaaaatgggaccatatgatttgattgaatatttgcagcttgagacaaaaagcggggcccgccccgccggtgtttcccccgtccgattaccgtaccgaataaacccccgctgcccatcgccccatttttggggtacggcgcgattatttccccggcgggggacaaaggccccccccactttccccacaattttcgcataaattgctccgcactcggctggaaaaaatggaagagaaactgaaggacaacaataaaaacgaggggaaaaagcgaaatttatgggcaaaaccaaaaacccctcgggcgatggacggacggacgaaagcatccatcggtcagccgttttttgaatcgaatcgcccgaggggaaaagttgtggcggacggacggacggattgatggcggtgggaaatgaacacggattttgaaagggaaaagtgaacggaaaaaatttgggaatggagaatttgagttattgcaattaatttaaagcaattaaaataaaataaattaattaccaattatggtcagtcgctaaaagtccttttaatgtgtaattaattaattttatttaattcataaaaaatataatttaaaatcataagaaaaatattttgattgttcaaatattttattttttgactattcatcgctaggctccaattttagttgctaaaaactgccaaaatagttagttttttaggttttaaaaaacccaaaaaataaaaaaataggtttaaaaaccaaaaattggagcccattcatctctagacatttaacattatataataagagttttatgagtttagccaacaataaaaaaatgaatttaatcgccgcccattaccatcttaattaataactgactcattctcagtctcctcttgctgctttgctctgattagccttatttggcccattttcagaacacttccagcaacagatggccgccgcgaccgcaatgcaatcgcaacaacaacagcagcagcaacagcagcaacttgctcaacaggcgaccaccgcggcggccgcgttgcggggcgaccgcgcgagtgcggcggcgattgctgccggcgcatacggtggagtggcggtgagcggcggctatggtggcgcgacgacaagcggcgcattcggcgccgggagcagtggtgccaatgtgaacggaccgccaatggcgacggcgaacgtagtcagtgagggaccatggcacaccttctcatgttcctccccttgtcgagattataattcaaattcattccattttgccaattttaggtcggccaaatggccatcggcaattccgcgctgtcccagctgaacttcttccagcggtccttccagcagcggtttggcaccgatgggctcggcaacggcatgcaaaacggcgtgagcggcactagcggaagggggtcagcaggaaaatgaatgcggaatttgaaacgagacagctgcacacgctaactcataaaacttttggggagatggacatggaaagactcggacttttaccactaattaacggggggtttaagattatatccccatttcaattttttcaaaaatgccgttagtgggattcccataaaacggtgttatattcccggcattgcttgtccccccccctaaatattcctacaattcaattaggtaatttagcagtttatttgtgtgtgttcgtgccacttgatcaattaatgagcactctgatgggtcgttctgttgcttttcagtttcaacatgatcactccgttggaatcaatcaaacacttcagccagaacagccagcagcaacagcagcagccgaacagttcgggcagtacaacagcctccggcaatttctgagtgtcgccggggggcaacactttgcctgaggcaaagtttaagagacgggaaacgaaaatgccaatggaaaatggcaaaaaaaaaaaaaaaagtaaacgacaaaaaaaatgagcagccaaattgtgggccgatctctccgccaatgttaaaaaaaaaaactaccgcactcttcgccatcagctgatgatggacaattgctactgtaatatgtacaaaataagtgaatttatttgcgagaaatttttgagttggaattattagtgaaattttatttaaaaaataattattttttataaattaataaaattaaaccaaaaaatttctctccttttccgtcccttttttattaacaaaatattgtccatttttaccatcgttttttcaattgcccaacttctttttgttcaatttcattgatttggccacttttttagaccctcgcctaattacgcgtagttcaaaatcactggttagccccccccccccgaattttgccaaatttgttttgtaatttaattgttttcgccccatttcgggtcatattattaattatattattattcagtgtccatcattaatttctgttacttaattacctttttcttttttttttgtttattttccgttaatttgccactttttcttccttattatttattctccacacaaaacaaacattcattttacacaacacaacgaccacactttttaaggccattaattcattaaatattgggcaaattggcccaaaaattacaaaaaaataaaaaatgattttcggagtgttcgattatttatgggccatttttgccttttatttgaccatttcccccactaatcttttggcattttgataaaattctcgtccattttctgaaaattcttccaacttttgctcctctctaaacagtagacaaatggaaattacagttacagttacagtaccccttctcccgatttttcattaattcgtcacaatcgccgcgtcccccggcccaacacacaaaaaaaacttgcccagcccgaacacttaaattaattaattaattattgtaattgcgaatttcccattctcttcgaggcatttttattttattttattattattttattttgttgctacgcatttcgaaggaataaaaaattttaaattaaacgaaaattaagaaaaatgagagaacattaaacagcaaaatttattgaatgacaccggtaaatcagaaaaaaataataattttagttatttttgttggaaagtaatttggaaaaggaaataataattcatttatttttttaaataagacaaaaattattttaaacattattttactcgcttttttaaataaatttatttaaaaattattcgaaaattgggagaaaaggaaaaaatagttgtgaaaacaaatcaacaaaagggcgtaaaggacgggtgccattccgacgaaaaagaaatgccgacggacgacgacggcacttccgctgctcatttgcttgttgcatttgtcgcccaaacagctgcacacctaagcaaatttagaaggtatttattggaggacagatttgtttgaaggggtcgtgccgaattgttttcgtaaaaccctcaactttttcaaaaaaataaaattgtgataacttttcttgaaatattaaaaacttcttggatcatttgacaggtccaagtgtttcagtttgatatataaaacttaagaaatacatcaagaaaaatatgatcataaaaaaacaatttttaatttgtgcctactttttatgggaacaaaatttcatttttgaggttttatcattaatattttaaatctatcgttaatagatgaatattagagagatgtttaatttgattgttttcaagaaaagttaggataattttaagtggcatttgttgcggaatgaccaatacacagatggggaattaattattacttttggattgaatcaacttttactctggaaatttgcatttttatggcactatattttctgtgccaatcccggttgcatttttgcccaaaattcacctgcacgggttggccatccatcggattcattgggccgcccatggccataaatccgccgccgccgtagtaaatctcctcactggacgactcactggtgagccggaacagttcggaggcgaggacctgggaaacaaagtgaaaattaaccaaaaagcaaatttggcatttcaaaaatgcaaatgattaacactaattaattttctcaaaaaatatgtttttgagattatttaattagcttaaagctgctgtaattttaaaataatttttagataattaaaattagaaatgtttttgcccctttaaatgcccacttctctgcacaggtcgaactcggcaaagaatgcgatggttctgttgtgatagccatgccgcgaaagagtgctagcacagccgcgcattgtcaatcgtttacccgttttacgacccaaaaatcaaccaatataaatttacatgtttgttatccctcccactaccgtacccattataatgaattcttgtgaaagtgtcaggcaaatgccacggcatggcaccgtcccaatgcccgtgggctccattggatcgtcgcatttggcactgaagtttttcggttcgtagaaatgcctaaaaactgaaatcttcagcaaagcagatgatctgttctccattttattgtcaatcggtgccataaatatgtaattaaatcctttggttttgatcattattaagcagctgttgataattgttggcactgacttgcccaagtcgctgtccttgaacagttccgcgtacattggcgacatgcatgaaaagcaccggtgcgtttgggcagcgccggcgccgtgaaaggcgccgccgccctgttgctggagggggtgcagcaaatggtcggcacggggccgagaagagaaatgttctggcaaagaaccggcacaattagggagcaaacgcaaatgaaacaaacaaaacactgaccagaataatgcaattttgccaacgaaagtgtggcgaattggagaagcatcaacggcaggagaacagtgacggagaaaagaaacggggaaaacggtagcgaactgatactacggtatttggtggacacaaagtacggtagggagagggagacgaaaaggatgagggaaaacatcagcggaaatggaggaggacgaggacgaagagcaatggacggggcaaaaacggtgtgaagaaacgcatcaatgaattaggcggtgaggcgaagcgaattgaggaaaatgacgaagaagtggttaaaacgaattaaaagccctaattaagagacaaattgagtagctgacaaataaatgatggggaaatgaataaaattaaaaaaaatgtttaaatgaaaatgacaaaaaatctgagttaggaaaatgagtcccggaa

SEQ ID NO: 5853 - DNA, 994 bp, Heterodera glycines
gccaatcagcagcagagggaagaaataatctctaaaaaatgcaatagcagtcggacgaatctgagggaaattgggggggggggggaggatataataataatgagggattggagggggggaggggggaagggaagggggagggagtgcttaaaaagtgccacagacggggcaaaggcgggcacttctgctgctgatgggagaagggccaaagcatcataaaaagggacgatgacgacataagtgacgggtgggaacagcagaagaagtggacatgccaagttggacaggaccaacggtggaaagggggggggggatgaagcacttggagcacattgggtttgacattttggcattgcctgacatttttatgatgtcattgttttacggtgggccctgatcacttgctaaaactgcgagagagaaaagaacatagccttaaatttagaacccattttgatacctttagatgatgttccttttggttttgtgagcctttggccttttggaaattttttaaatttttaaaaaatggacaaatcaaaaaggagagcgtgcctgaaatgcttgtcattgcagtttttgtagtcatttcggggccaatttgactttgctctcgctgcgccctctcttcgtgccgactgtgctcattcatttatcattccgccggcgcttaatgacaacgccggagggcattttggtgggaggcgaaattgggggggaggggaatttgatgaatgcgcatttaattggcccaggaaaaagccgggcagcggtgaatcaaagaaagacaaaaatgaaaaggaggaaagtggaaaatgatggcatcggtgggagggaagccatcggcgccactaaacattggggtgtatttgaagccaaagaatatctttgctgggtaggacttgaatttggaatggattttctcaattttttacaaggaagcaaattcaaaggaatgctgcaattgactcaccaccgattccaagactctcca

SEQ ID NO: 5854 - DNA, 2234 bp, Heterodera glycines
  unsure (1)..(2234): unsure at all n locations
tttccccccatttcttttgggtgcaaaaagcggcggagctctggtgaaggacccacnccattcttcgtcttcttgtgtcgatggagcgggaaggaaatggatttttggcacaattggcaccacaaatctcttcactgagatggaaaaagggggaacaaaatttcgggggggggggcaaaaaacgaaaattataagcgaacggtcggtgaaatcgaccgatttaaaatatttcattcccggcaaacaaaagcattgaattttatcagtatctctgctggtctttgaacaaatcactcaaatgcgatggcatttttaaatttctttgaatgtctgtccaattttacgccgggataaatgacaaatgaatgaattaatgagtgatattgaagcattggcattggtatttttttttgtgttggactgctgactattgagcttgggactgaatagtggcggtggcattggcaaaattaagttttcaaaaattacttttgcatatttttctctgcgttgggctaccaccgctcgcgcattaatttatgcgccccggggcaaaaatggaaatgccaatgccaataatgccagaggagcaaagccaatcggttaaaagagagtgatgaatagggcccggatttttatgtttttacatattttttttgcggcttagttatggcgagagaagcccaaaaatagcattatctccgaacaatttttgatttagagcgacttataaaaacataaaaacacatattttggcgttttggcacataaaatatgttagcacatattttggggtttggcacatattttgcacatattttggcatttttgagaaaaattgcaataaaaatacaagaaaattgaaaaatacacccctaaaaatcgacttttttcctaattattaacataattttcaaattaaaaaatgttttcttcgattgtagaaactaatgaaatctcgaattcattaattcgtcattggatttcgaagttctctgctggaactttcaatttatagaaatgatttatcaaaaaaagacaattttaccccaaacacttcgaaatgtatttgatttgcgttgtatgggctaaaaatgataaagaatgagatttttgggaattaatatgcaaaaacacacttattttttcaatttttaacacatattttagcacatattttggcatttttgggggtttttagcacatatttcagcattttttagcacatattttattacatatttcaggatttttagcacataaaaatccgagccctagtgatgaaagttgggaaatgagaggataaataaataaatgattgagtgtttttgttgcccgtgcgcgacaattcataaattattcagtctctttttttgattggcaatgactttgtgaggtcgacttaagtgccaaaagaggagactaattgagaagacaaacgattgtcaaaaggcaaaaataataattcaaatggcaaagactttgaaggttttttttgaaatgaaatgctgaaataatcggaaaatccgacacaaattaaattaatgtgaatgccaataagtcaaccaaacaaattaaaaccaagcccaattttaataattaataattaccatgatatttataaatattttaatttttgcacaaaatcaattaaattttcccgcatgattttgttttagccaacgcaattcataattcgttttatttgttggatttatcgtaaaagaagcagtgttaaacgcatttgtttttgattgaaaaagataaagaatgtgatttttggaatttatcaaaaaaaaactcgatttttccaattttttaacacatattttagcacgtattttggcatttttgggggtttttagcacatacatatttcagcatttttttgcacatatttattaaatatttcaaggtttttagcacataaaaatcccatccctattcataatttgtatttataaaattgatttttattttataaattatgtttgttgaaaatgccgatctcaaatcaacattaataagatttcattttaaaaggattaataatttcaaatggcaaaggctttgaaaaattttgaaattaaatgcaaaataaatggaaaatcctacaccttgttcttaaaaattattgatgacatattttttacatctatgctttttttaattattgttaaattccaatcattaatcgctactaatgagttttggcaatatctgacaatgacttc

SEQ ID NO: 5855 - DNA, 2703 bp, Heterodera glycines
aaattagaaagccaagaatgtccaaatcttcaagttgaacagtagagctgcctttgtagtcattttgttaatatatgaagtctattggacgctgattgcatattggtagtcttcgaattttattaaagtcaaagggtggttggaaaattaagtcatgaaatcttgatcctggagtttttcgggatcaatgatcacaaacccatcatcgagttcacaattccaaatccataacctaaatttgagcaaaaattcaagttctaaaaatttgaatttgtacttcttgtttgagttcggcttatagtgattaggatttggtataagaatgatgttaggttcgagatcttcgaccacgataagccagggaataagttttcacgataccaaatttgccctttttgtgaagtggccaactacggtttattattattttatcttcaaacccgtttttggcagataccgtatcccatcattctgttttctacagtactgtcccattaatccgagagtctcttactttttcaggggttggcttatttttccaatctttgtgaatttcaacaaatattttttggcttatcaattgctgattagtgatttcaaccagttttgttgtttatcaatgtgttgcaaaatgtgacttcagagcagtgatggaatggaaattgttaagatgaccaattaattcattcagtttttccattaaattgccgaggagtgttttactttaaaattaattatttttcttgatttttaatttttagtttatcttttttttcttttttcttttccttttatatttttaaaaaaaaatttaaaaaaataattaaaaaaataataataaaaaaattattttctcaagaaaaataattaattttaaagtagcctgtcaactaaaaaaacaaagaaaaccaaaaaaaaaggagcacaacgaaatgcctaaaaaaagtaaaaaattaaatatttttatttcaaattcgactaaaattacgaatcaaaaagagagacgaatcgattaaaatttaaatgtacttttctattaatattttacatttctttaggtgatatattaaataaggaatggcaaaatgttaggcatcgggtgggaatagaacccactcgtccacccactcatgggcagctctaccattgagctatcgaggcacatccgctctttctttttatggatcttatcgctttcagcattttaagcgtccagcagtcagcttattccttacgattactgtgctttaccgtattttacgggtttaccgtgggatttttgcatttatgttacggtatttgagtgttctaacttctaacaccttctcgttctccattattccgctcaaaaaatgcgctgctaaattcagttggaaatgcttttggcggcggttctaagacaaatgttggcactttgtcaaaacagcggccgaggaaatggtgcggaagcaatggccttaatattttggccaattttcataataattttaaacaaatctcacgagaatagaaaagatggcgaaaattgttggagagatttgttggcaaattcttgcctaataattcagacaaaattttgtaaacaatttcatttcggacttactcagaaaaggcctcaaaatttacgctttttgttaaaatgttttcgatgctgaaagaatgccgaagggatggattcatctgctgaataaaaagaaataatatattttattttataaaaatggaatattatccaaaaaatttttttgagcctttttttcttcttttggaggaatttgtccgcttcacagctgaaaagccatttcgtttggccctcaatttgccgttttggtcattcggtccatccaattaattgaagaaattcgcctctttgagcccaattgacatcactttaccatacccgtgcccatcacacttacccgcagggcaaatgatccctctaattggcctaattctcggcgcaattcgtcgcattgccatttaattcgtggtaattgagcgatgcacaaacagatgggggaatggcttggaaaaccgatctcgaacaaaaagtcgaaacttcagatttttcgcatttggtctgataaattaaaattaaaaagttatgtgccaaattctttccattttcgaagttttaaccgacttaaaaccgtttaaacccattcccgctactggagacccttttttcagtgcttaactccttgagacaaatcaatggtgtataatttgtgatattttttcttttttggggggggggggattgactatatgtacatagttcagctaaatgccaatctttttttatgaattcatgtgtaaaaatcaaatatatgttacacgtaaatggcaaagtccaacatttagatcacataatcatcaatacctaaaataggcataaaaaagtaattcttccaagtacgaacaatttcatctttccgtgccttttcaccgatctaaattttatttttcggcattttcttcgctaaaaattcaaattttgcctcaaaaagtcaaaaaaatcacgaaaaaagtcgcaaaaactcaaaaaagtcacaaaaatcccaaaaagtgtaaaaaagttaaaaaaagtcacaaaaaatgcatgttcgaagcttcaaacaaagtttagaacactttttaattcattttaagaccatttagagtcagcaaaagaaaagtcatttgacttaaatcccagcccta

SEQ ID NO: 5856 - DNA, 5322 bp, Heterodera glycines
tgttctttcttttttcctttcttcgcattggctatgataatatttgcgtttgcttcaatctctgctgcagtctgtgaagacatcggctccatggttgcggcgtccaaaacttcacgaacaacattcttgttaacatttttctcagcattcttgtttcggttacgtcgttggttctaaattatatgacattaataatagtaatagacgtgttatatgcacaccttttctgcagcaactgcagactttttgctggagcctccgagtttgccagatacttctttgtttttcatcgtctccgcgcacaatgcattctctttcgcgatatttgcgtttgctttgccactttcattcattactctgcgctcgtggcaccaatcctaaatttttatgatttaaatatataactgtcgaagatttaaacaaccaacctcaaaactcgtggatttttgcatttttttaggaatcttgtctgtgaataaatatattataaattgcaaaaataaatgagcttacaagtcttatcgaaatttttcataattttatcaaaaatatgtgtcatgaaaatctgaagattacgtaagatgtattatgacaaattcttattgtttacatattgctagaataataaaaaaaataaaaattggcattatgaaacttttttagtttctctctttaacacagtctctcaacactctaatagtactgccccccccctcacacaaaatggtagccatccctttagtcaatcttaaagggatggaccatacctttaggccatccctttagtcaatcttaaagggatggatccatccctttagacactgttaaagggatggatccatccctttagacactgttaaagggatgaagacattatttttaaaatggatccatccctttgtcactggtaaagggatggagacattatttttaaaatagtaaaaaagacgtttagtcaatcttaaagggatggatccatggtaaagggatggagacaatatttttggatccatccctttagtcaatcttaaagggatggatccatccctttagtcactggtaaagggatggagacattatttttaaaatagtaaaaaagacgtttagtcaattttaaagggatgaaaaaatccgtatggtcaatcttaaagggattgatccatccctttaggcatccctttagtcaatcttaaagggatggatccatccctttagtcagtggtaaagggatggagacattattattggatccatccctttagtcaatcataaagggatggatccatccctttagtcagtggtaaagggatggagacattatttttaaaatagtaaaaaagacgtttagtcaatcttaaagggatggatccatggtaaagggatggagacaatatttttggatccatccctttagtcaatcttaaagggatggatccatccttttagtcaatcttaaagggattgatccatccctttaggcatccctttagtcaatcttaaagggatggatccatccatttagtcactggtaaagggatggagacattatttttggatccatccctttagtcaatcttaaagggatggatccattcttttagtcactgtaaaggaatggatccattatttttaaaatagtaaaaaaaacgtaaaggactctggcgtgtgggggcttggttaataaagcccccccacacaagtctcatagcctacccaagaggcactgatgtcgtccatcagggtcacagtgatcttccaaggcggcctttattggcacaccggcccagccacttgcaccttagaatggcgaactggtgttaaggcagtcttaaactcccaccaggaccacaagtgtcgaagcgctacctcctccccttgaccttgggcttacctgtcccttagacagggaacagcgccgcagttggggagggttccactcctaaaaagcgccgaagcactttctgattaataatgaaaaatgggctatatatagtactttgggcttgggaaaggatggatccaaaaatattgtctccatcactttaccatggatccatccctttaagattgactaaacgtcttttttactattttaaaaataatgtctccatccctttaccagtgactaaagggatggatccatccctttaagattgactaaaggtatggatccaaaaatattgtctccatccctttaccactgactaaagggatggatccatccctttaagattgactaaagggatgcctaaagggatggagccatccctttgatccctttaccactgactaaagggatggatccatcctttaagattgactaaagggatgcctaaagggatggatcaatcccttaaagattgaccatacgtcttttttactattttaaaaataatgtctccatccctttaacagtgtctaaagggatggatccatccctttaagattgactaaagggatggcctaaagggattgatccatccctttaagattgagacagttagagtaatctctacactatttctctattactctagtatctctaactgtttctctctttaacacagtctctcgacactctaatagtactgccccccccctcacacaaaatggtagccatccctttagtcaatcttaagatgttgtccatcctcctagcaaacggtatggggatggtggccatccctctagcaaacggtatggggatggtagccatccccatagcaaacggtatggggatgttgtccatcctcctagcaaacggtatggggatggtggccatccctctagcaaacggtatggggatggtagccatccccatagcaaacggtatggggatggtgtccatcataggattcatcactatacgcagggattctgaggctttcccgaagagctaaacgaaatctgatttcagattcgtgatcagcgtcctaaataacctctaaagacatatttctggaagtttttgggcgaaaaaatttccccactcgaaaaccatgtgcacccccctatggtcccgaattccaaaatcacttttatttttataactttttactaaaaaatgataaaaacatgaaataaaatttatcaaatagagcaaaaaattgcggatttttgggctatttttattttacaaaatatcttttcagaaccgagtagtgaatttttttctgaaaattcgaaaatttccagaatttctggaataacttttttcatattattgatagaaaactcaaataatatgcataaaattctccgatattttctccattttttgagcctctaaacactaaaatagacctgatctgaactgagttatgaattttcaaactttaacccaaaatcccgagggcaaaaaaagtgaccgattttcaaaaaaatttaaaaaattccaaaatttcccaaacaaaaaacaaacatcatattcgtgctcagcaccttattttaccccagaaaaatatttttcaccccacttctcgccctaaaaaaattttttgaaaatttctagggggcctagctcgaaaatttttgaaaattttccgacatgtaatataccattcaatagagcttaaaaagctctacaattttgctctaaggcaattttttgctaaaaccgacccctgacgagttatgggcccgggactcaaatgtcccgcttaggccaaaaaaattttctatttccggaaaaaaaccgaaattttttcaaaaatcccaccaatcgatagagctcgaaaaacggttgcttgaaagtggtctcggttttccccggaaaaatcggcaaaaaatgataaaattcaaaaaccccaaaaccttctagggggcctagctcgagaaattttgaaaattttcaaaatttttaaatttggaaaaatcgggcttaccaaactctacaataagttcgctggccaccccctgctcagttcaaacgctactgagttattcgcccggtactgaagtggacaaagttggtactgaatttctagccaagtctacaggctttcctattatgggtagaggcctggaattttttttgacttttagataacacttcaacttaggttcctaccagcagacattttttggttcaggttttaggaaaaaagttatgggcgttcaaacgcacgcaaaaatgggaaaaaagtccctggtactcagttggccctcggatcaaaaaacctatagttttcccggatgcgccgtctcgagctaccccttggtgcaaaatttcagcccggtgtgcccagccgttcccgagaaattggttttagcgatgaaactccttatcattctaacatatatataactagcgggtgcgtgaaccgtcggctatttagctgggaaaaagcgcttcgcgctttgggagcttcgctacctagactgttacgggggaagaggtacaaccacgggtgggaaggtacaattgtgatcagaagagttacaactacggttttttcagggatttttaggccgcttcgcggcctcgaacgggcgctttgcgcccgtttttaaatttagttgggccttttcggccgcttcgcggcctcagacgtgcgcttcgcgcccgtttttcatattttgttttgctttgacgggccttcgcgcccgtttttcatattttgttttgctaagacgggcgcttcgcgcccgttttttaaatttgttaagctcagacgggcgcttcgcgcccgtttttaaatttagttgggccttttcggccgcttcgcggcctcagacgggcgcctcgcgcccgttacaacggtgttagaagaggttcaatagtgatcagaagaggtacaacagtgatcagaagattacaactttgataaaaagggtacaccagtgattagaagaggtacaagtgattagaagaggtacaaaagtgattataagaggtacaaattagaagaggtacaacagtgatcagaagattacaactttgataaaaagggtacaccagtgattagaagaggtacaagtgattagaagaggtacaaaagtgattataagaggtacaaattagaagaggtacaacagtgatcagaagattacaactttgataaaaagggtacaccagtgattagaagaggtacaagtgattagaagaggtacaaaagtgattagaagaggtacaaatttgatgaagaggtacaaatgtgatttaaagaggtgcaaaagtgatttaaagaggtacaaaagtgataaaagaggtacaaaagtgattagaagaggtgcaacagtgattagaagaggtacaaaagtgattagaagaggtacagcagtgattagaaaaggtacaacagagattagaagaggtacaaa

SEQ ID NO: 5857 - DNA, 1451 bp, Heterodera glycines
aattagagcccggacgggcccggggctccgacgggcttttcactggcgtaccggtcccggtgccgtttttttttggaaaaaaacgggcccgggacgcccggtaaaaacgcttttttttgaacgggcggcccgccccggtcaattttcgaagcccggtcccgggcccggtcaatttgaccgggctaaaacgggcttaaattccgccagcgaaactgcccaaaatttgaaaatttaaataattattttggcgaaatgtctttaattcaaaaatttcaatagaactttggatttttgaaatttttgggcaatttcaactgttaaaaagaccccaaaatccatacgaaattgaacaacattttcataactttctttttacaaaaaaaaaatttcaaatttcatgaaaaaccaaaaattttcttaataaatttcattaaaagtcaaagtttttcttcagcgtcgcctagtacaaaaagctaaatttttttctaaaatgtagctcaaaatagcaaagtttgtcattttttcgtgtaaatctgttaacaaaccaaactcaaattttcaaaaatttacccggcggccctgtcggcactgccggacccccccccccccccccaatgtcgtcaaaatctttttgaaaaaatacaccttaaaattcttttgaagagtaaaaaaggtcgatttacaatggcttgacatttctaagctaaaataaaggactataaaattttttcgaatttttaatcaaaattccaaaaattttgaaaaaagcccggtcccgtatgggcgcccggtcaaaattttggaccgggccgggacgcccggtaaaacgggctttttttgaacgggcggcttgccccggtcaattttcgaagcccggtcccgggcccggtactttcaaaattccgcgctctagtattttacataaataaggaatccctggtaataaataaagaattctcgaatgaaaattgaaaagatttgattcgaaagtattttattagtcggtcgaaatctctgggtctaaaacattttcgttttaagaattttaatggaaaatctaagagcttttgcctcaaatcttccatgtccccaagaatccggcaacattccattccgttatcaaaaagtaataaaatttacgtgataaagtaatgccggccaattgtgtcaaatccatctcttcagctgattcattctcacatttttccttggagcttaaacagcctccgaatatttcataattgaacaaagcaaaaataagaagcaatacaatttttatattcatttaattttattcagcgcattttgtaattggattaaaatgaaaataataaaaaatgtttcccaactgaattttatgctaaaaagcgtcaatattaatcaatatcaaaaaccacttacgtataagcattttattgtttagctcatccctatgggctgatactccaata

SEQ ID NO: 5858 - DNA, 5166 bp, Heterodera glycines
  unsure (1)..(5166): unsure at all n locations
ttcttagggggtgtatttttggttttattgcatttttgtaagggaattttccaaaaaatgtcgaaatagtgacaaaacgccaaaatagtgatttttaactattttagtgacgaagtcgccaaaatagtgatttctagtgaccgataatgacatcagaatcgaaaaattttaatgcagaaatgcgttttttgagctcctttcttcaaatcaattgagcaaaaaaatagttaaaacctaaaattcacagccctactaatgaggcaaacattaaaattaagggagtgggtttcgctccttgaaaaacttgaaaattttaaaataatgatcactttcgttctgatcaccacaagcctatttttctggtgggaaaattccaggctctttcctttgtcattttgctgcagtttatttccggatcgattttcaagggttttttcacgaaaaatcacataaaataaatttacatttttggcatcatttgatagcacttaaatgttaatgcaaaacttctaaaaaatttaatcaaattccaaaaaatacaacaaggaaaattattattattttttagtctttttggtcatattttttgatataaaattaaatttttgatgaaaagtcggaaattttcggaaatttttttaaattttttttttcaaaaaattagtaatttttgtacaatttctgttaataaattgaactgaaattttcaaaaaatttcccggcggcgcctatcggcaccgcccgaccctaaaaaacattaattttcttgcgaaatttgctcaaaatcgcgtacgtacattaagaagcggcgaaatatttatttgtttttttcatatttcttaaaaattcccccctccaatgactttggcagttcataaagttgtttatttacatattccaatcgaatgttttggctgcgatccgtccccacatgaatatttaattcggcaattcattcataatgggatcattcatcagtcagcttcatcatcatcacctttttgtatgtatcagcaccatcattttgtatttgtattgctattattcacataatttcataatcatatttggatcaatttttatttgcttaccaaaaaatctgttttgctttttcaatggttttggatttagttttaccaaaagctgggccgtgtcggcggataccaaaaagttgtgaattgtaaaaataataattcaaatttggattaaaaaatatccacaattttctactttggatatttttcaaaacaaattatttttcgaataaattaaacacccgaaatttttgttttagggtaaggttcaaaaaatttaccaaaatattgaaataccaaaattttatttaaatatttaatcaatggaccaaaatatttttgacatagagtttttcatgcattttccaaaaatataattcaacaatagcgttttaaaattcttaatccaatctttttaaaccccccttaatatgggaagaatcaaaaaacattccaaattacgcttaattgcaataatggacgacattaatggttcgaattctcaggccctttctgctgctgaccaacagtcaatcaatgatgatcactccgttaatcaagaacaggacgatggtaaaaaagatttattgcaatattgatttataacaattcttttaaattttgcatacagtattataccgtaccccctcttttcatgggaaaatccaattaaacatggaactaactcattgacaaattaagtttagtagtaaatttatttgcttttagtaatcattcaactctataaattcaggacattttcaatcttttaaattgcttatttttctgagaaattggacattttggagtacaatgaaaaaagaaaaccatgtggaaaatattcagaatttatttaaaataaattgaatatttttaaatggaattacattttcagacatcaacaatgtatacaagcacaaaggccaaattgaatttcggatgaccaatttcaaggcattttcggagggcaccgagccaaaggaagtgctcagtgagccggtggtgtacatgaacggattgccatggcgcattttggccaaacacaacgatgacgcatcatttggcctgttcttatgctgttttggcgacgagacgggttaaaattaatgaaattgacccgatgataattcatttaaaaagaatttgatagataaaatccaaaaatgcccattttgagtataatttgcaaacaagtcgcactaattatacattaattatgtttaatgttttcagacatggcttggaattgcttggccaccaagcagctaagcgttgtgtcatgcgcaaaaagtggacaaaaatgccaaaatgaaaagggaaataccaacgattatgacagatttgatgccaagaaactacgctggggctggggaaaaatttgcaaaatttgaggcgagcacagaatttttaaaattacatttatttttaattgttttttaaatgtttggtaatttaaatgtttgtttaggatgtaatgaatgaacaaaaaggcttttacgatgccaacgatgatgcagtcacattcaaagcgcaagtggtcactcaaccgcccaatgggatgccgtaagtgacaaatacagtataccaacttacaatattcggtgtctttgccaaaatttattgcttaacgttagcatttttgatagtttttaaattaataagtaactttttaattgaaacaaaatacaaaattttgcttttagtgggcttcgaactgttgacactttgcgggtcaacggtcaattggtttacgtgaacaaatttgtgagattttatacttaatatttgttttttaatctattctttaattatatatatgctgggtttgctggtgcgggggctttagcctcaatttttcgattttgagaggctattgatgattcttgtcaaaattcggcttttagtggccggacccttttgtattgcgcccctaaaaccctgcttttattttcattattttggtatcatttattcgtttttcatctttttagatgttggctgcctattccaatttttttcgcgaattgttttttggtgacaaaacggcagacattcaaatcgactcaatgaatggcaatgccgtgccgctttttgaacgtttaattgccacaatggaaccgactaatgcagctttggacggtaaaatatgctcaaaagcactttaaattggtgctagtgcgtttcctaaaagcgccattttaataaaaaaattcaaataaataaatgtgcatagaatttatttatttaaaaaaatttgtcgaaattccaaaatttttcaccaattttaattgtttttctagggatgcatttatttttatttcactctttcaagagaagtatttttgtgatttttatctattgtcatttaaaaaaaaaatacgaaaatcttggcacatttaggaaacgcacatggatggcacttttggaaatgcaccagcacgctttaaatttaaaattattactaaaatttcttgaaattttcaaaaattaaattttatgaatgaccacaaaaatttaaatttatgtagaaacctaaatctatgcaattttcagatgattgtgttgaaggcgttctgatgttggccagccaatttctgttggattgtgttaaaaatcgctgtgccagatttttgttggcaaacagccgaaagtcggcaattagcaaattccgattggcccatcagtgcggcatcaccgccatgaaagtccataaaccaattaaatttagtgccaaattaaaaattgattttaaaaattgtacttttttttattatatatcacttagtatctttggaattagcttttattcacagttgcgattctgtcaactttaggcaaaaaaaattgttaatttttccgaaaaaaataaaaattttatatttagaagcaagtgctggatgcgatgaacaaatcagattttgaaattaccggtcgaaattatatggtcgctctttttgatcacaacaaaatggatcgctacgcgttgaaggaattggacgaacggcacaagcaattgtttgccacttcgcctcagtgaagggcggataagaaacaaagaagaaatttgttgatttaaaaaaatcatttgcggatttttattatgtcactttttgacattttcaatttcatttccatttaaattacttaaattggtttcaattctcattagcttaaccatcttcagcatttctttgctctaaataaacatttaaattgtgacaataatttgctagcaaatttattgtttttaattctaaaaaatagaaaatttatcgataaaataaattcctttaattttcctctgtttaaacactcggtctttttcattttatctctaccacacactcttttcttttcatttctctgccaatcactctttcccttctctgtctgatttgcgttgctgcttggccaacattcagccaatcagcgattgaagtcgttgcgtgcgtttcttccaactcagctgtacgttcgcgtcccaattcgatggctctcctaatcaaagtggccattttcttcaacatttacacacattttcacttttactttttatttatgtgatatcattctaaaaatttaaacatttttccgattttttaaatttagctttttttatgttatgtatataaattaaatgtaatttttatttttataaaaagaaaagccaaaattaaaatattagataatttctgtctacgaaagtggccgaagcacatgagcaagcttgtaaataagtataaaaataattaattttttaccagatattatattgaaaaatgaaagatgtctaatattataatatttatgcttgaaatcaaactaaaatttgtttgtcccattaaataatcaaaatatttgagaatattttaaaaatgcagctgatgttgacggaagctctgagcaatcgtgcggaaccatttaaggtgcatataaactaggaatggcataatccatctcatccataatcagtgcaaggtcgtttcgtanagtccgccatttgagagattttttcgataaaacatggaataactttgcttaaaagcagccaaattntatattcttggtatcaaaagtttggcagaaataatacttttttctaaagttgaacaaattttttcaaattttgcag

SEQ ID NO: 5859 - DNA, 1270 bp, Heterodera glycines
tatggttcctcatatttttgtttaatttacacatttcttatcattttttaaagaaaatcgatacaaattgagcctagtaatattaaaagccaacctttttgttgaaaatctgttaacaaatttcactcaaattttcaaaatttcccccggcggcgcctatcggcaccgccggacccccttcttccccaaaatttttcggaaaaagcgcgccgaaaaaaagtgattgagaagcaaatctgaatttctaatattcatttagcccaaaatgattaattgtttgaaatgattgaagaaaatttgtttaaaaattttcattaatttaatttagctttaacttttggatttaattaaataaaaaaccaaaataaaaatttaattttgtattattttcaattgaaattaattaaaattcaattaaaatttttttgaatttttaaatttcccggttggtcccggttcctggtcccgtgcaaaaatcgaggtcccggtctcggttttgcccaaaattcccggtcccgctcaactctataactaagtaaaaggtgattcaaaaatgcttttggtatatttccatatttgcttaggaaaagggtcctattgcacttttttgcggtccgcttttgcaaaaactttttgggaacatggcggtagggtccggcgatgccgataggcgccaccgggtaaaattttgttaatttttaatgcgatttcttaacagattttgtccaaaaaatgaccaaatttagcgattttgagcaaattttccaagaaaatcaaggttttttaggtccggcgatgccgataggcgccgccgggaaattttttgaaaatttcagtgttagagaaaattgctttttactgatgatttgcacaacaatataaggaaattcttttcgctcattccgcattagttgtttttatgccgaagtaattttggtaggaatgatctttccggtgcaattaattagatattcctgagtgtctttggtttacaaattgtttaagaacaaaaaaaacaaattagataacccaaaatacgggagacatttattaagggtaccgaatattagtcaaaaaatatttaaccttagggtgttgaccaaatcatttagttttggtttaaaggccaaaaaaagtcagttttttggatctttgaccataactttttttagtaaaataaaaaattttgacattttagaaaccaattgagcattaattaaagagacagactggcctttttcgctcacaaatatctccgctccccccattt

SEQ ID NO: 5860 - DNA, 2217 bp, Heterodera glycines
tttttaaaataaaattctcgtttatcaatttcgaagaaaaatattttaaaaaatttcattttacttcaaattttaggacaagaaaaccagaaccgaaattgccgtgaagcgaaaattaacgcagagaaaatacaatttcacttcaaggtgagcattttcttttattttaaatttaaaattattttttttcttttcaaatttttatttaacttttttaaaattaaatatttcctagggattttgcaccgctcgagcgtgtcgttgtcaagtcaattccgttcgccgccggctcgcaatggcaatttcttggcgcgctttatttttgcacggtggtcagtgtacggtcgcttactgtagtagactgagcaagacttaacttgtccagaatgaatctcggggcccaaattaatcttaacattaggcctggtaattaatcaaagtaaagggacagaaaagcaagtcgagaccgataccaaaattaaatcttctttatcaaaattatttcccaagattggctttaatggcttctattctataccttactcaggtgatcaccaccattggatacggtcattccactccgatcacagttggtggcaaattgttctgtatgatgtacgcgctgggcggcattccgctggggctgatcatgttccagtcggtcggcgaacgaatcaatcacttcatcgggcgagtctattgggcaaaattaaagcatcttttaatagcaatacaatttttgccatttttgggggatttttaaagatgacctattctcattttggatattttaatggtttaggttggcattgtgccaaatcggccgttggctgaagcgaaaatggtgcatttttggattatttgtgtttattttacatttttgttttgatccgaaagtgacatcgattggcttgtccatgtgaagtcgcgtcatttgctgtgcgtttcctttgccattggatgtgtgaccatttcggtggcgagtcagttttttagcatttataaaaaattttccattttggtttttgactttttaatccaaaaaaatcaaaaaaatattctcagcctgtgtattccatcaacacgagcgatggtccgtgttcaattcggcttactactgtctgatcacgcgtcagttgccaagaattagcaagggaaaaacactagcagagtggttagagcatcccgcgttaagcgagcaggtgccgagggttcgagtccgctccacgtgggaacgtgggttgatttattttgcacttccactgcacaacagagaaacacaacattggaacacttgaggaccactacagtagtagtgctgggtttcaatgcttacccgaacacatcccggaccttttttgtgcggtactccctccctttagttccagcctaccgtatatcaagcacacgcttacgaataacaaaaacacttctacagtatccacaattggtttcggcgactacgtgccagcgcaaacggaccagcgattacacaaagagccattttacttggtgaatttcgaatattttcaagccatcgaggcctggcaaaattgaaacgtcaaccaacaaaaattgctgcgaagaatttttttcattaatttcaatccatttctaatgctcattacgttttattttccataatccgtctcacaatcggctttatttaagtccagccatttggccggacagtctaaaaattactttgccacaaacgaatggttagggcaaaacgcgtaccacgacaattgcacgaaggggagcattcgttcctttcagtattttttttgaaataaaaaaggatgggggagaattaaacattcccatctttacaactctccttttgaggatagagaaaagatgtaaaaatgtgagaaatagtgtggaaagaaatcctaaaaaacggataagaagagaagtaaaatagaatattacggcagcagacaaccaaagatgaagggcatacagtgacactacgaaaacaaacaaaggcgtatgggggggggggggagctgaattcaaaaattcgattttttggtgtattttctttttttagaaatcctgaatttatgaggtgttttttcaagaatttgaagacaagactatttttttgccattttggtcaacatttttttttcaaaaacatggtaaaatgggggtccggcggtgccattaggcgccgccgagaaaattttgaaaattttaatgcaatttatt

SEQ ID NO: 5861 - DNA, 3189 bp, Heterodera glycines
aaaaattattgtattcaatttaattaaagaattggcataagtatcggcggtggcattgaccaaaaccatcgacagtccgtctacagtgattccgtccgtaccgttttattaattattattcatttaatttggcattaatttatcttatctaatggaaaatgaattcaatctattgaaacctatgatttagagatcggaccggtcggtttttttcgggttttttcggtatttttcgattttcggtttcggtttttaaccgaaaaaaaccgaccgagaaatttttgagtttttcggttttttcggtttcggttttttaaccgaaaccgttcgaccgaaataattaaaaaaccgaaacaatcgaccgacttttttgacaaatcagttggccatttttttaacaaaattcattaaaaattcttaaaattttcctccggcggcacctatcggcaccgccgaccccccaaaaagctatcttttcttaaaaaattagcccaaaatctcaaaagttggcctttttgttgaaaatctgctaacaaatagcattaaaattacaaaaaatttcccggcggcgcttatcaacaccgccggccctaaagttatggcttgagctcacaattaaggcaccaaaaaagcgcaaaatggcactgaaaaaaggcacaaaaatcccgaaaaaggcatgaaaaaaagcatttaaatttttttattaatgatttttagggagcaaaatacgtaaaaactaaccaaaaactaaattttgctgatttattgataattcaattttataatgtttttcaataaggaaatttttaaacctaaaattttttatcaagaaaaaaaaatgaattttggcgttcaattcataaaggtatattctctgaatttttttagatcatttcttaggggtgtatttttccgatttttttgaatttttaatggaatttttcgggaaaaaatgccaaaaaaggcaccaaatcgctaaaactaatctttgtggtttttttagaatcaaggagcaaaaacatgttttttggctgcctttttcaattattttcccaatttatacaccattgatagagcttcaatagctctacaattttactcagaggtgatctttcgctttttctattgataaaaatggtttattgtttttttgggaaaagataaaaaaattcaaaaaaccgaaaccgaaacggtataccgaaaatttttcttcggttttttcaatttcggtttttttcggttttttaaccgaaaccgttcgaccgagaattttttgagtttttcggtttttttcggtttcggttttttttcggtttttaaccgaaaccgttcgaccgaccctcttgtccggtctctattacacatttctatttaattaacaatttaatttaattcatctttttatagaaattatctttaatttttttaaaaatgcttattccttacttctgtaaaataaaaataaattattttttgattttttcaatttaaatttatttttcaattattttaaatacaaaatttgctgaagggttgacggattgttcatcactgacggattgtctacagacggattatccgggagccttttcaaccttggcggcctatacatttttaatttttaaaataattaattttagcgaaaaaatagagacagaacggcgacaaatgtgccgaagtgacgacggtggcagcaaacggcgccactaccgccgccatcgccgcagcgatcgccgccgtcgcaccgcgtcactgtctctgctgcgcgacatttaccgtacttactgctggacccatccttcacactttacggtactttttgattgtaaatgtgtagaagtatgtttttactgcgcaataattttgtcgggaatattggttcaattagtttgcttgaaatccaaaattacaattaagcgattggatttggataaagcaaattcttttcccatttccgccctttaaatccaaaaagtatttcatttcaaatatttcttgatgcagaaggtgattgatcacaatgatgattgaaaaaacataaagttatggctctattgcgagcataaaaaaagagacacgactataaaatttgttggatgaatatgatttggtagctcttatattcctccattagcctgcaaaattgcaaagaattccgttatgttcaaaaaagttatggtcagaaaacctcaaaaaattgaatttaaaaaaaatgttgaccataagaatagagtcgattggctattgtaaattatcggcttttttggccctgatcgccaaaactgatcagcaaaaatcgttcaaattttctatcatataacaaaataaataacgaaaaaacatttgatcaatttttctgatgaattgggggtcagagcaaaaaaaaaaagccgaaaatttacagtagcaaatcgactatgctctacacgataaaagtggttttaaagtgatttggacactcatcagttgggaatgttccattgtttgactaatagagaagactctttgggctatcaaataatgtctcgaatattaatatggttcattaaaattgccaaattattttatggccgtgtaaactgtaatagagccttaacttatgccattttgccactgttttcactaatatgccatttgtccgtctcccatggctcctcctcttttatgtttagcttttttcattttccgctgattttcacaggtccgtcgtctacccacgccgtacattgaacatttggtgaacaccactggctgccccgtcggtggtacgtgggaaaacgaagatggcacggaacgatgagcaaacgaaaaaacaaacaaatttcaaaaaattgagccataattccgaatcgttgatcattgaatccccggcatccattgaaccaattttggccccgaaccgaattcgaaaattttaacttttgttattttttaatttttaactttttttttttgtgtacataaaaactctgcacgtattattttgcattttttttaattttaagctatttaaactaagattgtgatttttcgaaaatacagatgaggatcaggattattaaatttcagtaatagtttagctggtatcacacctttttgacagaaattttaaaaatttgtaaaaacatgtcttatggttttctaggtcgctgattttcgtacctggactcgaaaaaaagtgaaaacaaa

SEQ ID NO: 5862 - DNA, 1107 bp, Heterodera glycines
gaattgtctcatcagctgagttgtcatcagctgcctagtgcagaagccaagaaaaagctaaatcggaaagtaattgtaaaaaaataatgatatgttttcatattacctacctactgtatatatgatgtatactaatttaaaaattaatttttttctttttaaaattctttattttatttcagtgacaaaacgttcggtcaccccagaggaagcaagccaaaaaacagcaccataaagaaaataaagaatcaggaatctgaccaatttaatatagtttaaatgagtttgcttttcaataaaattttaattatccaaatttaaaatttattttttcatacatattaaaaaaattccttgtttttataaatttcccccatttgttattatttatttgttcaattctgttgaaatgaaaaatcgggattttaatcttaatccgtgctaaactaggggtttcaatcacagtatactattacggcctgataccgatgccggatcctaattccgggctctaagaccaacagaacatttaatttttttaaatttataatttaaggtgacagaatgaaaaatacattctattattttaccatttttaccgtctttagcaatttgcatgtaaaagcattgccgtcaaaagataaagcaggtaatctgtaaatatttattgaactttctctaagttcgtgccggaatgttcaacaattcaattatcattcaaccagggccgtaaatggcgttccaaaagaatttcctgaaatacgaaatccgctggctataccccttatccaatttcataaaagattactaatatccttctcttcaataaatttctaattttaaggcaccagaaatggacaaattgcagattcgttggcagaccaaatggagaaagtgttgaataaaagagaatattcggatgtataattttgaagttttttatatacaattgaaaagagccttcaaaaatttcaatgattcgaatttttatcgaaaaatccgaccaaaagaatctaaaaatacaaaaaatgatcgaaaatttttgaaaagactaataagtagggcgttgaattatatggatataaatcgcaaaatatggccatattc

SEQ ID NO: 5863 - DNA, 1396 bp, Heterodera glycines
ccccctgtcccccaagtttttggaaaaaccacgccgcaaaaacgttttttttttaaaaaaaagtcgtcgacttgcaaaaaaatcgcaaaatttgcagtttttgggtcaaaatctgttaacaaaccgcactcaaattttcaaaattttttcccgacggcgcctatcggcaccgtcggcccccccggttcaccaaaaatttttggaaaaagtgcgccgcaaaaaaatgggattttgaaaagcaaaaaaaaaaaaaaggtcgtcgatttacatggccgggaccatcatttcgcaaaattggccgctgacccccccccccccctccagaccatttcgcaaaaattttggtcgaccccccccccccttttcatgtatgtattcgataaatgcaaagaaaacgttcaaaaatgtttaaatatgctattaaaaatcatttttgaggaaaaaacacgataatcttaaatttactcattttagcgaaaaattaatctgaaaagcgaaattttcgcttttttgcttattttcgaaataataaccaatttttaaggaaatttaaatttaatcaaaattttcgacaaaattttgataaaaaatgtctttttcggaaaaattttccgattttggggggtcaaaatcccaatttagctgatgggggaccgttctaatagagttttttttaaaaatgccaaaacatggacataaaatatggacataaacgcgaaatatggaaaaatatagaaaatatggatatataaacccatcctagaagcttcaaacaaagctaaaaacttgtttttcgtgcgtttcaggcctcccacagtccagggaaaaaaatggatttccattaattcaactccctactaataagttaatttaaaattttttttttaattttacatttgggttttgtaaggaagaagctgactgggcgttaaaaggtgaaaacggtgttgataagataaataaatatgcctcggtagttcagtggtcggatgcccacggattgggtgtaggcgcgggttcgatttccacccgagtcctaacatattcaaattattattgtttttaattgtagataaaattactataattctcaaaacttttaatatttttttgggattttttaagattgtagaagctcatagagcaattctctccagtgcttccgaagtttttgaagcaatgttccgttacgatgagcaaaattcaaagaattccattggagaaggtaataaaatatttcattttaaaaccaccattttattaaatgtatttttaatttaagattatggcactaagaaaaattcaattttggtgcccgacattgaaattggggcgttcgaagcgatgttaacatttatttacacgaaacattttaacggattggatgccaataatt

SEQ ID NO: 5864 - DNA, 1267 bp, Heterodera glycines
  unsure (1)..(1267): unsure at all n locations
gtttttgacattttcgaattctcaatctttttaaaattaattttcgtgtttttacccaatttcggcaaattcgtccctcagaattccttttttaagtgtcaaaaacgtaccaaaaaaattcgcagaccgcttaaaggaagaggattagctaacaaataagctcgaaattttcgtctcacaaattcgttcgcaaatatttcattaatacaactctttccaattttttttttttcgggcaaattttgaattttatcccttagaaattctttttaaaaatgatcattcgatcagaaaagaagcgcaccaagcctaaaggaatactaaaaaaaaaagagagagagaatgattagcttattcatcaaatttttatcctctcagacaatggcgtcgttcagcggtggccgcctttttcctttctgcaacaaattggtcaacaattttcgcgcacttttgcagggcgccaaatggcgaacggttggattggcgcccttttttgcctatttatggcattttgccagccaatattttttttttatattcgaatcatttatttcaaaaagggaggtgtcaaatgtgggtccgttgttgatcatttttatcgcaatgctcatcctcggcctgggacgcacaatgccatggtaagacaaaaaatattttttaatgtttttaatttatttttaaagatttgtttcaaatttttaatgattattcattgaacgggttttattgcataaaagctcaaaaacagcattgttacctgttttctttttaaacagagcgaattttcagtggaggttttttggtacatattttgacgattttttcattttttgcaaaaaaaaaaaaaacttttttggcactcaaattcttggcaaaatgtcactcatgattttattttttaatctaaaaattaagtgaattttttttttaatttgaaactttaacagggcacttggcattccgttgattgatgacaatgtgaaacggcacaaaatgccaatgtattttgccgccatcaacttcttcaaaatcatggggccgtcctgcggatttttgtgaaaatattaattttaatttaaaaattttttaatcttttttctctgcagaattggtgctgctgtcaacaaattatattacacttttcctnggtaggtttttggcatttttttatttttattggagttcgacatttaaaaaaaagttgagcctanatggaatctgggattttctggataaaagccaagaatcggcaaaaaaaaactcggac

SEQ ID NO: 5865 - DNA, 3209 bp, Heterodera glycines
  unsure (1)..(3209): unsure at all n locations
tctgggattttcntggataaanagccaagaaaatcggcaaaaaaaaactcggacctttcaaggcctggaagacctggtttttttgaaatctgttgaaaaaaacaaatatgagtataaaacaattaaaattatttgcaaaatttttccaaaaatccccgaaatattcagtttttggtgaaacttgctaacaactctgtccaaaattcccatattttccctcgactatatgcggcgttaggaaaaatttacgaaatttttttatagaattttcttggtccaggcagactcaaatttttaccatatttatttattggtagaaaaaaaaatattcgtttttttgtttgaattgcaaatattgtctattttttggctttttaaatcatgctttttgttttttgattaggctccgccccccgcgggctaactcctcaggacccgacttggattggcgcctggtggatgggctttttgctcatcggtcttatgatgattgtcccctccattacgctgtttttcttcccggaatcatcaaaaaagtgcaaatttatcaaaattaaaataaccaacttataaaaaatcaaataaatatagaaaaaaaataaataaataaagtgtaaattgaataaaagcattaaatatttataaattataaaggtaatttcaacaaaagacattttttttagtttatggaaaattcaataaaaaaataaataattgaaatacaaacaaaaatttatgatttatgcaaaatccataaatatttttgcagaaaaactcagcaaaacaaagtgcatgccacaaatggcacaacagtcaatggtgagagattataaaaaataaaataataaataaaaataatctaacattttttttgtaaggaatgccgccgccgccgccgctccattcggtgccggacgtgaaagagaagaaaaagttggcactttatgaccgccatgtgaaagccgaaggcaccacagaccttggacttttgggtagtccaattctttaataataagatttgaaatcaatttaattttaattataaaattaatttaaaaatataaataaaattctctttttaaacattgtccaatttaacaacaaatttaaatttatttaattttaattacaaaattaatttaacataaaataagaaaatttatttgtaatcataaaataagttaaaaattataaaaaataaaattgtaaattttaattcatttccaatttaagcataaatcaaatttatttaattataaaattcatttaaaaataaattaaatattaattgcataactacttagtaattttaattaatcgttttcgtcttttcagcctttttgcgctcttacagtgctgttctgtcctcaaaagtttatgttggtgcttccattgcccgtgtgttggacgttttcgcattcaaaggatattttgtatgtaaatataaaaaatattaaatcaaattaaaaatttacaaataaatttaaaatagtcatgaaaatatttttctttatttattttttaaaatcaaataccattttattttaaatcgttcattttttgcccaaatgaaattttttacgcaaatttttttcccaaggtttttttgcccaaatttttggagaatcactacggtattccacaatatcttgtccatctgtacattgcactgttcggtgtcaccggcttcgcgcttggcaccggaagcggcggagtgattatgcggtgagcgggcgggagcgtcataattaattaattaattaattaattggactctattgcattttaggcgtccaatcaatggctaacttttttttttttgcttattgatcaatgccaacatttattcgtgtcaatcgaaagcttaaattttaagcttttgtttctactgtgacaaagaatatataggcattgattaagtaagaaagaagttatggccaaagaaactgaggatagcattaataaattaattatcggtcactaattggacgcctaaagtgcaacagtgccattaattatgccattatggatttacttttcacatttttaagcattttaatttaaaaatatttttttctgagaaatttctcatttttcccaacagaaaattgcgattgaatggacgaaaggctgcttattatgtgctgatcgcgtccaccatcaacacggcactggtgatggccaagtcaatgctcgggtgccattccgtggttaacaagtgaaaatttttttttaatattattcaaatgaaaataccggtaacaatatttttattttattatttccccatttttaatttttgtaattatttattctcaatttatacatatgtttaacttttctttgctttttaaatttttcttattttttacatttttaatttattaataagtaagttcacctttttttttaattttgtcaattttttatcttaatattataaaatatgtgagtttagaaggacaaaatttaatagtttaaaaacgacaatttaaatgttgttttaactttattatttcccatttttgaattttcttaattatttattctccattttatatgtttaagttttctttattttttaaattttcttattttttgcatttccaatttattcaaaaattcctttttttaaatatgtgccatttttataataaaatatgtgaatttttatttgtttttgagtgaaaatgtttagttttatgtaacttgtttcttgtttctttatttttcaattttttctttacaatttttatttattttttcatttttttttcaatttcccccccagcattggccgcgatggcattgtcactgcgttcaatttcacgcgcgagtgcaacatggcgtgcggctgtgcgcccgacacggccaagctgtacccggtgtgcgacgtgcagggcaacgccttttattcgccatgccacgcggggtgtcggcacgcggaagcgccggacgacgaattggtgaggggagggggattttaaaatgtataaaatacagtatgacacaaaaagatgggtacactacggtcacgccttcccccgcgaaaaattaaaaaaaaattaaacagaaattttttcaatgaaaaatattagaatacttttctatacgaaaattttaagcaaaaaaaatttatgaaaaattattgttttttcaaaaaaaaaaatccaaaatcgttaaaaattttttttcttgccttacgaatt

SEQ ID NO: 5866 - DNA, 2027 bp, Heterodera glycines
  unsure (1)..(2027): unsure at all n locations
ttttttttaatttactaatttaaattttattaatttgctttgttttaaatcttatctattatttttatntaattgaaatattaaaattgttttttttccttttccttttncatttcaattattaattttcgctttatttttattttttactgttctaaatttttttaatttaaaatttattatttttttaatttgaaaacaatgtttgctttcttttttaatttcatttaataatattttttattttaattaatttattaatttttttactgttaaattctcttatttatttttactaatttttattattattttttaaattatttaaaatttattttcaggaggatgatcaacaccaggacagtgccagcaattcaaacacagcaacaaaatcgtcaaaagttgacacaatttcattggagaatattcagcaaaaagaattggacaaacaaatttaatttaaaatttcatatttttgcttttttaatacggtttatttgaaaaaaaataataaaaattttattttatatttatttcattaaaataaaatttatttcaaaggaaaactaagctttaatgttattatttctaaattttcttgttttaattatatattttaagtcatttcttttctctattaatttggcattttaaaaattcgctaatttggcaatggcattttattgtttggccactcactcaaattttgcttttgttggcactttggacaaagtcaaacaggtgtaatttgtgatcaattactttataaatttaattcagaaaaatataaagcggctttgaacccgcgaaagcaaatttctccggtgctcaacacctaatccacttgaccaacactaaaaagaaaaaattctaatttctgaaaaaaattacgctcccatcgccttcttaatggaagaaattactttttcttttgatagacagatgaaccaaatgctttttaattatgctaaattgtttttctctgtttccttttttctctcctttttgtttctctaaccttttctcacaattttccatctaatttgtctttttcttttcctttctctttttctctcctccccactccctctcgcttaaagtaccgctttctctctctctctttctctatatcttaagcttttcctatgcttgtctgcctttaaagtgttatcttttcaactctactcctctcttcccacactcactttcttcccattccctctccttttcctcctttctctctctctctttttcttttcattctttctctgtctcttacttccatgcttctttgcctgcctttcaagtgtaaatcgccgcttttcactctctttgcttcaacattttttctttccttcccttcctttcttccaatcgcattatctctccctctctctctctttctctgccaataacactgcttttcctctacttctccttccttcctaatgagttgctttgcttcatctctgtgtgtatgtctgtgtgtgccttttaggcccccgggggagtcaatcaacacaaacacacacacatttcgcgtacacaaaacagccggccaagcccccctaagaatctgccacagggggataggcccaagagtgagtgccatttaagcgcaagcgcctctcttagagaagcggcggtgccacggccgccgccgcgtcttggccatctgtcgacggcaccgttccttcctcgtcgatggccaacccgccctaaggcgctgtgccttgcgggcgtgccgccccccgcactccctatgtaatcattggtttttacatacatttctcatttcctgccgccgtaaaagttttacggcacgctccccaccctaccctttagcctagaataaaaattatacctatttcccgttcgtgctcatttttaaattttattgccagattttccccattcttgtgatatttttttcatcgtgatttatcgggattatgatttccatatttttttaagccaacagaaaatggagtcttggaatttcgttttcccatttttttttgttgcga

SEQ ID NO: 5867 - DNA, 1008 bp, Heterodera glycines
ttgcacatgtttttttttttgaattttccattttttttagtttttctaaattattttttcgctgctattgcttaaagatcagacttcttttttcaaatgattgaacttctttttctaactttccgtaaaaataaaaaatttttccaaaaatattttccctattttaaccaaaaaaaattaaaaaaaagtttttacgattcatcaaagaaaattccattcccatgacggaaacgaatttttttttccgtctcgtacataaaatacgcaaatatttgctcacaattccattgccgccgccgccgcttctcccgcacggccgtcgccgcgccgcccccggcggcgggggacgcaaaagcatttttcatctccccagcagttgaagcgggcgggcggcaacaacgccgatcaaatttcacaaaatgtgttcaaaaaaaagaaattttttttttacgtttttgaaaagcccaaaaatatattattatgcccattgttttcacagaagttggaagaaaataaattcattcttaaaccgctgaattttcttccccccccaaatgccagacaatttaaaatagcaaaatatttatttatttgtttatttatttgtaaaaaaaagttcagcagcagaagaacaaaaatcactaaatctgaagaatgttcagttttttaaatttatttaatgaattttgttttaataatttttcttatccagtcgatttcacagtttttacgataaaccattttccgacttttctttttttcatcccgggtctgaaactcggacatttttgtccaatatttggtaactctgcaccgatttaaaatagcaaaaataaaaatatatatgtattaggcatgtataaaatttaaatcgaatttttatgatttgtttggatggattatgactaatggcgaggatttctaagattttacttatttttttctgcggctttaactggacgagaatgcacgaaaaacacatttttgttcgaaacttttgcattttat

SEQ ID NO: 5868 - DNA, 2080 bp, Heterodera glycines
cccccccccaacccctaatacttttcccacctcctcctgccccacatttgtgctgttttgtggtccaaattattatgcatttatttcgccgtcccccgccgtttcccacactcataaaaatatgattattattttgacacggcacgacgacgacgacacctctctaaaattggattggatttttgtcgatgttccgccgccagtggcaaattgaattttctttctttccttaacgggtcaaatttaattaaaaatttcataaattttatttatttatttttcattttatctcgcttttttattttattgaaattatgccatctggtaataatttttttcatgatgtgttcttcccaattcccatcaaatcaaaattgttggattgatgtaacccaaaaagctaaaaaaaattttctccggtcgaaattttggacgaaaattaaatattccgggaaaaatcgtaaactaaagaaacttaattttcttctaatgacagtttgcattggatttttttcttaagaatttcaaaatgatttttttttttttttgcaagaaaaaatgtaaaattttaagaattttcttttcgttaattttcaagtattttattattttttgaagcttttttttttgttttactagcaaaaaattcattttataattttttaagaaaaaaattaaataatttttttttaatttaaaaaaaagtttgtacgaaattccattaaacgatttatgccatatgacacagcacggggcgtacgtcttgtggaccacccaaaataattttttatattcgtaaattccattttttattaattttcccgttaaatttatggtggttatgttatgtgatattcaaagtcgcttatcttagccgtatcttatcagttgttccatttttcatgagaatattatttcccaccaatgatttcaaattaataaattcaattatttaattttgacatttttttatagaaaaaactttcattaaaaaatattttcgattaaaatattaattttgataattttttttagaaaaaaatccattaaaaaaattttattgaaggaaaatttttaattctaacaattttttataaaactttcattgaaaaactgtttttggttaaaagtttttttttaaaaaaaaactcattaaaaatattgtttttcattgaaaatttttaagttgctttcttaaaaattggcctcattaggtggaatttgctggccaagaaaatattggttcgttggctctgacaatctcccgaaaattctttctttatccattctctgctccccccgtccgtcatcgacttcgttatgatgatgaattaggctcattttggccaaagaagttggttgacagctcattaatatcttccgccgatggctttagcatttttggccaattttgctaaaattcttttccataaaatttaaaaattatttttcaactaagtttagtttattttttattttttgttttctatttttactttttaaaggaactttactatatttaattttcatttgtaattttttaaattaattaatttaaatttcgttagtctttgcttttgtaattaatttttcacttttttaacttttaaaatttttggttgagcttattttaattttttataagaattttattatgtttaattttcagttttaatttaatttgtttagcgtaattaattaaattatttaaatttcttcgttaatttttatttttgttttcaatcttattactaaataatatttgctttttaatatataattttaattttcgcttttctttttatttataaagttccataaacaatttttcctggcattttacccttaaaaatattttttaattaattttggaatttttttaatggatattctaattgaaaaatgtccccgaaaatcccccgcagttttaatccggcctttgtctgttcctctcctcatttttcctcatcctcccattcattcatttatcttccaaatctttcccaccacaaaatccgcttcatcactccacgggttttgcggggacgatgtgccgtcgttctccccccccccaggggat

SEQ ID NO: 5869 - DNA, 1241 bp, Heterodera glycines
  unsure (1)..(1241): unsure at all n locations
aatcttcagaagatcgatgccgcgcaaagaccttatcatcaattccaaatttccgtggttttgtgccaaatcttttgttgaatttctcttccatcgccaaatcccgaatcaatggtctgaatggcggcggcttcaacaaatcaaatgtggtcctgggctttcgtccgagcagcatttcagctggggactttgaatttggaaccgaatcattcggcgttgttctgtaggtgatcagaaacgtttcaatgatctcttgattcggcattccttcccccttcaattttcggaaagcccgcttaaatgtgtccacaaatctttctgcctgcccatttgacattgggttgtagggcgcagaaaagagatgggtgatgccattggctgctgtgaatttggcaaattctgaactcgaaaactgagttccattgtctgaaacaatcgtttcagggatgccgtggcgcgtaaacaaataacgcaatttgtcgagcgttgccgtggccgaagatgttgtcatttcaaatacttctgggtattttgaaaatgaatccaccacaattaggaacatttttccgtaaaatggcccggcatagtcgatatgaattctttgccagggctcggatgacttcggccacgaatgaaggttcactttgacgtgcgccttcgcagctgcttggcaaggctcacatttttggacaaattcttcaatgttttggtccatctttggccaaaatacatattgacgtgccaattgcttcattctcttcattcctggatggcctttatgaaagaggtgaagaattttgctctgaaaaatcttcggtatcaccactctttcgccatacatcaagcaatctttgaggattgacaaatcatcctttcttcggtgaaacaatcggacgatttcctcttcttgacccaaatctttgtcgtttggccaacctttttggacgaattgaacgacgtttttcaataaagcgtcgtttttggttgccaaaatcaaatcatgaaattttattggcaaatttttggtggccaatttcagaaggtcttcctccaatcccgtgttcagatgcatcggccgagacgatgatctccaaattcgggtcataatgagtgagcagcaaatttgaagtcaaaatttcctttcatttatcaaatgctttgcggcaattttctgcccaattccattccgcgtccttcttcagcangtcgtcgagcggttttctgacgaaccgcatgttttg

SEQ ID NO: 5870 - DNA, 5525 bp, Heterodera glycines
gcgtttgatgtgtcagcaattgctgaaccaattgttgctgttgcgtcaatgtgtcaatcaattgttgaattgtcgcgttttggttggccattttcgtcgaataaccgctcctggcgaaacctcaaccgcctaggtttcttggtttttgtgtcgaataaaaccgcgcctggcggaaaccgcaaccgtattggtatctgggtttttttgtagaaattccacgattaaccgcggctggcggattaatcggatcgacgaatttggcttgttgaaaataaaggtgcctcctggccgaccttttttttttgcagacaaattcaataaattgcactcagcaatttattcaaataggcgctgagctcaaatgtagggcgtcgccaatttgttcggtcctcgaaatgtcgaatggacgaacaaataaataatttattgatgacaaattaaaataacaaataaataagtcggaggacggcggaggagagcaatttgggaaatgtgaacacaaatatcaaactgcatgaatgaaatgaggggagggcaaatggtcacaaatacaatcaatagaatgtgtctgacagtgaaaggtcagacacaacaaataaatggaaatgaaacaaattaaataaataaatgtcttatcgggttccacccgaacaatttttaatatttattatattctttaaagaacattttcaagaattgttaccaaataaatttgggaaaattgtttggaaaactcgtaaatccttttttgacccccttttacaggagtggaaaatgcgattggtgactttcctttttattacacatttaaatatgaacgaaatagtggagaagatggaaatgaatgtaaatataaccatgtagacgcaaaagatgctgagttagaggaacatttgtcattttaccatgacaatggcaaagatgaaaagttggcgatacttttgaggtcgtattataatgagaagaaagagttggaggagcgcgaaaaaaattttgcgcaggtgaacagtttgaacgacttgagggcagtattgagggcgcatgataatcggcacaaaggattggctgagcaagaatattatgagcaggtgatcaatcaacaacatatgttcggtttcttgcaccccatttcggagggaaacttggagaggcaaaaagtgatttatgacgctgcgaaaaatgagttggacgcgtacatgacgaagatgaagggccaattagagggacagcacaaacaactcgaaaatgatgatgatgaatttagttcgaagattaagcaaattgagggacagccagagcagtccgaaaaggatgatgacgaattgaattcgaatatgaaacaaattgaggagaagcagcccgaacaatcagtgataatgaagtacatccgaaaaattgcgaagaaactgaagacttgtatgaaagggcatgtcaaaaatggaggagataacagtaatgagaaatgtgaggattagatgcaaaatatgagccatggagacaactattgtctcttgtctcgggggttcctgatcagtctcggcggcaatattgcatagagaggggaaatttcaaatttgcggtcccgctgcgggattagaactcctaaattttgcgggaagggatcccgcagttataaatcacgcaaaatcccgcatttaaaatttacgggaccccgagcgggattgcgggattttggaaatttgcaaaaatttaaaaataaaattattaaaacctccaaaaaactaaaatacatggcatgttagggatgaatccataaatttaactactttacattgctttttaacattgctttttatgtcgttttttgcaaatctagatgaaattattgagatgaaaaatggctttaattcgattgaatttattttataaatttatacaaaaatatttggcattctgtcctttaaaatttcaaaaaaattcaatgaaagtccccgcagaatccatcacaaaaaaatcaattttgcgggtcccgctgcgggattcgagccaaaattttgcaggacgagttccctcatgtaaatcccgcaattccgcaaatcccgaattttccaaaaatgcggtttgcgggttgggaccccgcaaaatcccgcgcaggatcccgttccgctccgccaaaattacatatgcatttacttcggggaatatctaaattataaaatgtcattttttatgtttatccgatgatagtttcactgcactgaactaagcatctgttatacagagaattgcaacttttaaaattaaaatatcattagaaaaggatccaaaaatgctaaagtcttcaataataaataattttattcattgttcaatttgtcaaaatgcacgatgcttttgtccctagtgatgggcagaaaatggatttaattattataattttagttgaccaagaaaaagcaaaaaccaaaaaggaggattaaggaagtgaagaaggaataaggaaggggagaaggatgaagaggaggagaaggataagaaagaagaaagattaattaggtcaattctctttaaaattaatttgttttcttggcatttctctacagtcttgtgattttaatgatttttatttcgaagaagtataaattggcatgcaactaatcaacttgagaagcgcgcaaaaaaacttacaaaaaggatgaagctgcgagcgacagcgatttattgggggtctaatagaatctttgcttccaactagacaatttctaaggttttcagtcactctcattctctcttgttctcaaattacaaattacggtttttggtgttttggttttggtattaatcacgattttttgtcatttctttgtctccattctcgggagaaattcttgatcttaatcccgatcgaaatcatttctcaaatttcaatgaatattacaaatttgtatgcattttacaaaaagcaatactctattttaattaaaaaaatttataaaaaggaataataattataatttatttttacattgaaaaaaaattggttgaacattgccaagtatggggctggagaggagtccccgggaaaaattaatgggagaacggtgtgacgatgggaatgatgctgtcggtcggcgtgggctcggcgttcgaattcgatgtagcacgggtggacaaacgctcaaagcggtgatggagcggagtttgtcgacttccctcctccttggaggatgagtaattggacggactgcggctgcgcgtggcagaaaaagaggctctggggttcaatttccgtcaattctaacggaaaataatcatgatgactatggccgttcaatcaggtcggaattccggtgcggaggcggcgtgtcatgctacaacgggacgtcccacgaattcctcggtcctgaacatagtcggcagctcgggacgacgcagaggagtccgtcgctggtctcgccactgatcagcaaccgacatttgggctgaacttgacacgcccgtgccgggaggcagtccaaatagtgccaaacgactggctgatggttaacgaaggatatcttccgcctggcgtcgtccattggtgttaagccaccactcagtccagagtaagcggagacgccgatgcagcaagacaacgagaaacaaaaaaaaaggggagtggtcgaagcaagccgataatggcggaggacgccgtaagattgattagattggagaggggatggatttcccttgttccccgccttgccaacactcaaatccttctctgtgaccaaggggggttttgtcaaagtttattgcgtgattggattaattggcgcaattaaaaggaaggatggcggaaaagtagtgagagggtgtaagaccgaaattggaagaaaaaaaggtgaagagtgaagtttgaagaagagaagcaaaaggaaattatataaaggagagggtagggtaaagtaaatgggtatagtaggaagggacgggagatgcgaggcgaaggagaaacaaaatccaaacgagacaaaagaaaaaagggaacacaaattgggaaaagggaattctgagcagaaaagtgagaaaagagaggcacgaacaaaggcgggtgaagggaaggagcaaaagtgtgaaaaatgcaaatgaatgggaaattcatgatcaaaaatggaggagagagcgcaattcaaaaacctaataggcgggtgacaaaaacaaagtgttggccaacccggggggagaagggctcaaagtccaattgtaaaaacgaagaaaaaaaggggcaaaatgggaggacgagagaatagtgaaaattggtgaaagaatgaggatcgatgaaaggacataaaaaagggaaataacattgggcttccgatcgcactctcgtcgctttcgcgacagaagggtcaaaagtggagatgattgagaacaataaatgaatgaatgtagactgcggggaaaggagggaaaggcagcatttaaataggcagcaacgagtcggggattaagagacaaatttgaaatatttcatttgagtcccatcaaataagtcctcatacatgatacatgacaattacctagtattttaaatagtttatttttttagtaacttgtgtttttggggaacactttaaggaataataaaaaaagaatactggagattaatgtatattaatttacaaatgtttgttctatcaacaagtatttctatatagttgttttaatttgtagtttaattattgcacatgatggcagttttaaggaacgtctcagcatggaattattggagtgccgagtctgaaagtggtcaccaaaaaaggtattttccaagaccaccaagtaacataatgttttaaaagtaatcttgggaaattccaaatttaattaaactgggtaaatcgaccacgctgagtacgaatatggccttagatttaaatctgtaggttctcaatgagcctgtacagctctaatttcatgaatggggttgaagcagtacaagctcacgtagcaaagataggtcagatttaaggccatattctaattctatggtcaaaattgtacataaaccttcattttcgttatatcagatttgttttttaccataaaatatttgagaagaattaatgggccaattcccaattttggcatggttagtagtgctgttcgagactctcggtctcgagtctcgactcgagaaaagtctcgggtttttttggtctcgggttttcaagtctcggtctcgattttcgagactcgagaccgagaccgagacttttttacacccctaatgatttggcttttcataataagaaaatgagcttatgaatgagaattttttatggcaaaatattgacattatgccaatttaaaataaagatgaaatattttattcgtttcacacacatattttagttgtagtccttaatttttaacttttttagagtaatggatccggaaatttctgataattttccggctgaaaatgagcaaagcgatgaagtgtttattgatgaaaatgaaaacaacctttcaaagcttaaactgactgaaccctccgcttcatttttgcgttattacca

SEQ ID NO: 5871 - DNA, 1131 bp, Heterodera glycines
accgcacttcgtttcaggttcgagagcgtttgtcgcatagaaattttatcaaaaaaagagatagccatttttctggaatatctattaaatataaaaattatttgaaaaataaaatggccatggcgcaccgcacttcgtttcatgttcgagagcgtttgttgcatagaaaatttctcaaaaaaagagatagccatttttctggaatatctattaaatataaaaattatttgaaaaataaaatggccatggcgcaccgcacttcgtttcatgttcgagagcgtttgttgcatagaaaatttctcaaaaaaagagatagccatttttctggaatatctattaaatataaaaattatttgaaaaataaaatggccatggcgcaccgcacttcgtttcatgttcgagagcgtttgttgcatagaaaatttctcaaaaaaagagatagccatttttctggaatatctattaaatataaaaattatttgaaaaataaaatggccatggcgcaccgcacttcgtttcatgttcgagagcgtttgttgcatagaaaatttctcaaaaaaagagatagccatttttctggaatatctattaaatataaaaattatttgaaaaataaaatggccatggcgcaccgcacttcgtttcatgttcgagagcgtttgttgcatagaaaatttctcaaaaaaagagatagccatttttctggaatatctattaaatataaaaattatttgaaaaataaaatggccatggcgcaccgcacttcgtttcatgttcgagagcgtttgttgcatagaaaatttctcaaaaaaagagatagccatttttctggaatatctattaaatataaaaattatttgaaaaataaaatggccatggcgcaccgcacttcgtttcatgttcgagagcgtttgttgcatagaaaatttctcaaaaaaagagatagccatttttctggaatatctattaaatataaaaattatttgaaaaataaaatggccatggcgcaccgcacttcgtttcatgttcgagagcgtttgttgcatagaaaatttctcaaaaaagagatagccatttttctgggatatctattaaatataaaaattatttgaaaaataaatggccatggcg

SEQ ID NO: 5872 - DNA, 1049 bp, Heterodera glycines
aaaaagagatagccatttttctggaatatctattaaatataaaaattatttgaaaaataaaatggccatggcgctccgcacttcgtttcatgttcgagagcgtttgttgcatagaaaatttctcaaaaaaagagatagccatttttctggaatatctattaaatataaaaattatttgaaaaataaaatggccatggcgcaccgcacttcgtttcatgttcgagagcgtttgttgcatagaaaatttctcaaaaaaagagatagccatttttctggaatatctattaaatataaaaattatttgaaaaataaaatggccatggcgcaccgcacttcgtttcatgttcgagagcgtttgttgcatagaaaatttctcaaaaaaagagatagccatttttctggaatatctattaaatataaaaattatttgaaaaataaaatggccatggcgcaccgcacttcgtttcatgttcgagagcgtttgttgcatagaaaatttctcaaaaaaagagatagccatttttctggaatatctattaaatataaaaattatttgaaaaataaaatggccatggcgcaccgcacttcgtttcatgttcgagagcgtttgttgcatagaaaatttctcaaaaaaagagatagccatttttctggaatatctattaaatataaaaattatttgaaaaataaaatggccatggcgcaccgcacttcgtttcatgttcgagagcgtttgttgcatagaaaatttctcaaaaaaagagatagccatttttctggaatatctattaaatataaaaattatttgaaaaataaaatggccatggcgcaccgcacttcgtttcatgttcgagagcgtttgttgcatagaaaatttctcaaaaaaagagatagccatttttctggaatatctattaaatataaaaattatttgaaaaataaaatggccatggcgcaccgcacttcgtttcatgttcgagagcgtttgttgcatagaaaatttctcaaaaaaagagatagccatttttctgggatatctattaatataa

SEQ ID NO: 5873 - DNA, 1051 bp, Heterodera glycines
tgcatagaaatttctcaaaaaaagagatagccatttttctggaatatctattaaatataaaattatttgaaaaataaaatggccatggcgcaccgcacttcgttcatgtttcgagagcgtttgttgcatagaaatttctcaaaaaaagagatagccatttttctggaatatctattaaatataaaaattatttgaaaaataaaatggccatggcgcaccgcacttcgtttcatgttcgagagcgtttgttgcatagaaaatttctcaaaaaaagagatagccatttttctggaatatctattaaatataaaaattatttgaaaaataaaatggccatggcgcaccgcacttcgtttcatgttcgagagcgtttgttgcatagaaaatttctcaaaaaaagagatagccatttttctggaatatctattaaatataaaaattatttgaaaaataaaatggccatggcgcaccgcacttcgtttcatgttcgagagcgtttgttgcatagaaaatttctcaaaaaaagagatagccatttttctggaatatctattaaatataaaaattatttgaaaaataaaatggccatggcgcaccgcacttcgtttcatgttcgagagcgtttgttgcatagaaaatttctcaaaaaaagagatagccatttttctggaatatctattaaatataaaaattatttgaaaaataaaatggccatggcgcaccgcacttcgtttcatgttcgagagcgtttgttgcatagaaaatttctcaaaaaaagagatagccatttttctggaatatctattaaatataaaaattatttgaaaaataaaatggccatggcgcaccgcacttcgtttcatgttcgagagcgtttgttgcatagaaaatttctcaaaaaaagagatagccatttttctggaatatctattaaatataaaaattatttgaaaaataaaatggccatggcgcaccgcacttcgtttcatgttcgagagcgtttgttgcatagaaaattctcaaaaaaagagatagccatttttctggaata

SEQ ID NO: 5874 - DNA, 3607 bp, Heterodera glycines
  unsure (1)..(3607): unsure at all n locations
gcatacatattaaagcaatggaagacacaattgtaaanttattaaacatttgggaacgtcatttttaggtagaaaaatgcataattaagcgaaagaagttacaatttgtaaataattaaggagttgaagatacattttgattatgtgcacgaacttgtcgtttttaggtagaaaaatgcataattaaggagtgaaaatgcatgcagaattaagcaatggaagttacaatttgtaaataatttatcatttgggaatgtcattttagatagaaaatacataattaaggacgtgaaaatgtttgcataattaatgattggaagatacaatttgaaaataatttatcatttgggaatgtgattttacgtagaaaatgcataattaaactaacgaagatactatttgctaaattaaagaaaatatattattaagcggatcgatggtaaaatttgataaaaagtaaggaatagaagatagaattttattgagtgaacgaaattgttctttttaggtagaaaagtacataattaaggagtgaacatgcatgcagaattaaacaatggaagttacaatttgtaaataattaagcactcaggaatgtcatttttgggtagaaaaatgcataattaagagaaagaagacacaatttgtgaaatattaaggaatttacgatgcaattttaagaaaatttatgaaaataacgaatatatggagaaattactaaaaaatgtttacatatattggtgtgcgtgtgcgtgtacatacatgtacttgtgtgtgcgtgtgcgtatgggcgtatgtacgaaaaatgatatttagacatatagaagacggtttgggataatagagaacaacagtgaaagtaaacagatatagaagagtagagaaagtgtattacggagaaaaggaaaataattcaaataaacccgaaaccaaaagctaaatactagattttgtaacgaaaaccaaggaaggtagttttcttcctatgttacctttcaaaggaatcgatttataggataaggggatgccgtgacctcacccccctctctctttctcaaattatttggttacactcttcctcatctttgcccttcctctccaacatctccttaccggcgcaaactcactctacccgttcccgttttcagcttcttcctttaacaattcaatgggaaatgtgtttttactaaaaactctatgaaaaaatcgaattgtttgccaacacaaccataccttgtgggacattggttactggagggacaagcctaatcagatattggctaccggagagccgagccttgtgaggtattggttactggatgctcaagacttacgatgtattggttactgtagagacgaatcttgtaaggtattgtctgcccgagagccgaacattaggatgtttggctaacaaaaaaccacacgttatatatatgtttctgttttttttatgcatatctatgactattataatgaattaattaatttaataaaaaaagtttacacccccaaaatctgcattctttttctgataatttagaattaattgtcatgttcatcattcataccgtaacggagttaaatctgtaaacaaatgtcataatcatttattattcgtcacttccttttgtcttattcactctacaatatttttgctagttattttttatgacttatacactcccttccttaattaatcataatttataaatttcactctactgaaacatatgtaaatctgttgaagttgatgactatattctcagattccaatattatgcttcatagatataatttcattataacccttctttctgcataaaatcttcaattggtaaaaaattaaggaacaattaggtctaaaattacaattatacagataccatacatacactaccagaaaatcttagtaatttatcataatacttaaccatactaaataattgtaaaagcatctcaccaaacattgttccgcctttgaaatgattaattgatttttagctatattacacaaaataatttacgactcattattaattaaaattcttttacgtcattctcggtaatttggaataattaaacaacaattagcccccatatcataataatatttcgaataaacatttttctagaatataaaaattaatttaatttaatgaatattataaatttagaatttaaacaaaatagtgatggtaaaaaaaaaattgattttaagaaaaaattctttattttatgcagttgaaaaagacaataaaattagtagttactaccacctccccccttccggtccctttaacctagtagcggtcagtcattagcgctcaaattatcacaaccgtgcgctcaaatggcccctgcgggcgctcatgtggtacgcgcgagtgctcaaatgacccggcgtcgcttccctcccgacagctgacgccctttcccttctccattaggctttggttttgcgaattatttattttatttttaatttaaattatttttaatcaataaaaacccttcaataggtttaggttcacccccgcacccatccaataggtttaggttcactcccacacctattcaataggttttggttaaccaataggctttggtttggaacggtggttttccaacccccaaaaagggggggagtaactactgaaatgcacagaatgggcaacaatgttttgatgatgaccacatttgcgaacagcagtgtgtgggacagagtgacgtgagttgtggcaatgaatgatttatcacacctttttaattggcacaattaattaattatattttcgtttaatttttcacttttttattgctcaaatttattggtgatttttcattacatattattttgctttttagagtaacagttgtggccaattcttcccaacatcgccaaattagcaatctctccaatttgttcggcgcttccctctctttggcaccaaatcctccgcaaatgtgcgcatttgatggaaaactcctctagtagcgtttttaaattaatttgtgaattgccatttagggtcgaagtgaacaaagtccaaccctggtactacggccttatgaacatccgacccggacttaccggcaaagacgggaatgagcttcaaagtgaatatattatgccttacaaaaatggagtgccggcaattaaagcggtgagaaaaatttaattgattagtttaattggaattttttacaattaattaaatgaaagttaaatgaaatgtcattccaaatttaggtctcatcacttcaccaacaaatccaacctctgctcaatggctttgtgatcagaacagtgaaaggggacgacctttggctgtccatgagcaacggagacggaccaatggtcgcccttcacttcagttgggcggagagcagaccaaccaaagtgaacgccgtacttgcccaaattgagagggtaagcgaacgaatcagccgacggacagaagagtttctgatcagacaagtggagaaaggggcacactgatcaatgaatggaagggcattcgcattccaatcactcaaaagtctcctctgatcattctctttcccttgaaagaaattgcnccatcattcgatcgtttttctgactgat

SEQ ID NO: 5875 - DNA, 3270 bp, Heterodera glycines
cacatttgaacgagtttaggtgagttattttattaaaattaatttataaaattcgtaaatttagaaaattggctgagaaattggatcctacgcacaaattcaggaacaattttataaatgaaaatatattcgaatcggagcatttttaagcggcagaaattgatacaacaaaattattaaaagaatattttacagatttaaaatttaaagtcacatgaatttgaaagcataaaatttgaaattataaattgtttttcattgtcaaccacgaacaaacttctgatgctggaaattacggattgtctttaaatgaatttctaaatttttaagaaaatttctatttttttcttactataaaatttcctccccggtgagggtattttccttcgacattttccaaatttctccagccagtccgacaatatcgtcgagaatttccttcccaatcccgaactttctcttcccgagaatcggggatcaaccctctttcaccctctgttgacggcttattttattctgcgaataaataaaataaaatgagacaatttggaaaatgcttaaatattcaaaatgtaaaatgtattttaattgaattttattaatcacctatttatttgtttgtctgataattctgacaaacttacagatttaaaataagaaatttgataatgcaaattataccaaattttgtgaattattttctaaattaattaaattcactttgagtcttccccctttaattcgaaaactgattttctttattttttcattcattttcagtgaaatagatgaaattttgaaaatgaatgaataagttttacaacgcctcctcactaactatatgcatattcattaatattaaattattttgcagtttttttccgtttcttttttcgtttatccaattttttggctttgaattaattaatttttttttattactattgctattaagcaacaatgccatcattgctgtcataattgacgtggttaagtggtgaataatcgatggtggctttcattcattcattcgtttaatgctaatgaaagttaaattacacatgattaaataattatgaatttgctggcatttgctatggctaataatacgtgcgtaaatgtaatgctcacaatcaggcaaatttaacataaaaattattatacaagggctggcattagggttgggggaggggaggggaggcaattaaaaagccatcgcccctcctcaataatattttaaaaaagcagctaattataagcattaaatgatatttcaaatttttcaaaatacaaaattaattcctctttttaaattttacatttattttccttcttaaaaattccctttcccaaatccctcagctttttcagaccaattaattgactatggtcaggatttcgtgcctttttgtggttgcgacttattgtctcaatgggctgcttctcagcacgacaattatggcaaatagcgatgaggaaacggagacgaaaatgccagcaaaaagaccacgaaagcaaaaagaaaccccggattattatttaagtagttatttgccaactgattattcccgtagctcatcttcggcagagccagacaattcatcggacgaagattggaacgcaaaagaagaagcggacacgaaggacgaagaatcacccaatgtttcgttggccaattcatcgtcatcagctgctgatgagaagcaattgctgggccacaaagtgacggttcaaaatcgaccaaaaacgggacaatcggttcaaaataagccaaaaaagcaaaaatcggttgaaagttctccggaggacaatgaaaacattgaaagattaaaagcggaagtgcaagaattgatgagaaaatccaaagcaaaagcagcagcaggggtcggcagcagcaaaacaaaaacgaatcttcaaacgtcgaaaagtttcaaagaaagtggggacagaggcaaagggaaaggcaaaacaacagaagaaacaggcgaaccatcgaaaaaaatgaaaaaagcgacgaaaggcaaagtgccaaaaaaacaaacatcgtttgatgatcttaatatttcggaaattttggcaaatttggataactcatcatcggacgaagtggtctcgaagagtaattggcacaatgctaattaatcaataattaattaattggccatttcagaaagtaaagccccagcaaattcaagcaaaagtttgaaattgagttcgccgtctaaaaataaacagaaacagaagcaaaattcaagcgacgaaagtgtggaaataatcacacctgtgaaaaaggaacggatgcaaaagagtaaatgctcaattaaaaagtataattagtgattaattgtcattttaagaaggcaaaggagtgaaagtggagaagccaacagcgagtgaaaatgcaaaagcaatggaaacgttgaacattaacgccggtaggataagcggtgctatgacgttagtcaaaaaccatcataatgggcgttagtcaaaaaaccatcaaatgaaaatattttttgatataattttgctcaaaagcatctaaatttttaattcttgatatcattcgataggcctaagggttttctattagcctacaaaatttcaaaaaatttcgttaagtttcaagaaagttatgactaaaatcaaaaaaacttggttttttgagcttctcaggtcataacttttttaaacttaaagaatttttttttaaatttgcaggataatagaaaacacttaggattatcgaaaaatatcaatattataaaatttgatccattttagacgaaattatgaataattttctgtcaaaaattattcatttgatgtttttttgactaacgcccattttgatggtttttgactaacgtcccagcaccggataagcgccataataattcaaagacttctttcttgagagcgaatacgatgccaaatccgaattattatgattgctagcaaaggcacagccaaagccttggttttttttgggggggggggggctaattgcaagcccattaacaaaggataggtaacccaagtgactatgggactttcgaactaataaactttcagggtaactaggtagaggtggtgctaggacgaagttcgaatagtgcaagtaattaaattaaatttaaaaaaatatatttaaatgctaaattaatgattttacttaattaatagggatgaattcccaaaaaatgattgccgaatataattttttttttcttgataaaaattttcagtttattgtccttattcaaaatc

SEQ ID NO: 5876 - DNA, 1618 bp, Heterodera glycines
  unsure (1)..(1618): unsure at all n locations
tcatacagtttaattttttagttagcgtatcggaattcgtataaaatccacaaaagatttgcaatagtatgacctaatctgattgtagtattttttgaagctctggtttaggattcttcttcagtacaacattcgtgatgtcgaaccaacaaatcggtgatgtcgctgttccggcagcagttgctctgaatgaacaacttaatcaagtccgcattacactttattttcgcggagtatgttgttctccctcttagtacacacaatatcatctatgagcctatatcaagtccattctgatccgtccagtcaagatatgtatgattttgtcttatattggtcactagtttgtccatattcaggaatatgaatacgaacaaaatacatcatataaatacggtggaatattgtatctaacctattataatacgtacatggcaattgaccctcacttgctatattcgaacaacgtcccagcgcgggtagaggtcacccaccccccccccatttgaggaatgaagttccaaaggatcaacaattgcttaattaaaatatctttttggaaattgcctaaacactgagtatttgtatattcttgcttcgttagactgtgctttcaaatgaaaccaaaaatgaacggcttattcggacatagtccaagaaactcaagattgatagttgatgtactcataaaattttgattagactcattaaaatccattggctcataaaagtcaattgggctcataaaatgcattagagtcataattttcaggcacgtctaaagcaacgccgaaacgtaaaagaaataacagaaaagcagaatgatggatgagtggcagacagaaaagagattgttgggctgtgtttgcgtggaaattactaaagtttcctcacctttcagtgaatgtttggctcttttgcagttttcccgattcataggggacagaaaaactttccgcggtaacttacgccatgtaatttctcagcgaatggttttcatattaccgtatttcttgcccctgggggttctattttcaacccctctgaggggctatttgaaatacggcatttttcaaaagtttaaatcctggttgtaaaaaatgaattggtcagctttttccattagtcccctaatgatctaacgattgtctgatagagtcacttcccatcagaatccaatccgatttttttttttttgcctaatcaggctttggcctgctatcgatgggcaaaagatctggttttggacgcctttttgtgaaagtcccatcccgaagaaaaacatattagtaatatgaattttgtgtcgtttcggataaactgcaatagagccgaaattttgggcttttcctttcatcacttttcactttcgcacatttaccattcgatagccttttggattttctctatagttttttgaccataatctttttgaaacctaacgaattacagtctaatagagaaatgataaactggttcaattgagacagctattaaaggagttattctcaaaaaaaaagctgtcgcccggttgtccccctaccgtatgcttttgccccatccttcgaatgactaatgangcactagtcctactgctttaaacatattgcgctttttg

SEQ ID NO: 5877 - DNA, 815 bp, Heterodera glycines
atttgaaaaaaaacgtataaacaaatgttttgtttgctccaccggaatggccggaacgaaaacgaagggacggaggacactttcgggaaaaggagccaattgggggatgggatttggggaattcgcaggcggatgtgctgctttttgggcagaaaaatggcgaaattggggatatttgttgggaatgcaatttgaaatgacccccgaggggacattttgtgtctcccgtcccgtccaaattagttattgaggaccaaaactgatttttgcttgcggcgaatggtggcgggggggggaggggaagggtacgaattgtgaaagagaaaattggggggaggagaatgtcgaaattaaaatggagggaagcaaaattgtctaaaaataaattaatttcgttatgtcagtcagaaattttaatttgcgccaattgtaaaaaatggaaattcaaatgaattttaaattataattccaaaaaaactgtcattaatatcgtactaattaattagtgtttttggagtgattgtaaattgtggtccgaattcgcctcatttatttttatgaacacagcgaaagataataaaacggacggagaaaagaccaaagggcgattaatgagctttgccaataattgaataactgcaaaagttgcatgttttgttctgcgggtggtccgttggacaaagaaacgatttgagggtcaagggaagggcggcggagatcaaagggagcgatttgagcggagggcgaaaggggcggagagagggcgaccacaccctcgccccccccgcaccccccaaagatcaaatttgctgatt

SEQ ID NO: 5878 - DNA, 4003 bp, Heterodera glycines
aaatgctttcaattagtctaaaaggtctcattaaggggttaactttttgttaattgcgttgaacggtgtcatggcaattaataagtacattaattgttttgattaaaattgtgcgaaaagccattgacccgcgctgccctccccgccccaatttcgtttcatttcacacacaaaagtcccaatgacccgttcctttcactttccttcttctacttcatccattgtcgagtcgacctgtgctaatcggatgggcaaatagcgcaacaatccgtcgactatttcctcccctcccccctcgtattattttattatccatcatttattaatgacccccccccctacttcatcatcattattatgtttgtttttgtcttagcacagcctccaaactcacaataacccgcattcattcattgtcctaacttcgctaaatgaatttgaaggaccacagaaaatagttaatccaatgagaaaataaagaaagtgcggaatcgaattactccgccagtaacacacaaaacttaagggatggataccgtaacatttgtacaaaaacccactcatcggtacaaaaattggggtgaattgaagtaaatggaattaacagaacaattgcagtgccatctcagataaaattctttcataaatattcaccaaagcattcaattggcgcttctctggggtaaaatgatgggatggatcatcagttcattcactcgtttcattcgatgtgttttgcgccgtttccttccgttttgtgccgcgttcgctttcttcttcggcacctcttttcgatggcatcatctccccgttgtccaactgcaaattgccccaaaatgcaacttttttgtgcaactcaaaccaagtctctcacccttttgcttttggtccgtctgttctggaaccaaaccttcacctgaacaaatgaaattcaattttggtttcttcccataaattcgctcattccgtcgtatttttgcagccaaaagatggcattttatttaatgttttgacaacgaaagcgggttcaattactgacaatgaatgagctcataagagccattaaggtaacacaaacatttgcatttattagtccccaaaatgtccgtgccgtccgtttcctttacttagccaccgaaactgaatctgtgcgggccaatttggcgcagtgtgtgcatattttgtttgtgtgccgcgtggcagagcactaattgagcccattttcgtcactccatttcccaaatgatagtgccgctgggaatggcacgcccatacagcaaatatcattaccatagtaaatgggtaattaaattgtgccgacattggaaggaaacggtgaaaatgaaacgaaatgaaacaaggggtcgaatttcacttttgtaaggaaacaaagcaatgccatttaagaaacaataaatgccaaagtttgcaattaattcgttttgcctatccctttttttcacctgcgtttcggacagtgccaattgtttggccaacactttccgctcacttcccaccaaatattgacttccattgaatgcctgctcgagtttgacgagttgagacggactgaacgcagtgctaaagaagaaaggaaaggcattcaatgaaacaactaaaagcataccgaattcgtttggccttttgcatttgttgaaaaagtgggaaggcattgccattgccaagagcaatcgctgaaaggcgaataaaattaaatgaaaaaaaaacaaaaattttttttttcgattttgggcctatttctcgaaattttaaaagataaacaaggttgggggcataattgcaataattgaaagcgaaatcccaaaaccgaaaagtaccgtcgaaaagtcaaaaacaaaaaataaattacgcacccacccgaaagaaaagactcacacggattcagaaagatggaattcgcagcatccgttggcgaaatttgctccggcgaatcggcattcaccgttttcatcgtcgtcattttggcatcgtcgcccgcaatcatccgaatgcactgcaaagcccagcgggaaatgaccagcgaagtgtcgtcgtcgcccgcccggggaccgaattcggtgtcaacggaatcgaatggacgcatttcgaaacaggaacttccctcgtcagtgagacagccatggcatgacgaagcggaaacgacggagggacgaaaggaattgtggcactaattggggggggggggatttgctaatggaatggaatggcaaaatgaatgactttggaagtgccgctgttcccttctccggtggaaaggatactgtccacactgaaattcgcaaaaggcattctgtgcagcaaatagagaaaacttattaaatcgttgagagaaggtgctggctgaaaataaagagaacaaaaacatttgtaagtgtaagcaaataattaactttgggggtaaaagtagagagcagcgggaccgggaatttgggcaagaccgggactttttgggttgaaaaaccgggactttttggctgggaaaaaagccgggaatttcccggtcaaaaccgggaccttggtactcagttgtccgtgtccaggtcccggtcccgctgcactctaggtaaaaggcaattagccaaatggactttgctaattattaataatttttaggtttggtatttatgcattaattagttaattatacagagtaacgaaaggcattaattgtcctccgatttgactaattcaaatccctaaacgcacgcacagacagagaaagccaaacaaacacaagaacaaatcgagaacagcagcagaaatacagaaggataaagaccaattagaagggagggaggggggggggagaaatccaacgccaacagcagcagggggcgggtccaaccagcgcaaaggtaacgaaccaatggtaaattactggtcttgtcataaaaatagtttaattatttttttttaattaaaaattataaacatttgattgtctattcagatttatcttgaaattcaaaaattttcgaatattggtctgacaaaaataaaaatcaagggcaagaataatcttctcaattgaaaaaggggacgttcgtataactctgcaacgggtggcgatgttgttcaatgtttggcaattcgatggtattattgtgctaaaacagatgagtaattaattaattaaagtaataaaaagtgccattctcacttcctcgttcttcacacctgaattttgaagaacaatcaaatttaactgtttaaatttattttttgtctcaaattaacttacaatgaccacgattttcttttttgttcaaattcattcgaagcaaaactgccaggaagacgatgaacagaatgagcagaagcgcaatgctgccaaccaaagtcatccgaggccaaaaagtgttggtggagtcacaaggatttctaacagattctgaatgcatttataactattcagaaaatgaaccctgtaaatgactaatatgcaaattaattactctttacgactcgcgaaaatgatggtgcaaggacggcacgtggcgtatctaaaaatatgcaaatgaaatgacatttagagcatcacaacggatgaagtcgttgaattcagaattcgacttatcaccaaggacaacgtgttcggaaaggggagaaaaagggcaaaatttaaagggaaatatgtgggcggaaggtgccatgccataacatttttttaaataaaattatttaaaaaaaatacatagcagtcaccaatcaacaccaccattggccaaactcactgaaatcacccaaagtgattgagttgcgtaaatttgtgttcgtttccgggtgttgcacttcgcaggaaatcactgttttgcggttgatttctctgaaattaattttcttactttttaaaataattttttttgttcatttacccctgtctgaatgtcaagcgggcataagtgtacaccgtgccgttttcccattccttccgtccatattcatggtccgtcgtctttttgccgttcacgaataaattcat

SEQ ID NO: 5879 - DNA, 4847 bp, Heterodera glycines
ccgccacttccctaccgccatgtccctaccgccaattccctaccagccatttccctaccggccacttccctaccagccatttccctaccgccatttccctactaaggcatttgggccatttccctaccaaaattttttttgaaattttttggcaaaatttcaaaaatagaaagggtattttcaacattttgatgtttctcgtgaattataagacaataagttttttgtttaagttatagattagaaaatgcaggcaattctaacacaaaagaaccgtacaaagcttcaacacaacgggcattcatacatttttcacaagctgagtgctgaaggtgaagttcgcttttggtcgtgtgaacaccatcacgcaaaagacatccgttgcaaagggcgccttcacactaacctcaacaacaacgttttgcgtgaagttggaaaccaccaatgtgaaccaagtgcagctcgaatggaagcgcaacgagtgatcactaaaatcaaacgccgggcggaacagacaatggaaccaccagcgacaattcgctctttgtcactgcagaatgtggccacgccagtacttccgcaactccctaccaagaatgcgatcaaaaaagttttttctcttttttttgttatgagatttttgtgcttaggtaatcaagcgtgtacgtcatgaaataaacgcaccaccgccaattccaaacacgctcacagacttaatcatcccagacgcatacaaaatgtatgggcgcaccgaagaacaaactgaacaatttttgttagccgattcgggagtttaccaagagaacgggagagaacagcggtaaaacacatgcgcactttttattatttaaatcgaaatttagaatactgatatttggacgtgagtcgaatggtcggtgggcgaatgaaatgaaagagtgtttcgccgacggcaccttcagcatcacaccgatgcctttccaacaagtgtacgcaattttggcacggtaagaaatttaaacaatttaacaattttgaacttattatttaagtcggaatcgctggtcatcccagtgtgctactgcatgctgtccaacaaaacgcacactacatacgagcgtatgtttcgtatgctcgttgctgtgtggccagacttcaacccggacagcgtgtcgatagacttcgagacagcggcaatcactgcgctgaatgtagtcttcccattcactgaagtgcgcggatgtctgttccacctcgtccaaaattttcacaaaaaaatttctgaatttgggctgaaacaggttgaattcatgacaaaaaaaaatcgaattttcgaaaattttagcgctatcaaaatgacccgacattcgcagaaatggcacgatgtgtcacgtcgctcgcgtttctcccaattggagatttgacccctggaatcattgctctggacatggctcttcccgacgaacttactcccgtccttgactggtaaattgacgatctcacaaattgtttactatttattgttctttaattatatattaggttcatcatgaactacacgggtcgtcttaagcatgatggaaaccgaacacgcccgcgatttgacccaaacatttggagtgtttacactcgaacattgcaaggcgatgaccggacgaataaccattcagaagccgcgaacagacgcctacaatgcgcatttgcctgttcacatccatcgatttggcatttcattgaccttctgcgaaaggatcaaaagttatcagatgatgacttcgcgaagtgttcaactggacaagaaccaccgcaaaaggcaaagaaatatcgtgaagcagaccgccgaattctcacgatggttcaaaattatttgccacttaacaacgcagacaccaacattttcccaattcatcaccctttcaatcatcattttattattacatttttgatcggaatttctcgaaattatgaaatgagaccgtgatttgaaaaataaattttttaaaattttcttggatttttaatttcactgtctttttaaacttttggtatggaaatggcccaaatgcattgggtagggaattggcggtagggaatcggccggtagggaattggctggtagggaattggcggtagggaattgggtcgatcccccaaaattcattttttgatttacgagatgaggtcagcccagcacggcagatttggaaaatccgatctctaagaaaaaccaaaaatatgcaaacatataagtgccaacttttgttggcaatcacaaaaaaatttcctcttattttttgagatatttatttgaattaaaattttactatttagtacaatgcatcgctcgtatttaatgcgaagaccgaatgacgaagatgacagttatgattatggagaacaggatctcgttcgagccaaacccatcgatgctcggttttcgagaaatttgggtccaacatatgcgggaggaaaggatttcgttcgtgcaagcgaacattcgcaaaaacaattttatggcagtcaaatggttgtgggaagtgagagccaacagcacaatgaggaatttggagaaggaacttcaaaagaggccgacgacaaaagcagccgaccgatgacacacgacgaacggaacaaaatcagcgccagcattttgaaggcggaacttcgaggagacattgtaacggaaaaaaaacattttttttgaatacttggcaacaaagcaaactttaggagcgcgtcaaaaagttgaaaagaaaactcgaggaaggcattgtggaaaatgaaaatggaggaaatgggaaggacgaagagggagaaggaagagaacggaggagagaagtactgttgcttagcatggacaaacggagcggtgtggtgatgccggccaaaggaccgcaaaaggtaagcgaagcaattggttgggagagtataatggcgacattcgtcgggataaaatgaataaacgtttaggagaaaaattgttttaggcattggtttcagtcgtttcgatattgtggcgaaaaaaattgagataatatactggaattgtaagaaataatcgaaagcttcattctatttaaagaatcgcaatgagccctcagagaaacgacggattgggaccgttgacgaggaattcggcaaacacatggaactcagccaaatggtcgcagaagagaagacaaccacggcggagcaacaaattgcaatgtttaaccgttctgcaaaggtaaattgccaaatgtataaaaaatattataaatattttaatatcagtaatttaaaatttaaaagattttcattgaaactcggcttatggcaaagcggagttcatgcaaatttcatttttttcctttctgttaatgttttcatgatctctaggtttgttccgatagtaaaactgatgacgattgggttgtggacgacaacatgatgagtcatcccaaaaagcggcgtcatgaagagaaggaaatagtcaggaagaagcgcaacatggtggaaggtgggtaaatgtaaaccgagaatttgaaaatttgctaaatttcgaactttaatattttttgaagattataatgaattttaaaaaataagtaaaactaattcaaatgacacaaataaggtttttgcgaaattatctctaaaatgggtcaaaactactggccaaaaaataatacaaatgaattggcagcatgattagtatcattaataaatactagtatttcctcatcaaatcaatttggttcctcatttgtcaatttctgaaccgctttttgagttcttgaattctttccgcaagtcttttgagaatcagtgaatttaattgtgctgtcggtggttccgttgccttttcctgcgtttccgatttttgtgccgtttcttcctttgtctccgtttttcgacctccactttgttcttctcttctcggctgtttttccgttgttttttggctccgttgctcgttcattcttccttcactttgccgattttccgcggttgtcttttgtccgttttcatttgtccctttttcggtttgtttcgctgtcgacgacgtgtttttgcgttcgttactttcgtttccaattagcaattgcttgccctccttctcatcaaaaatgaatggctgtttttcctcttcgttttcagctcggcagtgaattttttcatggtaagttgcttttttgaaaggtcgcatcagtcgtgggttgtcatactggccttcgaccaacagttcacagaaaccgacttcgggattctgaattgttaaaatgtttttgatagaacacaggaacaactgacttttccttcgatcgattcaaagaaattcacagctttgcactttgaggtttccaagcaaaactgcagacattgtgaatgctcttgaacaaatttagttgcaatcatttccccaaagtacacaaactcggggatggccacactttcaagcccaaatggacaatctgcaatagattattctttttcctttttatgatatcctaaatgaacaatgcctggttcgtcgtatacgatgtcataaaacggaggaaatttcggaggattcatatgggctctgaggtctccgaaccattctgttgtacagaaaacaaagccagttgaagctaacacgttaagcagaatgtaaaattgggtgtagaaatggttgaaaatcatttatctgttcgttaagggaatagactgttcacttgatataaattaatcataaaattagaaatgaaagggctgaatgtattggaaaatgtaattgaaatttgaacattggggaggtctccaagtagaattcgcctcgattgtggtgcgctgtgtatttgttaaaagggctgtgcgtgaattgtgtcttctccatttgcccatca

SEQ ID NO: 5880 - DNA, 8267 bp, Heterodera glycines
  unsure (1)..(8267): unsure at all n locations
ttccttccaaatggtttggaagagaaccactggtctctctcacgtgtaaacaactcagtaataacagttgccaatgaaaaatggcaattttttaggactttataagaaatgttatccggagaagttccatttttatttggcaattttcttaagtgtttgagtctcaatgatgttaaaatttatgtccgatataaagcattgaatattaccataggagttgtccaaacttaaatcgtttaggacaatttcggagttattaaatgaatttgcaaataaaatggcaaataattccgatttctcttcactttcatgatagcatttattttcaaaaactaaatttggtatttcaaagggattgacattgtgtttttgaatgtatttaaaaattgaattttttcccttttaaatagccttatgttcaattaaattatgtatttttttggtttggatttttatatgtaaagtaatgctatcataaagtgctttttttgttggatcaattttacactgtctatataattttgcctcttctttaatggatgccaataaatgttgtggatattttggagctaaatctttttttagtaatttttttattggaatacactcgttcaaggcattcaacaaggcgctattgaaggcacggcatttttcatttatactaaaatgtgaaagagaaagagaacttaatctagcagaaattacagcatttaaatgtgatacattagacggagtaaaccgtcttaggcaaatttctttaggctttgctcttatttctggaacactcagcacaaaaagctgtgctaaatgatctgatgaaaatatgccaccttcaacagtacaatgttttacaattttatcatttgctgataagatcaaatccaaccatgatttacccctagtgggctcattcgtggcatttataaatgtaaatttattaaaaaagtcgcaaaatatttcaccaatatgatttatagcgtgtggttggccttgcctccataccaattctcgatttgacaaatttagatctcctaagattatataattttcacactaaaatgtttgtataaatttaaaaagttcttttgtatgttttaaagtggttttgggaggccggtaaatcaatgcaaatcttattgatttcagattttgtaattgaataattaaaatttcacaattaaattttgtaccagaaaattttacaaaaaaggctatctcatttttgattaaaataccacaaccacctccacgtgaactgttttcggattttcttgatgcaaaaatataattataattctccttaatccatgggctaagaggaattccctcattgtcttttgtccatgtctctgtgagtaataatatgctaatttttttatttattaaagccagtgaaatttcatcagttttgttcattatagagcgaatattagttaagcaacagataaaaccttctaaagaattaatatcccctttgtttagtggtagtgaattagaattatttatattttggtaagaattttcttcttccgaccggaaagtgtaatctactctttttgtaaaagtgttttgtttttttttgtgatttggtgtaaaatttaaaaatttgattcacgaattgactgactccggaagatgtgcacttcatctctcaaaataacgttcccagcatacacaatccaatcttgcccatctttctgtcgtttttcaacgcattgcaaatgcaggcgacggcgttcctccaattgtgcctttgtcagcgattcacggagacggacatggtgcagagacgaatcagcagcccgaatggtgttttgttttttttgccatgcagcgagagcctgtttttggaagccacgggaaggcaagagaattttcaatgggcgaggacttttttgggctgggttaaaggaacgacccatgcgataggcaatggtaccgcattcgatccccagcgaatcgaataagcaattgatttttgaccggtccatctctgcccgctttgctggtgaactgtcgttgtgctctggcatgccaataatgacgacacttctctgtctttccaattcctccgctgaaattggcatgccttcagtggagagagcagtggagcggagttgggaaatcgatccattaagcaggtcaatttgagaggacaaagtggtaattagggtattaaaaattggcatttggtcggaggtaaaagaggtctggagttgtttcaatgcttccactgtagtcttgaccaaagtcatttgagagtcaattaactggtggataccatttttttgggaaattggagaatattcggtttcggggcagggtctttttgtcattgaatatttaaggcgaatgaatatttaaggcgaatgaatatttaaggcgaatgaatatttaaggcgaatgaatatttaaggcgaatgaatatttaaggcgaatgaatatttaaggcgaatgaattagaacccgcaaaaatcaaaatttctgagccctggtaaaagaatgacttttaaaattttttggagcatagaattttacatggcaatgaaatttttagtcttctttaggaatttgagtgaaaaaattcaataattataaaagttttttttcataatttttaattagaaaaaaatttaaattctgaaatttataggctatcagaaaatgcttcatgtcgattctgtacaaagaacatcaaaaatattttatttgcttgtttctgaaaaaatattctaaagcctataaatatgttcctgcaggaatatatgcatacatatgaatattacctattagaatactctttttctcttccttgcctacaatatttctcaatttttatttttctataccttttttataagtagttgaatattgattagttgaatattgattagttgaatattgattagttaaatattgattcacgatgacaatcaaaattatatattcacaagctaaatttagcaaaaaaaaaaaaatttacaatatatttccctactgttggtttttatttaagtcattgtgcctcaatattttttcattataatttctcttaatttagtgttttttctactcaattggaaattctattttctttacatttattgattaaattaaatatatttatttttatatttaattaaaataatttattaattccttggcttcaaaagaaaacttgcaaaatatacacaagaccaaggctaacgaaatttattttaatttgtttaatttttggaaaatggacatttttttcttaataattatcattaaaaatttcattttttaaaaggcacattatttaataatgaactgattcgagcgcgcggaatatttgtataaaattttctaacatgaacttaaaataagttgacaaaagtgaaaaatgcacaaaaaaggcacaaataattgtaaaaggacaaaattatttattatttttcgacagaattttttacaaagcaagaaaaaaatatatataaataagaattaacaatttttttttcaataattagacaaaaaattttcaaaaattattaaaaaaactaaaggggatacatttttgtggaagttttcaatttttaaaaaattaattaactttttcataatattgtaataaaatgagtataatgcatactggtttatagcaaatataaaattgaaaaaatgattttgaaaataataaaatttaatgaatattcagtgttaacagatatcatcatataattctctcatccgtttgatcagtttcgcccttttctgttcgttctgttgttgaacagtgccgagaatgttggtgatcaaaaacaattgaaagcacagctcgtagccattttgatgggccaccatttgtctgatcaattccagtgatcgatgttgatcaggatgaatctgggcaagagaaaactcaaaaatttaattggttaattgcagggtaataaaattaatttaaaaaattgagtgagatttaatttttatcatagctgttaaaaatgatcagagaagtaaaaatgaaaattttattaattggtaaagtaattttacataaatggagaaaggaatatttttgttcattaaaataagaaaaaataaatttgttgcaaaaatcaaaaataaaataaaataaatttttaaaattttatcatctaacccacaaaaaaaaattcgttaaccccgcttatttaaattatgtcaccactttgccaagctgtgccaggacagagtgcagttcggaacagtacaatgccaaccaatcgtcaaaatgaactcgtctcagcggtgcatcgacactgacgtaaatgatgcgcaacaaatcgttgacaccggtgcctacagtcagaaaggatcactgtattttattacagccagaaagattattgtattttctattttaatttaaaagcactaatttattcctaattgaccagtgtgacaaatttgccagtcgaacacagcactcagttgatcagcaacactttgtccattgcacgtcttgaaaaacatgttatttgacctacaaattgcataatttgaaaaaatataaattaaaaagttaaataattaaatttaatttaccaaaaatccccatgaacaatgactggtgccattgaaaacaatttgtgttgatcaggctcatagcgaccatgatcgttgtaatgctttttcagcgcctcattttgcccggcaaaactttgcgcacaatccggcatggccatcatacgttcaatgatgtgtagatcctggcaattttagcggaattaattaatcatttgtaaaattatccattgattaggaatttagatagtacagttgtttgtgattgatgagccctaattttggataatcctacccgatctaaattagacactaatttaaatcttggataaaaaaattgtcaggattgaataatgactagatcaggacagactcaaaaaccatttaagaccagagcattaattgcattagttagttcaaccacttttgctaattatagagactttctagttaaggatgtggaagaaaggttcgaataaaatattatggtttataaaattggcattcactttntcgtcanagtcaagttcggctntaagcgtgaacgagtccaccaattcncctgggcaagcacaggcataatgcgtggaaatgtgcaaggccacggatggcacttccgacctagaaaaaaaaatgctggcattttgtaaattaaattgtttttttgtccagtttgtaaatgagattcaaatcttgaatattttattgatccaatagtatcgattagtttttgtcctggaaaatcaaccaaaatcttttttgtcctggaaaaccaacctaaacttttttgtctggaaaattaacctaaaatatgtgaaaatggacaaaaaataaatatattaccgaatttaatgaattacataggaactgccctctgaaatagggggttaaaaacagagcccccggagctttaattcagtaaatacggtatccaaattaattacttgggcatgttaccgtaaaaacaacaaaaaatagttttgtcaccacctgttctttggttagaccttcactcagatcagtttcgatgatgccatccccggcaacgtcttccatcaacaaatagccgcccgccaaacagtccggcgatgccgcgtttcggcacgcgtacagctcgggaatgtgaaagggcaacggcacgggcatggcacgcaacaacggcacaaccgtggcgtaaaagtggcactccgaattgtgcaccgtgtacatccacatcttcatgtcttcctacaaattttgacatgaaaaatttgattttttaacaactgagtctcattttcatgaaatattttcaaccaacaaatttgttttaattatttaatggccaaaaataactgattgattatccagtaatttttgcatgcaaattaattgggaaagttttaaaaaaaaaagtcgagatcaagaccggaattggggatcaggccgagataggatatcaggattcaaatttggttcttatcgggatcataatcatgcaatttttttcaaaaaggccgggattgggatcaggatctctggaaaatcgaaacgatctctcctggccctaattgtgaccgactcctcctcttcccatgccatgattttaagaattttgttaattaatttttttgttttttttaaaacccgaaccgtaataacggagttaaagcccagccctgtagatcatataaaaattaaaaaacattcgcttcaccttagccttctcgcttccagtatgcatatccaaacgtcgtgatgtaggcacctgaaaaatttttttttcaaaataattttttgtttaaataatttgacaattggccaactttgaaaatgcatgaaaatgccgttggcgttgtggcttcttcggtgtcatccgcttgtttgaattgaatttgaatgcgataaatgtcggacaaaaagccgccggtgctcagctggacaaattgtgcattttcgacattggccaagccggcggatgggcccagtttgccaacagtggctaatttatccaacacatagccaacggtaaaatcggcatgggactgatcaatggcactgtccaaattgtccaaaggcatttttggtataatattttaacaaaattatattctaaaatattaaattatattagcatattaattaatgaaacagtgaccagtaaattaaatttatttgatttggataaaatatagtttcaaatatttaatatataaaaacaatcatttaattttaaaatgataattttttttttgaaaattggataaattgaaggtgaagagaaatttgaagaaaaagcttttaatgaaggggaatcgaggttatatttaaaaaatgtggagacagtgaggaaattaaatgtgcattagataaggttaattgtaatcgatgaaaagaaaggcaaataaaagtttatgcctttttaaaaataataataataaagtaataaaataattttattgttttattttatttctttaaaaaatttttattcattatatttcgaaatcaaaaaaaattttgcattaaaaaagcaaataactttatacctttttttaaatataaaaataataaataaactaataaataagttataaaaaagtgcatttaattgaccgacttattcaaagaaatttccgcccaaacataaaacgaaccaataaaatatttaaaaaaaataataaataaattagccattgaaacaattaaaatatttaaaaaatatttaacattaactatcatgccaatgaaaatatttcaaaattaaaaaaatttatttgaaataataaccttaagtttctaatatacatatattaattcataatgacaatttctcggttgatgaaataagaatgttaataaaaaaaggttcgagtcaactaataagcgttttaaaattaaataaaaatattaaaaacaaaagtgctattacaaataatattatttaaaaaattaattttgtccgaaaaaaaaacaataagacacgaaaaactattaaaagtgataaataaaaaatatatataaataaatatatatatatacatatatatatagatatatataaatatatatatatatatatatatatatatatatatatatatatatattaatttccacaaaaatatttatccaaaaatatctttatctaaatattattgtagacttgttttcgattttagctatagaatggaaaaggtttttgccagaaaaaattttctattttcgtcagataaatgccattttcttgtttttatacaaaatttcgtgggaaatttataatttttttcaaaaattttgtcatttaaacaaaagcaatatattttaggcaacttgtttatcttttatctcagacgctttcaccagattgtttaacatttgttgtatttatgccaagctcaactctggcaaatgccaacattcgtaatgaaaagcaaacactttaaattaataataattattaatttatatttgtaattttttaataatattctttaaaaatttaatcatttcacttaattttcggattactatatatggtcataaaatcaagaatatataatgcttctaccttcccttattagatgatcattttgtgcatttctttaattacctaaaatggcacactaatttatcggaaaaggaattatttagtttaatatagcaacatcaacaggtgttaaatatccattttcggtccaaaaaagcgttaaatgtcattcttgtgaacaattaca

SEQ ID NO: 5881 - DNA, 4365 bp, Heterodera glycines
tatattttattttaaacaaatcgtatatgatacatgacatgaggatccagccaggagcgagcgtcatattacgctggggtttgcggtaagttggaccctactaaatacttttttaatatttgtgattttataatttggttgtatatttttataggcaaatataatcttgtatttccgacatatatattttttaatttattttgatttattttcaaggtattgtatttaatttatattcaaaattttataaagattaaatgcaaagttagttttataataattaaattgttgtgtttttcatatgttattggaaataatacaaccaattatctttcttttcttttgtctttttgtattataaaaacttaaaaataatattaacaattgaccagtttcccgttgaccgactgtagttcattctgtttacttataaaaaaaatttttaaagttacattgctaatatttgttttatatttcttttgaaaattaatttttattcgtattaagattagtaattttttaatttttaataaatcaaatttgttttttcaaatataatttttattgacaatcttttaatattaattcttatctattaagtttactatgattatttttaagcataagtttaatgcattcttaaatttataatttttaaattatttcattcattattgcgccgacaggtatgtcaggtttctataaacaatttcagagcggaactgcttttataattgattacattttcatttttatagatttacaaaactttttgaatctcatataattgattataaatagaacagccctcataagtcaatattcattacttaagtttaaattctataatttttatggaatattataatttaattttgaaaaaatttttgattatttgggtttatttttttctaaattttctggaaagatagaaatttcatagtatctgattattctttcgttaggtttatttcatatgtaatagaaattctcatagtatctgattattgtatggttaggtttatttcatatttcaaaatttttaattttgcatgatttttcttgagtttgttcacacaattaatttttgaaaacttgaatgttttctataaaggttttttcaatttatattattttaaattataattatttttcattccagttttttaaactaatagttatttatttgaataaatttatatttttaaaatttttcattttttatttaattgcaatgttgtttccgatgcaaagtcggttgtatattctctctgatgaataatattaattgaattacaataaatttgcataggagtttaaaagtttatacaaaaatatctattaaaaattgaggacttaattatataataaataaataatatttgaaaattttgaaggacagttcttgccaactattttaatgaaatcttcaattaaatatatatatttttatatttatctgataaaaattgacgctggaaataataagaaaattctaaaccaagtaaaaatattcattttaataatatgctgcataacatattgtaaaatctattaaatatgcccgaatgattatagataagttgaagataagaacttcatcaaattttattggaattgtttgtattctacaggatgaaaaggcaaatacataaaataaaatgaattaaaagtaaaattctattctacgcatagtaaattatcttttagcaagtgtatagagaactgaaaccaaattatctaagatgaaacattgaaattaaatgtaaagaatataaaaaagaaaatttcatagcatttcttaaaaaaaggaaaataaaattaaaattaaaattatttcttgagttaagcaaaggagcttagaatcaaaaccgaaccagatgcacaaagaataataataatgaatgaaaataataatctaaattatttaaaagtatgaaaatgaactaaactatgagaaaccttaagcaataataaatataaaaatctttgaatcgtaataaattataaattttccggttaaaattttaaattttttttaaataaaaagttctactggaaataataagaaattataaaaataagtaaaaatcagttaaataaaaatgttgccatgatataattctaaaatacttttttttttgtaatgacggaatgttataaagcggaagaaatgaacttcgaaagtgccaacaaaaaactcacaaaggaaggtccccaggtgtccgtgggatttccgaatgaaatttgggggtggatagagtacccttgggttcttaagaaaagtgtttttattttttgctgaatgagtacgagtgccgagttatgacgtgccaaactttttatagtgaataaataaattacatatttattttcacttcattcaagtgtccagtggtgtagtggtacgcgccagtcagcgtatttaaaaatatgttttcatatctaatgatattttgtgcatctatctattgcacctttttaatataattttttaattttaatttaatagaattaaaataaagattttgtttcataagatttttttaataattaactttgcataaaaagcaaaaataaaaattgtttaaatgaattagcatgcagaggattcgaacctgagacccagaaaaaatttgactaacgcactgcctctgcaccataacacacttgtaaagtaatgcaacaattatttcttttctttggttataaaatgccaaaactttggcacgtcataactcggcactcgtactcattcagcaaaaaataaaaacacttttcttaagaacccaagagtactctatccacccaccaaatttcattcggaaatcccacggacacctggggaccttcctttgtcatttcgaaagcaaaaatgaattggcgcatagcatgaagatgagcgctgtaaaaactaatagcaagaaccgagtgctaaatattaataataaataagtgaaagaaaatcatacaaaaaatatgctgtttttcttgtcataaagtattaagaagtttaataggaaataaaaatttctactttcgatttcttaaataaagttttgcattaatcaccagtctacctattcagcagccggaatcggaaatgaaatactagattccaaggtaatatgaaagattcttaagaaactttaaaaaatttgtaaaatagatagtaataaattatataaaattacaaaaaaatattaagcaatattaacaaataaattcgttaaaatattattattaataaaaaaatgtgcgaaagtttactaaacaattcgatcaaataaaagcagtttaaattaaattgaagcaatcaatgccgtaagacttttccattactttttaccatttatatattaagattttaagttattttacttaaattagaaataattttaatgaatgtatatttaattatagcaaaaaaaaataaaacaaataaatgtcattcaaattaaaaaaaaataaaaattttcttcatattatatgcaaaaactaaaactgcaataactcgtcataaaatttattagtttttgtttaaataaaaattatattaaatgaaattgaaatctaaagaaagaaccttttaatcgattatgcggtctacgacgagagaagaaagttaaaattacttaggtttaaatttccttattttatttttattccaaacgaatttctcattgttgaataaaaataaagagaatttttttaattataaaaaattaatttcattgaaactattaatatacacgtaaattaataaaacagaacaaaatgttaaagttgttgatttagatgttaaaataaaacaattatattcaatgaaaattaattggaaattcattataataaattcaaattaaaaaaataaaatatctagacaatagtaaataagaaaaataaggcattaataatctaataattttatttgagataatgcccaagcaatttgctatttaacaaaataaattatttattcaacatttgaaatagaaatttttaggacaatgcagaaatattaataaaaacaaaattattgtatgaattgaatttgaaaaaattaataaattaaaagcgcaaagtttgtattaatttaaaaatcctacgctcaaatacaaaaagataacaaatgattggtttcttctctctgacaatattagaaattaaaaatattcctaattattttgaaaataatgtaaagtcatttaatatgactcaaagtgaagatcacccgaaagatatgcgataaaccaagtaaaaataatcatttaaataaaataacatattattaattatgccagaatgattatagataaagtgaaagggtatacttataaaattctattctacgcatagtaaatt

SEQ ID NO: 5882 - DNA, 1412 bp, Heterodera glycines
aaatttgatcattcaatatcaattgcacgaaaaatgccatgtaaaaatagttataataaataataaattgaagcaaatctgagatttacataaaatacacaacaaagattgatataataaattcttaatattataataaataaaaagattaaataaaatgatatcaaagaaacaaatcaaagaaagtaaaaattttttgaaaattaatcataaaattctaattgtactttattttttcaattaaacttggattaaaacttcgttcatcacacacagctcattacaagatcatatattcagagttttgataaacaataatatatgcatttttaattacaaaatttattttaagttaagttataattaaagctacaataataaaaaattcaggatttaatcagtaaaaatataagattttaaaaagtcaaccataacgtcttgttaataaattataataaacataaacaccataataaaaaatttaaattaatgttaaataaactagttaatatactaacgaagctaaactcgatttaaaggtgacaattttctttaaaattgtaaattaaaaatcgttggatttataaagataaacttgcaagtaatttaaaaaaatcctaatttgggtaagaaaatattgcttatatatcttctcatatgtagaaaagtaaaacaatattaaataaataaaaataattttgggagtccacaaaccccatcaagcctcaagctttttcaacacgaaaaatatcaaaaaccgcgaggttcgagcatcacctttatataatgcattaatgaaagctgcttaaatataactaaaaatttaatttggcttttaaaataaaaaataatattattaagcagttgaaatagaaaaataaaaactataatgtcactgtgggagcattgaaaaaaattgataatactttttaattaattaaataattttctaatcttttttaaagaatgatacgagaaaaagcctgggcatggtttttaaaatcataaaaaagtaaatattttattgaaatgattaaccctaatattaaatgaatagaaaaataaaagtagcagaatattaatataataaattgaagaaattggaattaaacatcagatttttaatattataaattcttctttaatttatattattgagaccttggtttttatttttaaattcttcttaacataatctaaataaatttagactcacgaaagttgataaggatttgatgcaaaagttgtgcaggagttgtaaagttgtttaagaagttgtaaaatttgttcaacttttggcgtcattttttcgacacacagtgttttggtcaggcatgaacttataatgccggaaacagggccccaaggggccctgtgaaagcgccggggccgctttcaacaccggggccagc

SEQ ID NO: 5883 - DNA, 1552 bp, Heterodera glycines
ttttttcggtttccttttttttaaaaaaacctccccccccccccccctctcccccgccaaaaacttttttgttgttatgactgaattttataaatcggaagaaccaaccaacttgcatataatactaataaattagaaaccaaaaaaagcaattggggcctagcaagaagatgagcgctgtaaaaaactaatagcaagaacacccagggcggctggagagaggggatgcggtctcgacaacgattttaaccaaaaatataatacaaattgaacaggaaatgttaaatgatttattaataaattttttaataacatacaaaaacttttcaaaaaatttgacacgtagtgtaaatctaaaccgatcaacttaaataaaataaattatcaaatgtactattactgaaattgtttaaattatctttgaaaataataatcaaatatagtctagttaaacattttttcaattgcaagaaaaatgtcaaaaaatagttataataaataactgcagaaatatgagattaacataaaatatacaacaaaataatttgatgattcttcattgagcagagcacacatctctctataaatcgattttctgatcttccataagacaagaatatatgcatttttcattaataaattataattagcttcatactaaaaatctaacaaatattaaaaaaattagttaatacattgacaaagctaaaccctgaaaatattaatatagaagattattggtaattaaaaatgaataaactcgcaataagaaattttaaaaagccataatttggatatgaaatacagaaccgtgagctgtagctaccaggagatggctcgacctggtggcggtactaatgatataagcccatggcgcggaaattcatataaggatcgtacatggcattccttagtagagcaagtagggtcaaaagtatacgtgaagtggaccctgcgtcgcgtctttatctgacctccgcttattattaacaaaataaacttaaaaattctaaaaactttaaaaaatatggttaattttctaatatatatatattattatttctacaaattttggtttgcaaagcatcaataaaataagctataagaatatagatccttcagtttaagtaaaaaagcttataataaaaataaaataattattttttttaatgcaacataaaatttaaaaggatgaacaaccattacaaaacgaacccaaagtcgcggcgagattcgagcataatacataaagcattaatagctgcttataaattaaaaaattcatttggatttataaaaaaaaaattatttattcagcagttgaaataggaaaaataaattaagttataatgtcattgtggagtatttgaaaatataaacacatataaaataaacaaaaaatgtttttgaaaaataaaaagaatgatatgaaaaattacttaaaaaaactaaaatgcgcttcaagcccgccaagcgtaaaaacgagtctgtgaaagaaggagacaagcagggggggatattaattcatgtttgatcatttcaagttcaatta

SEQ ID NO: 5884 - DNA, 4696 bp, Heterodera glycines
cacatttacagcaacagcattgcatgcaccattctttttacgcgccgccccggggattgcccttgggcgctttccatggacagcaaatgtccgcctcagtgtgcggcactttgccaacggacgatcagccggcggcgccgccgcagcattggcacccgcagcagcagtcaaacaacgaaagcggagatggcattggcattagacggtgaaataataatcgatttgatgaattttaatccattttaaagccccaccgagagcaattttgctttttggagagatttccaataaattatttaaataaaactcaaaattaaacttttttatatttccgccgcagtttcgatgctcctcagcaacaccacccaatcggacaagtcaatgcgtttacgcccagcaaaatgcccagcagtccacaggtcggagctgtacaacaacagacgacaaacccgtctctgtcgaacacaacgactgcgagcagtacaccgtcataaataaataaacaaaggagagggcggaggaatgaattcacacaacttttctaattaatttcgtgcaattttctattttccgtcaaattttgcctcaaaaatgccaaataattctaaaaatattaattgccgttctgtttcttacattatgccattcaattgaaatgccatgccaattcctgccatatgaacaatttctcattaataagataatattcaagaaaataaaataatttttcattactattgaaagagaccatttcccatcatcagaatatcatagaatacttaatatttaaaaccctctgattacggtaggaaggctttgtagtaccatactaacgaaacatgcggaaaaagctttgctccggctttatgcaatgtacaaattttagaatatagtgcttgtttaaagactgttccgcgttttgtttgtaatttcgtcactttctttgcccccttccgttgcctttggtaattccgttaccgtacccttttgcgctttcgccgtcctttggtcctcttcaaagattactgtattgcagttttatttttaaattgcactcacttcggaagcgaatccgtctgttttggaaccaaactttgacctgtccaaaatgtgccgggaatttatgacagtgccagttttgacgtgccaacctgtgtctgaacaatgggacggacaattattccattttacattatttttgattatatcattaaaattaatttattttaatttttaaaccctaaaaatgcgccagaatggcatttttcatctttgccaaaaagtctccgtcaaaaatgactgaccgggccaaggccgagctgttcggagaagtgcgcgcgctgctcacccaccaaatattgttggacacggaactgcgcctcaagcgcgtccaattgccacccggagaatgacgttcggaagcgttttttcttccgcttacagtacccgagttcgtccgtagtgattacggtggcaccatccattgattgaacagcacaagcgccatccattaacgaagtgtcgttgctgtgaacaaagccatcgattttaaggaacaaaactgtgaatggctccatctccgggatgggatttgaaaattgcggaaaccccaaaaaatcaaataaatacccagtacggttaataatgaatattaagggaaatgggtggtcaattaggtttttgagctgctcagtttaattggctgaaaatgcgtaattaatgaccgcactcacttaattagcattgcctcactaattgaccactaacactccccatcttttttggcgaatttattaaatttgcgcttattccctccccccacccgtgccattgcaccccaaaatgtgctgttgttttggctggtcgtcctcctccttttctgtgcagaaaatggtaacactttttggatgcgtcggaatgactcattttgcgctgcgcttttttcgaatgttttggtgttttgcctccctttcctccacaattattcattcattcacttgttcacattcgtccatcattccattcatttgacatcaaaatataataaaaataaataaaactgccaattatttacaacaaatttattttattgccccgcggcgtttccctcagcccttcgggcgacaaatgctttttctatttgcaattggaggtgacaattaagtgcagcagcaacaacggtttgggaaggacggaaaagcgcgaaaaaaattgggaaaggataaagtggcggcattttaaacaaattaattaggggggggcatttaattggcattgggtgaatgaaattacatttagggagatacgagagaacaattaaaaagcaacggagaaagggggggggctggaattaggtgaaaaatttggaatattaattatctttttttagatattataattattgtattttaattttattaataattcccaattatttccgtttaattaattagctcatcatttaaagattttaataatgctttaatgacaatggctgctgatcagttcctttcatttgacactgacttttttgaattaatttaatgatcagccggggctgtgatttttttgtataaaattcacagtcgcgaaaaactttggtttttgtatatcagataggaggatttttgtaaaaaaaagttgataaataccgtatttactaaaatagagcccgagggactttatttttcaaccctttcaaggggggaggtgctgtattttaggaaatacgatatcaaaaattttcaggcagctaaatcatttgtcgctggaattgttgaactgtagaacgccctgtaaaaaaaagggttaatgatatatcaatcgattcgtctcgaggggctaagtacgaaaaaatatatctccatttacggaaatggcaaaaaaaaacggtttttgaaccggttcaaaactcaaaaaatggagagattttggcacttgaaactattttaaaacaatcaaattctgtttttcgcaaggtcacattttgctcttttcttgcatttacaaattcttgagaccttaagctttcggtcaataacaagaatgaaggcatcgaccaagtgataaaaaagttagagctaaaagactgatgatcggacacataaaccactcggtactccgctagtttgtatccacattttgggtcaaattttttcaaaactttttctcggagcacttcaaggatcctgtcactgggcagcatacaaacacaattgaatcgacgtggcagaagttcaagcagcaacacaaaacgagatttggcacgcaaagatcacttttttccacatacatttctgattttttgtggcgtaagcaatttggaggaccggacattttttatattttgtggacccaaatcgcggaattgtacccaataagcacataaatctccttttatttgttatttaaagcaattgcgacaataaaaaaagaaaaaaaaatttttgaaaaaatttgacccaaaatgtggatacaaactagaggagtaccaaccactcatggtggtgaccaaattgttcaacaaacaataaatcaatttcttcggatgtctattttttaatctgttttattcacaacaacacagtgcaacaataatgagctttttgctcagacctaacaacgtctatcaaatcggactaaaagtagcagaagactgatttgagccagttgaggaatcctcccttcttctttgacttctttttcggtttcttttgttcagaatttggagtgcgcgaagaagcatagtcggcgggcgtcggccccggcccaggcaaatcgtcgtcggcaatttcagtcattccttttgaaaaaaaacaaatgcgctcaactcggaattaaaagggaaaatatgcattaatggctaaattcttagtagattttctattattaaaacccataaaatcccgtaggttttaataattaaggtacttttcctgttttttgaccactgaattattatttttttttgagtctccccctcctttaaataaaatcgctcttaatttcataaccctttaccaaaaacccaaatgaatcccaagctgctttaccatttgcattttcacgattcgatttgtagtcgtcgggaataggcaacagatcgggcatgggcggcccgtagattcaggcatttttaaataaaaaaacattagtttagtgaaaaaaaatatggatcgaggaaaacaaatgaaatcaggaacattatacctattcgctttttaaacacaactctaacaaagtcataagtagggagtatttttaggtttttaactattttttctgcggctttatttcgacgagaaatgcttattttggaagttagccactaaaatagttttttgccactattttggcgtttcgtcactatttttgccactattccgacaacttttgaaaaatttctcaacaaaaatacaagaaaatttaattattttgggaaaatccgatctaatttcaataaagaaaaaaaaatcattttcaaagaaaattcaaacaagaaagaatttcaaatcgtgttggctggcctcttttattgggacgggattgacccaaggacccaagggggggggactttattggcttaatttccgccccctcccccgtttctcttttggcaattttatgtaaattttgggatggggaggaaatggagcaattgacatcacttccatcattccatcgaatttattccagt

SEQ ID NO: 5885 - DNA, 3431 bp, Heterodera glycines
cctttgggcgatcattcggcgggcgccctttgaggggcaaattaaaaaataattgccacaacaatattcatcataacttacatttttgtgcctgcccgcggccaaattagcttaatcccccgcggtgttatgacggaaaatttgtggggcgaataatccgtcacgcggcgacggggggagggaattaaattaaattttgatgacatacggcacgtttgggcatgatgattattatgggttgacttgccctgccaattaattttaaattgacgaggagcaacgaacgcggcacagaataattttacataaaaggcgggggcggggacgcccccagggcggggaatgcgtcatcgaacgcgggcaaaatgtgccacggggacttattcatttggatgatgcgcggcaaagtgccattttcaacttttgccagccgcaaaagatgaaggacggcacagccggcgtgagtcaagcaaaaactgtgcatcttctttcattccatcggtaaaaaaaactaccgggtttcgttttgaagatggagttgtacatcaaatttgtctgctgattttatacttttggttgctttaccctacgttgaaatagctgtaatactgaccatatatgtaataagattgccagatttccatatttcattttttaattttcaaataaatatcaatttttaagcacaggggtttaaagacgaaattataccgtaatttactatattttttttaattttcaattttcaaattatgtaatatttagggtcgctacttttagtgatttaactattttttttgctcgattgttttgaagaaaggagctcaaaaacgcatttctgcgttgaaatttttcgatttggatctcactatcgatcactagaaatcactattttcacgcttcgtcactaaaatagtgaaaattcactattttggcattttgtcactattttttaactatttcgacatttttcagagattttattagcaaaaatgcaataaaatcaaaaaatacacccctaagaatcgatctaaaaaaataaaaaaaaaatacacccctaagaatcgaccaaaatttttttttaaatacaccactaagaattggaaaattttttcaaaaattctccctcaaaatttttttcttgacaaaatttttgatttaaaaaatgtcaatatttgctaagagaattttataaaggaaatgtagctcatttgcaactgcaatcagtgaataaaaattatttttgcttaatttttggctgaaaattaggtcactatttggtcactattttggcatttttactcactattttagttaactatttcgggatttttcgtcactaaaagtcgcggccctaataattatacctatatttgcagatttgaaccgtaaagcttcaaaaatccaaaaatttcaatttggaaataaatgaaaagagggatcttaaatcatgttgttacggtgaaattttcatttaacggaataattatgaaaattctctcaattttttcaaaacttttcaaaaggtaaaaaaattatatatattagaaaaaacaaacaaattacaagcttttttcatgtgaggaattaattaatcatctggataagttaattacctcataattaaaaatataccacgaaaagattatttattattatgttattatttaatactgaaaacagacaaatggcatgctttttcatgtgaattaattaaacgtctgggtaagttaattaccacataattaaaaaaataaatcacgaaaaaattatgaaaattgcttcgttattataatgtataaaaaattattaatttttatttaggcgcatttaatgaaaatcgtctgggcaaatatgaaaaattatacaatgaaatctgtttataattaattacaagttgctatgtatgttacatcataaatttatgattttcatgtgaattaaaaatgggaatctttgtttacgagggataattgagcaattgacaaattttttttctatttttttctataatttaaaaactaaattattataacttaatcaatttaaatcgataaaacacattacgtaaatgcacatttttgcacaaaaaaataatatgcaataatgttttaaataatttctattaaattaataatgaaatttatgttagagaattcggagttaaaatttcttttataaaaccacgggttaaaagtagggaccaggtcgttttgatccggtttgactggtttttggaaggccgggccaggaaaccggttggttctgaaaatatcagcccggtcaggcatttttgagaattccggtctctaatttaaattcccagtcctagttttagttccggcctaaaaatacacagcacagtacaatgaattggtcgtctaaatttgactttttgcccgaatccggtttcggggttcgacataggtcgggactaatgtcagattcagattctgcgaccttaaaacccatacaacgaaaaaagagagatgataagtttacagggacccatctcttttttaaattttaaatattctgctcgtttacatacatacctatttttttgtattttttatttttggcttggcgccaaaacgtcggcgccaaaacgatacggactctaaaaagtaattggtctgaaatttgagttccgatgatagaaatgccaacgatttcggtgtctcgagaagaaaggcaaaagaattggtgagatttgagtccctatcaagaaaatgccgagatttgtggtaaatttgtatcacgatgatggaaatgccgaaaaattggtgtgatgagacccgatgatataactgtcgatgatttgttgagattgagtcccgatgagaaaatcccgaccgaacacacaaaaattgttcaaagccgtacttcctagcgggttgagaagcgccgaatgctcatccggtgcaccacaaaatggcgccgccgaaaatgtcgccgaaaacaataaaaaattttaaatttcaagaaaaaattaaataattgaaactttttgaatttgtttttctcgacagaaaacgcacaatcacgactttttatgttaaagttttgataaaaaaacaaaaggacgcccatggttttttcccggggacctaaacagcaaaagtgctaggcttttcatttgattgacactcgagataattgctatagttttggacgtttttttaaacagactaatttgccatataagactcatttttcataaatttaaaccaaaaaagactaaatttatcgtttcgttattggcaaaacttggaattaaaaaattcaaatggaaaattgacaaataaattaaaaacattatgccaaaaacacattttcaaaggaaaatgtacaaaaactgaaaatttttttttggcaagattcgattccggccgggtaggcattttcaaaaacgacaggtttcctggcca

SEQ ID NO: 5886 - DNA, 4725 bp, Heterodera glycines
tcccaataaatttatcttagaaaaaaatgatttatccccttaattttcttgggtggctgtcgacgattgtgtttgccctgtaaaggacaatctttgtgtacggcctacgggctatagcaagccggtgatttgtgcccataaattggtgcacaacatcaccggcttgctttcctctccccccactccaattggtattttttcctgtaaatttttatcgctataataaaaaaattttcaagcttcatctcccgcccctggcacttccgaatccgtgctggtgcttactctgctccagcttttcatgcttctgcttatggtaagttttcgtctgccattattttccattaatcggaaaataataattgatagctgatttcagctgggcatgtgctgccttctgcttgcattggcctcacgaagccgcagctacactgtcaacgggcgtcgttccatttcgcgcaggtcgcgccgccgcacgacattggctgcctttcaggcacactcttcggatggtgggttctttgaactttagctcttttttattttacaatttgcattttattccaatttcagccggtgctcgcacagctgctgagcctttggcggttcccaaccgtcctgtggaggagaaggagtctacttctcgtcgtgtgccgggtatttgaaaactctcccattaaaaaagttaaaaaatatttttgttttgtttaggctgatgcgtctgagctggagccaaaaagtggccaacgagggaaaaggatgaaagaatgaaggaaggaataaaaaaaatttcggtttcgttgaacgatcaaattaatttttaatttcttcataataattttaaaaaaatctttttacatgtcttttgtatgatgtgaaaggggataggtaaactcttaactctccctctgagggcattcctaccaatattaaatatttaatttatttaccgaaaaaaaacacataataattgtaaatgatcagtggtgttttctgcttgaacattgatggttatcattcggcgcttttcttttgctttggcggcgccaataagtctgtcgctcgggcgtttttcagtgtgcactctgcacacagttcaaagttgacggcgaagcgtccatcctcagtgcgcaccacttttgcgttgttgttgtaaagtctgttccaatcatctgaattttttaaaatttctaaaataaaaaataaaagttttataacctgagcagaggtagaagcccaacatgtactttcccttggcgagtttccatagttcgcggtcctcgacttttcgcactttcgtcggcggctgctccccattatttcccgcactgttcaattggtgcttacgattggggagttttagggaattcggtgtgaggacagcggctttaatattggtctcatttttggcgtcggagctctttgacggagaaaatttgatcggggaggacattttgttggaaattttttgatttttttttgcaaatgaatcgtgattttggacggatgaactttgcgaactgaaaagtgggcggagcctaaccgattgaaaagtataaaattggcccgcttttgaaattccaccccatttggcgaatcattctaaatttttctcgacacaaaaaaaaatggccatcaacatgaacgacaagaagggattgctcaagcagctcctcggcgagtccgacatcaccgtaacaacgtctggcctgacgatcagccggccgcgtctcaccaacccgcgttttctgccgtttgaggagagcggtcgctgccgctcctgcaaggcaaccgaagtggaggtcgatacgatggtcaccaaagagggcataaccctttggtgtacgcgaattgacaaagtgcagttcgtgccgtttgatgtggtctacgatttgccgggccactgctttttccgagtgaagaacaaggcgagagtcttcaacattccgtacggcgacctgccctcggacaacacctgtgatcaaattcaactcacgcttcacgctgatgaagaacggcgtctcaagcgaaaggcgaaagctgcgctcgacttggttgagcagggtcttatggcagatgcaatgcatgatggggccagctggaagaaagccaagactgccatcggggtgctgaacaaactccctgctcgtaggaacacatggcgacaacgaaaacaaagaaacggctgctttgacaacatcggaaaaccagcacaaagaacagcaaccgccgacggcacctccgtcggaagaaatcgtttccatcgtgccatctgatgttggatctcaagcactgcccagcggtgaagtgaagctggaagaggagaagcaggcagatctcggtgacattgataagacacttgacgaattttttgcaagtctcaaggcgtcaaccaccagcatgtaaagatatttaaatcccacaattttttaaagtttcctcacatggtaaaaatgttgaattcacaagcattttcaaataaagatatttgttttaaacttccatgcggtataatcatttctggtccctcctcatccggtaaaacccagtttcttctgaaattcattgctgagtccagcgagttaattacaccgaacccagtctccattctttattgctttggggaaatgaactcagcggtaccggtgctacaaaaagcgggagttgatgtttatgcgggagtcccatcggaagagctgctcaaacgcatgccaaagtcccttttgttgatactggatgacctcatgttgtccattgatgagcgatacctgtcggagttgttcaccaaaaagtcccaccatcaccaatttgcggtagtgtttgtcacacaaaatttgttcgagaaaaggatcaaagttgcgcgcctatccgcccaatacctggtactgatgcgcgctccaaattcactgttgtcaatccgaaacattggagtccaacttttcccgcgtcagctcgacttctttctggatgcttaccgcaaagcgaccgcccgcccctacggttacttgctgatcgacatgcacgcatcatctgacccagcgctgcgtcttcgcacaaatatatttaaggacgagcaggaggaagacgaaggcattatagtgttcattcccaaaaatggaggaccatagtcaacagcagcacacaaaaataggacagctaataaaagacaattcggactggttgtgtgcattggcaaggaccagatcctctaaaaagtgtagaaagatggtgtgtcacgcaaccagcgaacagctgttagcactcgtggaaatttgtctaaatcttgtcgcttcgcgtttccaactgactagccgacagaaaagaagactgatgccctacgtggaaactgtgcgacggatgagcagagcgagaagtgaacgcggtgcgagacgtgtgcttgtgcagaaaggatcaggattcgtggggttgtttgccgccctcctaacacccgtgctaattgaagtagcaaaatcatttgtcaccaaaaacgcataaatacccgacaattttgttgttttcgtttacattttttgcaaaatggctaataaatttttgcttgttccacaagaaatttatcgagggttaacctcagcggcggatacgggagtcatcaatttggatgcagtaagacatgacttggaccgtgcaaggggtgaacggacgaatccgtcaacaaagaatgtccgatacaatcaacagcttaggcgctatctgcaaatgagaagggagctgacagatagaccaaccaaagtggagttgaccaagggattgagtgttttgttgaagcgagatgggggtgctgatgaggacgacgaagtcgtcaacactcagccacggcctcccgctccaccaccacctccaccaccacctcatcactcatctcaacaacaccaccgtcgccctcccagccttcccgatcagcaatcttcctcatctgacgatagtcatccgcctcgtccaccacgtcctcagagaacaaagaaaaaccatcaatcttctctgaaacatggtcgtttgaaccaatggcagcaaaggcgtcgtgacttacaacaacaacaaccggtagtacgtgatctcctcgctgaagcagcagctgctccgttacctgaaagtgacgatgacgatgaacaaatgctggaaggtgggtatctgctgccagcaccatcacaaaattatggagacataccagtattgcctgactatgcagatgaaattgaggaaatggacaccgcccaacaaagacttgcaagcagaagaaaattaaaagaggagcagagactagataaaaataaaaaatataaaatttactattcccctccaccatctcccacactaccacccgtgtacaaacgactagatcatcctcctccgcctcgttctatacccaaagttgaactgaaaagggatccacaaccaacaaagttgaaaaaatccgcctcgccaccgcctccaccattgcctccacatcgcgcaaagagagaaccaaaaatagagctcgcccctcctccacctcctcgcaatgtctccaaaagggaaccgaaaattgaactagctcctcctccccttcctcctcgtcacttcaccaaaaaggaaccaaaatttgaagttgacccacgaccatccacatcgaagcaagccgggtacttcccgcccccgaaaatcaaaaccgagccaaaacatgagttgcaacctacaaaaaggccagtgccataccgtatcccgaaa

SEQ ID NO: 5887 - DNA, 1401 bp, Heterodera glycines
  unsure (1)..(1401): unsure at all n locations
catttcggcgtctgattcacttaaatgccatggcttttgtttctatcaaaacaaattccataattttgacaccagtcattaatctctttctgagcaattaatcaacccattttagctttgatttgctggtgtttcgtgccttcgctcgtcgctggcagtacaatgctcgagggcgtaataatttaaaatattttaaaataaatttgaaatttcgtttttctttcttgtcggaccctctgattcaacctgtgccggggtataaaattcgctacaattttcgaaaatttcctttggtttcttacaattaagttttttggctaaaatctgttgggtatcaacatttccctaacaaataagatctcttcgatggtgatgcgtctggcctctgctctgtacagttatgccccggaaattgtcgcctcgggcgttgccatctttaccacctacgttttgggacgcaaaaagaaagtttgcgactgatcagcagccgatggaacatagaaagcacaaaacgatgagactattctattacataaaattaacatttccatatatttttttttgactatctttaaaatcaatcatataatgtatttgtattcctcttttccaatttgtaaaaataaatgttcattttttggtcagtgatcagttcaaaagagagatttatttgaaccttttaaattaaatctaaaatttaaaattcaaaaaaagtatttttgaattttacccaaacatgcaaattaattctttaatcactttcttaatatttattataaatattatttccgtaattagaaacaattagtcgccattaaaattcctcgttgtcagcatccggctcattatcctcagcaacctgcaattatttacagccgatcaatttgcttttgattaacttttcattggttccccacctcctcatagtctttttcaagtgccgccaaatcctcgcgcgcctccgaaaattcgccctcctccattccctcgccgacgtaccaatgcacaaaggccctttttgcatacatcaaatcgaatttgtggtttagccgtgcccacgcctcggcaattgccgtcgtattagaaagcatacaaacggcacgatggaccttaaaaggatgtttgggagaaacaattaattgtcttaattgtactactattaatcagaattagtaattggactaattatgtttacacgcgctaagtctccgcctggaacgacagttggcggctgatagttgatgccgaccttgaacccggtgnggacacctgtgaatcataaaaaattgagaccaaaaaagaattaaataaaatgttaaaatatattttcaacaaatatttaattttaataaatgagttcgcatttgtacttattctgaatcatgaaaaatgcttatttcc

SEQ ID NO: 5888 - DNA, 5657 bp, Heterodera glycines
  unsure (1)..(5657): unsure at all n locations
tcattcccgtctagaaaattctcaaaatgaacattggaatactattgtttttttggccataatgtctctcctctctcccatcaaattggatttgttggcactgaccaatccacaaaatgaatgccacgcttcgccttcacagaagcaatggccgcgttcacatcctttggcacgacgtctccacggtacagcaaacagacggccatgtatttgcccttgcgcgagtcgcatttgaccatttggttggccggctcgaagcacatgtgagtgatctcggagacggacagcgcttcgtggtaagcctgtggaaaagaagcaaacggattaaattacgatgtgaattaatcgaaaataaaaactaagtttttaattactttgtccgccgaaatcactggtgcgtaggtggccaaagggaagtgaatgcgcgggtatggcaccaaattcgtctggaattcggtcaaatccacgttcagagccccatcaaagcgcagcgaagcggtgattgatgagacaatttgggcaatctgacaaaaaaaaagtgccactttttccgtaatgccaaaaagcgaacgaacgtaccaatcgatttaaattggcgtaggagggcatctttaaaataaatcggaataaaactttaaattttaacaaaaacacctccacgtctaggctctttctgcaaatgtcgtaaatggcctcattgtcgaccatgaacgagcagtccgagtggttcagcgtggtgtgcgtcgttagaatggagttgtacggctccaccaccgctgtagccacttgcggtgccgggtaaatgctttaaaagtaattaacgatctaattaggccctggggatcgaatcggaattttagtcatacaaaaatataagttattggtgggcccattcattacctgaactcgagtttgctcttcttgccatattccaccgacagacgttccatcagcagagagctgaagccggagccggtgccaccgccgaaggaatggaaaacgaggaaaccctgcagcccggcacaattctcagcctaattgggacaaatgccatttcagggtacaaaaaagtataaattaagaaaattaaaaataattaataattattattcttaattcatttgcccttcttctgttggcacctgttttctcacacgttccagcacacgatcaatttgttccttgcctaaaatctttcttaatgcttttccccttcactttctcccatttgaattcaccgattgtgtaatggcctcgtgcgtaattgttggccgcgtcctccttgccggtgatcaattgttccgggtggaaaagatgccgatacggcccagcacggacttcgtcaatcactgtgggctccaaatcgacgaaaattgcgcgcggcacatatttaccattgctgctctcggtgtagaacgtgttgtaatacttgaacgagaaaaatcaaactaattcgggagggttttcgtgaaaagtccgattggtttaaaatgcattaatttacaggatataaaaaaaattgaaaaattacggaaggtaccatcatttgccaatttggcactttctttgaccccccccccccactcacctggcactttgcctttgaattatgatttgccgacatattagaaatgtattggccatcttccgctgcgctttccccagagcaagtgccgtcgtccttcttcagcagatgcccatcattgccaatcccatgctcaaggttgtacagctcccaacacgcgtttccgatctgtacgcccgcctgtccaatgtgaatggaaacgcattcgcgctgaaagagaacaaaaattaataaaatataaataatatattttttattttagagttatttttggacaataattataaatacattactttaaaaattattaaattaattttaaaaattaatttttatttttttctccatttaccccttcggaggatggcattccaatggattttggctttagttaatgtatttaaaatttgatttgctctgctgaattgttttgctgcacttttaaagggtgccccccccccccccaaatttccgatgcgtgtggcatttgtattggctgtcaatttgccctttgcccacttcttcagccgatgcttatctgttgtctgcgccgtcgtcaacagacggtcacttccccaattttgggttttgctgtacttttgcgtgtcattcggtgatggagatgaagttttagataattaattaattaatgcattaattgactaattttatagaagaaatttgcataatcaactgtcatgtaaatcaattttatgggagagatatttaagggatggaaataaacagttgctgttttttatatttccccataaattcatttttgaattgcatgaattttggtgcacagtttacaaatatatttattaaaaaaaattattcataataaaatttaaatcaacctaaagaagaaagagacagaaaagtttaaaaattgcaaaaggaaaaaaaagaggtaaaagtttctatatttcggtgtcttcggcagcagtttctatttgcggctgatttgcttcttcaatctctgccgctggcttatcgtcttgctcattttgttcatcaacaaaaatggaccatttgaaggcattggacggaatcttaaattaattataattatccctaatcggacatacttataaaatgattcattgattaacacctgaaaagccgattggactttctgcttggccgcatagagtgaattttcgatcacataataactcaacgcgctttgttccgccccattgcccctcaataaatcaatgaccggcccaatttgtgcgttgacaatttgccgtggcagcccaatcgccgtttggaggtccgttgacagtttggccaaagtgtctttggcacgtgtgcaaatttcgatgcgttcatgcaacagtttgtgcagctcctcttcccatcgcttcatctccgttttcgctgcgctattaagcccatccaacgccgaaaccattgccaatttcagcggtttcgatatttcatacgcagccatcgaagtttcaaccaatttaatgcggtagttatccttaaaagtgttaagcattgaaaaccattaattattacccccctccccccgctctctttccaaactttttctccgtccgtcttcgtccatctgtcaattctgtcactgatctggcgccactcccagtcgaatgtgtcgatcaattgcatcagttcgtcgcctttgatcggcggttccgcgatggctttgatctttgccgccgtttccctctccaatgcgtccgttttcgcttccaaaatcatttccgtcagaatttggcacattttctcgcccgcttttcgccctatcgtggcatttcgtttccttctcactctctgcccatcattcatttttaggtcccccaatatttttctcggcattatcaaattgttctcgctgtgtcgtcttggcattttcttttcaacatttgtcccattttctccactatttttgtcccaatttgaaatatgcgcgtccccagtgctgtggcgtctgacagatttgcgtctcattgattgccaatcatccgccgtctgcgttccatttaattgtgccattgcattttcaaatggcgcctcgttgaaataattgttttccttaatttctctcctgattttagcgattgtttcgcttaattccttcaatttatcttccccatctttgcactttgaatccacaaatttttccaccgggtcaatgccaatttcggtggccaatgtgccgaattcgatcgacaatcgctccacaatgtgcacaacttttggcacaatgccctccaaataagttcggtccgtcatttggccaaaactgtcggctcccttttgcagttgctcacagtaagcaattgccgcttcaagcggatttgccattcgttgcttaattttcttaaaaatggtgtagaaatttgctgggtattggatgggctcggtattgacaagtgcgacgagctcggaaacttttgcgctcaaattttgcaattgttcctttaaatccaaaacattctgtggcgatgggtttggcatgattgacagctgctcaactcttttgattagcttgtcgcatgaatttttgcaattgtcaaaattggcatgccaaacaaagccagcaaccccatggaatatcataggcaaaaacaacatggagatgaatatatgtagtggcatttatgaaaagggaataaaataaaatttatgttgctttaggttgccctcgaattgcttaaatggcctaccaaagcaccgcgcgtgccaatgccacgtttactttgggcactttctcttgccacattcacttcaccacacacgcccctcctcatgatgaacataaattataggagtatctcagtgtgggtgttctccattgagaaatgccaaagtaccaatgccacgtacactttacttggcaatggcaccacctactcactcattaaatgcccactcatattgaaatagtgccatcaatgaagtatttcagttagaatatcatgaatataatgcataattttttttttctatcctagagtatttcggcaattcctaatttttatctaattttgggcgattttctttcggaaactgagcttctcagatggattaatatttgtccgttattcatcgttttttattttttttatttctctcaaaaataactgaatttcataattttctaaatgtttcttgaattttgaacagaaatgaaaattttaatttctcgcaaagaaatgacccctaccgcgccggcggggaaccgttcaactcgccgacgccgactcgccagtaaattgtgcaaaaaaaatgaatgaaaaatttaaatttttaactgtaaaataaaatttagccgtagacaaaaagattaaatttgaaataaaggaaaaaggtaattaaaaatgaagaatataaatagaagagaaccagaaaataaactaacatctccagaatcgcacctttccattcgcactgattttatctatgacctatagaaagataaatgatatatccttaaggataatttgtgtttctattcgccagatgatttagaatttgttgcgcgttttggtgtcatgacaactcgtacaacaagttgccttttatacgagttgacattgactcgattctttcctatttggttgcaacaattcaaaccttttttctctattttttcaaattttaatctttttgtctgcggctaaaattttatttttcatttaaaaatttaataattcatttttgttttcgcctttttttattgggaccaataaagcgtacgattaccgtatctgtgtaatgagaaatgttttgcataaattcaatggattttataaaagaaaaaagaaacaaacaaaattatcttttatcatttcaaatgcaaatacttttttggaaatgcaacgaaaattgaatgaacaataattttattatggaattagcaggaacataaaaataaacacaaaaaatagaattaaattgaaaattaaagacattcccatgaaaagaagaattaattccaatgcgaaaagaggcagaaagtggtgggacgaactgcttgccgttctgctgtctgttgngtttgcatcagtaaaaagtgagatcggggaccgtacaa

SEQ ID NO: 5889 - DNA, 1176 bp, Heterodera glycines
ataacacagttttgccatttgtcgtgtcgccactcactctatgaatgtggtcggctcgttgtttccaagatgttcggactctttggatttgcattccccggccgccaagtacaggtagaacacgctggggaacacaaccgaagtcagcgcaaccgttgaaccaccgaagaagtcgaggacgggcccaaagctcggcacggactcggcagtcagcacaatgacagccattacggacgagcggaggacgacgcgtttccagccgaaatctgttgattaaagctgattaaatcaaatttattaacctatttaatgaccatgggggacggagaacacttcctccatttcctggttcagtgggttgatcagcagcgtaacagtgagcagacaatgcgccgtgatcatcaggttgatcgcctgctggatccacactgtctggatggaattgatcaccgactcgcggatgctgttaccgtacacagtgccgcacacgattacggtggtgaagttgaacacagaaataactgaacaacacgataacaaatgcatataagtatatgtagaatattttttaaataatttaataattattcgcatatttatacccccgttaattttaaaatttaactcactgaaaaatccgagaattgccgatttgttgaactcggatggctttttcatgtcatgttgaatggtgggaaaagcgctgtggcctccgtaggtgaacaacatggtgccgagagcggacaaataattggtgaggtcaaacgaaggcaattgcctggagggggcacagctgcgccaatccatcatggcaccaatgcaaatgaacacaactgagaagaagcgattttcaaaatttaaattttaaaaaggcccccaattttgtaattactggcaacgattgtgctaagcattccgcccacaatgaccggccaaaaatcgttgggcgatttgagcaaagtgacgggcaaaagcacaagcgcaatgaccacgatcaaatagcagaagctgatctccttgtcgagaaaggcacggatgaagtcgcgaatgtttttggcacagagcagcaggaaaacggtggtggcaccgtactgggtgacgttgacgcaaatcgatacgatagttctggaaatggaggcaaatacagacaatgtttagatacaatttgatactgta

SEQ ID NO: 5890 - DNA, 6811 bp, Heterodera glycines
  unsure (1)..(6811): unsure at all n locations
ttcattttactagggcttgaattacatggaagaatttgcttcttttttggtgcatcatttaattaaatttcaaaatccanaattaatactttaaaataaaatttctcccgcaaatttgaacaatgaaattgttgcttcacaatttcttttcatccaactttttgaagggtgtcaccaatggttacccacttttgcttcgtgcaaccaaaattgaggtaaaataatgaacaacagttaattctcccatatgataaactcatttggttgggtgttgacttttttataaatttttgaaattaatttgccttcaatttcctattttttttttgactccgaaaatcgaaaaacgaatgggctcactttttgctatataacaacaaatttttaactataagcaagacgacaattaacataaatttccgagttttctgcttttttgtgcaaaaaacgaaggacaccgcctcattttttagtctcctaacggcgcctctcttttttgtatatgcccaaataaattgacacaattttctgtaacatttttttacattttcagcgaatcgacggcacggaattcaatggcgattttgtgaagaaaatgatgccccggcttgactacccggcgctgatccaagcagcaaaagcggtggacgaaagggcggcggacgaattgcccaaggaattgggcaccgattgggaaaaggacgacgacttcctcaaaaaggttggccattcctgtttttgtcagccagcaatggcatattacaaattttacggaaatgtccaaaaattggggcccaaataaaagaaaaattccatttgggactcggttggcccggaaatttgccctaaattgcaaagggatggttaataatccttaaaaaacatccataagcgaaggatttgaaaaagtaggtccaattttttaaaaaatcccccccccccctcaaaatttagattttttctgacaaatgagtttcgtccatgaattatgcttggtttcaggtccactctctgctggtcagttacgaaattgtggagggcgaattggagtgtccggagagccatcgaattttcaacatcaaagaaggcatcccaaactttttggtcggtgccgacgaagtcgaatgaatgaatgatcatcagtttatttgtacaccatttctcgaatttcaaatatttgtttttttcaataaaatgataaatgctgattgatttgccaaagtttgtgtaaaaaataaagccatttttgggcgacaaattaaaatcgacatttttcaacaaaaaattttccactgaaaaaaagtgtgttggaccttgtggggattgaacccacgccttctcgcatgcaaagcgagcactctaccactgagttaaaggcccgatgattagacaacctttcattaagctaatatccagcgacttttgctcatctttgtgttcttcatgaccttgcttatccccttctgcaaaagctaatgcgtacagttgttcaagagatgtgagtgcgctgaaaacttgtcacaaatactttatgccaagaatgagtaaattcaaataaatcgcaatggcaaaccatggaaaataaatgtctttctatatctcatgaatagggttgtaaattatatggactaaaaagctcaaaatggccaaatatggactgtaaactgacaaaatatatgtgtaagccctcaaaaattcctaaaaattgatatattcaatatttgcttaattaaacttaaaacataagataaacaaccaaaaaatccaattaataatagacgtattgttttccatccaaataaatagttgttaaatgaattagaagcttttaccccagaaaaatgaatcattggaaaaaatttcaactttttgttcgaattcaggtccggaattacgcaaatccgagttcagattcgtaatcagcaccctcgaaaactgattttgagcccaaatttaaaaaaaaagttaagggacacccattctccaggattgtcgaattttttttccaaaatgtggggggggcaaactacagaattaccaattaagcctgtgtaatgcatatgcacctgcagcaagaaattaaacaagtcctatttattcatttgtgaatgagcaaaaatcaatacaaccacattcaaatggcataatacctaatccaatatttgatcacataatcgcatcaatcaatcagtcaaccaatcaattcatttcttctgtttgttgctgatcagtgatcacttggcctaggggaactgtcgaagagactgaaaacaaaaacaaagtaaagatgtaaaaagtgtttggatttttaaaattgttcacccattgtcgactccgtcgcatctttcgaagaagctgaaaatcatttaaaggcacaaattgtttacggatttcaatgcttactggatcgaaatttttaagggtgaaccaaaatgtcacattttccctctaaaactagttgaccagcctgctgctgcccaccttaagccgtctgtaaatttcacgcaacgacagcctgacgggttcttcgcccccgatgaatgtagtgggtcgcaacaagaattcgcgtgtcatgtcctgttcggtgaacccgtagatgtaatccaggtcggcgatgttgtggccacgagtcttaattcgaaaaaattgttacccttcacatgcccggattgtggatgttggtcccaaccacccgacattttacaaaaaaaagcatataaatgaagaaaaagaacagagaatccagtcacaaccaaggtaaaagtaaaaaacgacaatctttgttgctctacatggaaaccaaaaaattatattcgggatttgatttataaaaacagacctggaaactccagctgtttgcggctgcacctcacgcatgtcccgaaaaagccgcttcgcggcggcggcatccaattgggtccgcgtcagcatttttttttgctaatgaaaaaaagaggtatattaggatgacaaatatatatatatatatatatatatatatatatatatatatatatatatatatatatatatatatgtttcagtatgttatacaattcaatacacaaatatgcatacgatcaatattaaagttcatcggcacatttacaatgaatatttatttcatccacaatatattttcatcttccgcttggattgcgcacacttccttctcatccctcctcattcgttggccatcagttcggcgagcagtttgggcctagaaaattgttgaaaattaaaatttcaaaaaaaaattcctcaaaaactccacccaatgtcgctgtccttgatggtgaagcacagcaaattgtccaacatttggtttgcctccttctcccacgcgttcactgtgcactgatcagtgccgttccggcatcgtacaatcacggcatcagcaggcactcgcgaattcagcgtcagccgctcgtccgtctcttcattctcccgttccatcttctggaagttggtatggcatgcaatgtgacaaatgacgaggaagttgacagggacggcactcggagcgatgaaaaactgtaaaatgattgaaattattgaaaaaaaattggaatcaaaaaatgcaaatatacggttttacgcgtcccatgaatgactatcatcctcagtttctttgggcatatcttttttcatacttggtcaatgcctatattcttggtatcaaacgaaagcttaaagtctacagaagcttttgtataactaaattctcggctaaaagcaatagacaaaaaattattcttgaaaatactcgaaaaaccttgaatttcatgttttctcattgtaatttcttttctaatgcaagtaattgctgttttcttggatttataagatcccgagagttcaagcttttgattggtaccaagaatataagcattgaccaattaagaaaaaagttatggcctaagaaactgtggatggcatgggacgcgtaaaatcgattagaaaaatgaaaaaaatggaagcaaaaaatgctgtaaaatctttcggaccgtgattaagcttggcatgaacgaagcccattgcggtttgcgccacttgcgaattgtcacaattttcggacggccatccttgcgcggtgtgtgcagccagcggaacaggttgtgcttcggcttctcatcgaactcgtccggcgggttgagcagggcattgatgtgcacagcgctgggcggcggtcggatggggaacatgtgcgtgttggtgatggcacgaaggttagcacagtcgaacagcacattcggcgacacatggcgacgcaacagcgcgaagttgacggctttcatgtcgttcagtgcgaggacggcgtgcgaaatgagtggccaaatgcgttgcgccatcaccgcccagcagcggaggtccgtcgaatggatggtgaactgcacagcgatgccgcgattgatgacacgttgcaggcactgcagaaatgcgatcacttccaggtcgacgtacctggaaaattagggaatttttgaaaatttgcaaaaaaattttgttcgctaagaccaaatgtagatggcactgaagctaatcacgccgcccggtgcaggacacgtggcgagcggcagtcgattgatcaacgcgttgtcgtccataacggtgacagccgccgtgccgcccctgtcccatccgcttggtgcacgatgaacgcccagctcgcccagcctccacttgcgcaggttgaaatgcgtggctaccagcttgccgaaacgtgcgtcgatcagtgcaaacttcgtgccaacttcagcgcggtcaatccaaaacagagtgtccagccaaacgtcgtttgccacgcagctgctgaaaattgcaaaaatttaaaatccgattttttgtgaaattttaaattcgagcggcttacaggtcggccagcgcagcatctggatggtccgacattgctcaattgtcgtcgttttcgttgtacacagagaagggatgattgatgaagatgaattgccgataattaataatggaaaaatggcaaccaaatgaattttttgtgccttttatatatgaatttatccgaaaaatttgactcttccgactaaaaaatttgctatttaaggcccacacattttgcttttccacgttcattccgttcattcattccatccacttaattattcgtcctcctccaccgccacttaaatcgtcagtttatttaggtaattaattgttttgttatgtgcattttcattgtgctaattgccccccccatttttcagcgaatggccaacgcaatgtacgcggcacgggcgcgcgcggccaaggcggaaaagcgtcaagcgcagctgcgcaaggcggccagagcaagggcaggaaacgtaagtttagattaaaaaaatttaaaaccgaaaataattttccccaattgttttcccacagaccgccaaatcgcgacgagccgagcgctgttcaatttgctggggccgactgagccgaatcacgcgtaccacgatgggctgccaccatccgctgcaccgacgctgcctctacaattgggtgcgcgtcaacttgttttgtccgatgtgcggctacaactacacgcgcgggaggccccgtgatcgccatggacgacgcaccaggggactccatcgtatgacgccggatcaggtgcgacgtgaaatggaccgcatgcgtcatatcaggcgctgatggaggaggaggagaggtgggttttgttgaggtgtgggacgggggcagcagggaggacgagtgtaatttttggtctgtttcagtttggtgttttgtgggggagggagggtaatgccaccaccgatggtatcccaccccccttttcgaaaaaaaaattttcaaaattttttagagcggttttcaaggtcggggaatacgattctaacatccatttgggccgtgtgttgggggagggggcggaggacgtgcaatttttggtcctgtttcagtttggtgtgttgtgggggagggagaaattgaaaaattcagaattcattggactcaatttatttttaattatcatttttttgaattttcaggcccggaaacgagaagtcgtcgcaatcgcatggcaaacggcggaaggatggaaagaacggacgacggatcacacaatgaatgattggccgagtgtatttattgatgtatttgtgatggatattcactcatttgttgtctcatataaccatgtcagaacacacgcattgtttgtatcacttaccattatatttgtactgaattgaatgcataaaaattctgtttgctattgctgtttctccatttgcgccaaatttgaatttcaaaaatagaatttttcttttttcgactaaaagtctaaaagtgaaaattttgattttcgggtctaaacgcacagaaacggaatggaaaatcatcaaaataaaattttgaagcacaaatttgaaaaaaaagtgtcagattttggtttcgttttagagcttttgcttagtttaaaaaattagaatttgtcttgcaattgccgattatcccatggtgagtgttctttgcttacccgcgcctcccatggcatttcacgagtgtccccataaaatccgaaaccgttgaatatcctatcaaatgtagtaggccccaaaacattttatttttcagtctcaaaaatgctatttggacgcttaaaatgccacaggacgaatgaaatgccgtgatggttggacgcataaatttaaagaagtccaaaaagcaacagtttcaattcacaagtgatttacaagggcttacagctttattgtccgaatacattcatataatatatacatatttatgtacacataatttgggtgttgca

SEQ ID NO: 5891 - DNA, 1436 bp, Heterodera glycines
taattagtgcgtgagtcattcctaacacgaaaagaaaccttgaaagcggcggtgagtctcccgtttaattgaataaattatcccacaaatgcatcgacgtcactctctctctgttcaagagtcaccgcttttaaatgctcaatttgtcatcatcacagctcagtggtggatggactgggtgtatttttcattccggatcaagtcctcgacttaatgaattgattataatagaaaattacgactcgatgatgccaaaatcgagtggggcgctctagatttctttactcgagatttaatttaaacagaatgctaaaatcgagtgtggcatactcgattttcttactcgagatttaattatgcaattgaaaacagaatttttgcattcaatattgcgcaaaaatcaagcaagcaatcaagtcgaggggggacgtgagttgatccaaaattaaataggaaacgcgcctctgctgcctgcagatatttccacatttttaggcggggatgggccatttttatccccgcaggcggagggggggggcgggagaccatcacattcaatgccgaaaaaagctcaccactataaaacacgaatggaccaatttttatgcacacgagaagaacacacgtgacaaaaaaaaatgatgggacggacggacggaaaggggagggaaaggggatgagttggaagaaaaaaaatgtgagcaataatggaagggttggagaacttatggggggcaaatgggtggtggtggtggtggtcataggtcggctgactttttaaaaagtgaatttggaaatttttgtgaggggcgaaagttttgtcggggcggtaaaatgctaattaggcagattaaaaattatttgtatttttagaataaaattttaaaaattggaaaaaaaagaaaataaatggaaaataccgggaaaatttgaatgtttgatgattcaaaatcaattaatttattctaaaaaattggaaaaataaacaaacagaaaatattatgaagatttgcattttcaatttcaaaagcaaatacctaattaattaattagattctcttggaagagcaaaatgtttgtttaatgaaggaatgaccaaagaagtgtggtgcacttcagcaggaaaaaagataaaaaagttttgctgttatgataaaacaaacaaaatttcgtaattaaatgcacattaattaatgtgagttgaatcgaagctcaagaccacaaatgatgatgaattcgagactgacaaattgaggcacagaaaatgggtggaaattttcttatcctcaacttaaacttttcccataaatttattttcttattttagccgattcaatggataatgttgaaatttagaataaaaatttagtaatgcgttgatttaattatttattgactaatatgataaatggatttatattgacagagagaatttc

SEQ ID NO: 5892 - DNA, 7283 bp, Heterodera glycines
  unsure (1)..(7283): unsure at all n locations
ggagacgacgacnggtggggaaaatggggaggggtccttctccccaccccacccctcgcccctttttgaatttaaattccttgagggctttcatgggaattttttttttcttataaattgtcgggcgggttaaaaattgaaagaagacaagaaagagaaaggggtacccaaagcatttggaattttttttgttgtcgcaaacaaaaaaaacaaaagaggaccccgtcgtcgccgtttgaattttactgcaaattcctataggggcaggaattattattattttttgaattggttagagattaaaattattgtatttaaatgtgtaaagatgtgagaggaagtaaaatatgaaaaattacagcatgtgttttaattggattaatcgggaataaggccgaatggaaaactcaataaagacccgaaatggcagggccaaactcatcgaaagacccggaagtgaaaaatcattaattttcaaaatgttcgaacccgaaaatcgcccagccttaatcgagaagaggtttaaaaaaaattaaaattaacgtttggcagagagagaaaataaaggctctcctttaaaggaaatggagttaataaccctaggaatttcaattttcataagccccggttttttgaaagaaatcccaatttttttcattattcaaagccttactgtttttcacaactgtcggtctacccaaaagtcatgggggaaaaactctattacgaccaccaccaccaccaccattatttttcttcaagcacaaagtcagcaaaacaggctccacaaaacgccggccgaccgtcggcgggcggaacagaacgccaaacttttgatggcttttcacattcatgcggcgcaacccatgcccatgctgtgtgttatatgcaagcattgatgggagcgccgtgatgaaagtgatctgatctattctgtttagcggaatggctctactctggacaatagattgggattttatttgtgacagggcagaaattttggaaaacggatcacaggataaagcctgatcagattagcataaagcctgaattcagcgtaagttttatgaatagaaaattcgtgtgttacgcctgacccacagaaccggttcaatccggcaccaaatttttcttgtgccaatatcaagcatgccatgaaaatcaattgcatatcagggaagtgtcggaatccgattcccgaatttagggctatcgaaagataccaagaatatgtatgccttaatatttttcgggactagaaaaggaattgaaaaaaaaattagacgaaaattgtcatcaattctttgattggttttggcgaaaagtgtggccaaaagcgggggtcatcaaaggcaaaatatttatggccaaattgatgagcgaaagtgctataaagattggttgttgtaatagcacaatttcttgcaggaaaagcacataaaatgcaggcacacacgacgcacgcaaacattcattcattcaaataatttgttgtaataaaaatgattattgcaaaaatgatttttgttacaaaattttatggccaaagggtattataatatgtggccgaccaagcaaatgaatgggcagggaaattaattgttatgtggccaaaaccataatccaaaacacaacaatgaagtagggtttcaagggcccgatccgggtattgccgggtccagaaaagccgagtccggggtccaagtttttaaaccgagtccgggtccggaaatcgtcttcaatcagaccctaaaaaattactcattttttcaaaaaaataatgaaatatttcactaaatatttaatttatattttagattaattcaatgagcaaccaaaaatattttaagatttagtaaaatatcaataaaattttcaattttacaaagtggggaacatgaattgtgaagagtattttcgtaaaaattgaaaaaaaaatagaatttatgcacaatgaaatgaccatctgtgattatggagcaatataccgttattaggtgcgcttttttgcaagccaaccgaagaaagaatttgtgccagatggttttggtaaaagtataaaaaaaaaaactaaaaaatgcctggggaggggatcagcaaaagtgcgagaaaaaacggctggcagattgatcagtgacgaaaaacgcaaatgtggtgtcagaggctctcggtcggttaaaaaatgaccaatggtcgacatttcttacactaattgtataaattatggtgtaaaaagcgtgaaattgaaataatttaaattgttaataaccaaaaaattatttgggataaacaacaaaacttacaacaacaaaaaatgataattcgttcaaaaataagaaatttcacaactaattaagacggttagatagcctcggagcccaatgaaaaaaacgaaattgactcccccctggtccacttgaaaatatgaattgaccccccccccccccttttccatctcaatgatcaatgtcccgagatgagagaatttgggatttttcgggatttgaaaccattctcgagagagagctaaagaaaatcgcatctcaagcaaccaaaacataaactcttaggaaaacgagaaacatcgtcctcaacccaacaatttggagcccaaattcatgggtttacatggaaatttgttgggtggttctgttctgtgctgatcgatttgtgcgcgaaatgcaaaatgcgtaacttaaataaatattttttttggagacggtggacaacaaatccgaagacaatttgcgcagggaattggaggagaagcgagcggagagcgcaagaagaaaaagaagaagccattcattattcattgtgcaacatcagcagcagaaaatgggaaaaaattgcaggattaaaagcattttatgaacaatttttgtttgaaaaacaataaaataattgtaaaatttaaaaataaaaataaaattttagtgtttatattgccaagaaaatggtgtccacataaattttttggtgcttttcaattttgtggccaaatttttctcatcgacaaatgactttgactcctttgtgctggcattaggcctcataaatgttttgggtgcgcattttttgcatatttgcctcattttgattttaaaaaaaattcaaaatttggccataaaattgaagtgttgtgccaaatttgaatttgatggacaaataaaaaaattgtattatattttaaaaattgtgcaaagatttatcccagcagtaaatgctttgtgttgtcaacaaatttatggccaatttgaatgaattggtggcccgttttggaggaaggggctaaaatggccaaaaataaagggatgtgctgcacaccgatgatggtcatccatccaacgccttcccaacccatcaaataatttggggcggatgacgcgcggcgcgcgcatacaatggacgaggcggggatggacgacgagcggtcgcgcagatgtctgtccgtgtcagtcactccgccgcggtgaccccccaggggatctaaggggcaagggacggacggggccaatttctgccccgggggacagttttaatacggtcttttgtgtcttcaccggtctctgcttttaatatatattggtggtggtgttgtggatggaggtgctctttgtttgtttacacacctgccgaccaaccgaccaccctcaacaaactctctgctcaaaatgagttagttcgttgtgcgttcgatgctcattagtgtgttcctgcacaaattagggccaaataatttggggattcctaattaaattaattgttgtttttgactattgttgaacagccagctaacggggattggaaaactgaataatggcatcaagaactaactgttcattacctataatcaaaaaaaatatagaaaacaatttgaaaacccagaattaaaaataaaaataattttttagattattaattttcattttttattggtttcatccctcgttggccgttgtcactttaaattgacgctcacgccaatgccacacctttaggatttagaatatgtagctaaagttttagaagttacaaaatccagaaaattttggatgattttgaagtgaataataaatggtgtgtatccatgcaacccatcggccgggctggggatgtaaaacgaaattattgccctcctccggcagccggcccaccgaccggcggcgggatggacacgtacgttcataaaaggtcatgcgtgaccgtttatgacgatgacgatgacgcggaccgaccgaccgcaccgcgcagcagcagcagcggcaaaacgcttagggcggaaaagtgcggcgccgccgcgaaaacagcgcccaatttaagcgggcgaatgaatgaatgagaatgtttgctgtttgttgttgcgctgtgtgtatgtgtgaaaatgtgcaccaccaaagcaccagcaacaaaattttcattttatgggagaggaaattttggcgacgacgacaagaaaattggattggacggaggagaagagggcaccgatagtttgttgaatttgtttatttatttgagaaagaaagaagaaaggtcagccgaaccgccgcagcgttgagcaaaattttcaaatttgcacatgcaaacagtatgccaatcggtcgggaagttactgtatcggacggcgacaggaaaatgcatccatcacccgtgaaaattttttagaaatttttaatgatgcctgaggattaagtagtgctgctgctcctctgttcgagagcgaaattttttcaaagactagaccaaaaaaaaattaatttttcaaagaattttctctagtcgagaccgagtttttctagaaagcagttatggtagccctaaaaaactactggtacacaaaataatctttggtactctttggtactaacaataaaatatgatgtaaaattattctattaaatgaaagtatagcgatttttgaattgtttttatgttgaaaaactttttgattgcgaaattttttagtgtttggccggagttttgtattattttcttttcaaaatttaaaaatagaaaatgatggccagcataaaccacacaaaaataagccgatttttggtgaggaattttttctacgatgggtccaaaagacaaacaaaaataaagaaaaaaatttttgcgaaaaggcaaaagaattttctcgaggacttttgagaggatttttgtgagataattcacgggagaaagtgaacgggcaaagaaaagaacagtaaatattcgcttagattgttgaataaaattttaaaatatttaaaaaaataaaaatggagttaaaattttgttaaaaatgtgaggcaatgaaaaatgaatgaaacaggaggcattcttgatatttttgttaaaaattcagataagaaatctttaaggcccctttctctatatgtaactaataaaaagatttacaaacaatttaataaatatatatatatataaaaataaagttaatttgttaaataaaagtaacgtttcgttgcgtgacaaattttaattgaaaaaattaccaaaacgccaaactttccaaatagaggaggattaaatcagaaaatgtgtgcatataagcccctcgtgatattttatgtttagttcttaaaaggaatctcatggcgattctgtgtattattcgctgggaatgttttgttccaaaaatggcatttgccgagaaaggccggtccgttatgtgtgtgccaagatgggatttgttgggaagaacggcacacccccgccggggggggggaggggaggctaattgaattccgattttaacgagagagatggggatgggcttagcacaagcagcaaaagggaggaggtggtggtaattggccatgggttttgtcaaaagttaaaaaagtggatttgctactgctcaaatccacataaatccctactaatccccctcccccgcccaattatgcaaatttgctaaccattttgggggatgaactttgttgcaaaaatgaatgaaatttgagaccatcaaatctgcagtgagtgctagtagctaatttattttgaatttttgaaaaatatccaggaaaaggcgttataagaattctagatttatttaaaaaagtgaatcgaatagaaccgaaatttaatttaagttaactaatttaaccctgaaaagcgattaactaattaatttaacggataattattcaatccatatcactacggtaaaaataaatggtactacggtatcaaatttaactcaactaattgaggccaaaattaaaaacaattccccgacaatggatttccatggtttcttcaaagagagatgaaagagaagaaccagtgaaaaatttggcttggttcgacaactcacagctggagggcaaatggatttatgtgatccgtacgtccggacaaatgctcagctccagctgcgcccgggggaggggggggggggggagcggtgttttcaacatcttttgagagggttcaaattttcgccgttgaaaacccataaatcttatttgattggttcaattttaaaaaagcgataatttatatatgtttgattgttaaaaccaaagattttaatttttttaattattttttaagttaaataaagctcaaaaatttaacttaaaaatccttttgattcaagaaaagttaaaaaaacagaaaaaaaataaaacttaaaataaaaaaaaaccttaaaaaaagaacaaaggaaaaaaaataacccagttttcttctaaaaaaaaaattactttttgaaattattgttttagttaaataaagttcaaaaaaattaaatattgtatattaaaaatacaaaagtatctatttttaaattattattttagttaaaaccctcataaatttgtgaaaatttgagagaacaatttagacctacgcataaaccaaattttgttttgtgaatgaatgaatgaatgaatatgaattatatttgatgttttctttaatatttaaaaaaaaatagtaaaacgattattcaaagaactgaacgaggcgaacagttcaatatgaaaatcactgaacatttgttataattgaaaacagagttcatatcgtatgcttttttgaaaagtacagtacctttttgtgcttttaaaattagaagcgtaattttttaaaggaatattaaaaaatgaataaaaattttggcatttattctgtcaattagaatcttttttaggataaaacgtgttattaacaaatttgtgcaaaaatttaaaataaatattttaattaaatttacccctttttaatgcatctgatcaatttttggtgtgttctttgaatttaca

SEQ ID NO: 5893 - DNA, 2403 bp, Heterodera glycines
  unsure (1)..(2403): unsure at all n locations
cctaatcgagacattgtggctttcgagcactcttctactctgcattacgatgattgtcggctgtgcatgctgctcattacagtaattaaaaaaatatttttaataaaaattagtcacgcacccctccaatagaagcacttcccaaaaatagagtataaaattcaattttccaaaatttaaaagttaaaaatataaaatctaaataatcacaaagaaattttattggactcaaaaaaagaaactacaccacgtacaacaactgatctggacgcgccaaaaagccatctttttccggaatgggtcaactgcgtcccgccagctgtgggtcgtttcggcgccgaggtttcagtgccaaaaaatacctagctcagtggccccatgacttgctctggttttgcatgttcacctttgcgtcgttgtttaattaattattatttttttatttggctttgtgcaaaacgttggcgccgaatcgttggcgccgaaatgacccatctctccccctcacccgcctctccaatagagcctcctcccctctttgaaggggtttgaaaagccgaaactcggggtgtcgtcctcccccctattggtagaaaatatgaataattttcaataattttctagattcactcgaatacatcaacgacaacgaacggcatctgtgggtgaagacattgaatttagcgaaaaattagccaaggacgcatcgccaagctttgggcccagcatttatttggacagcgttagcggggctccggaaaagcttgtgtaaatggcgaaaataattgaacgcgatgttttttgtatttctcttttaataaataattttttactaaaatatagaaaataaattgcgaaatattgccattttcaaaaatgccgaaatcaaacaaaataagaatatattggggtgtttggaagttcttgccctccaagaaaagtttttttattttaaaaatcataacaattcaagtaaaaaagtaaatttaaccaaagtttgccaaattattctcatatattagccactactcttcaccaattaattacggttttcttggcatcataaagttatggcctcgtgaattggccaattgtcacgcaaaaacaaactcacattgcaggaggcactacctagccccaaattaaaattttttttctttctaaaaagttgtgaaaacatgttttatggggtttttatcgtcgctgatcacgaatctagaacataaaagtgaattttgaaaatttgtgttttctactttttgttcgaattcgggttcgggaccgaatttgatcaaaataaatgtttgattcgtgatcagcgaccctaaaaactttcacgactttttagaacagaaaaaaaaatttccaaagggggggggggggtggaccatcggcagttttacccttaattgctgtgttatgattttttgaataaaattttcttcgagggcaagaacattccgaactccccaatagaaacaaatttttttatgaaatttaattaaaaatccattaaattaagtcagactcaatttattaattttatttttatgtataaaaggaataaaaaatctaggaaaattcggattttttttaagattttttaaaaaatctttttgatatttatttaattattattttatttcgctgataaattttaaatatttttttataattatttaaaatgccagaaaatgtttattttagaatataagaaatatgcatatactatgaatatatagaaaaaagcccacaaaattatctaagcatataatgaaaattgaatcattccgccataactgaaaatatgccaaattcaattaaaaaaaaattcatcagcacgcatagcacaggtaacggtagcccatatacagaaaaccgcagcgttcccatgttttgtacgtgccgcaaggacatcccaaatatttcgcgctgttcaacacagtgccacaactgctccaaaacgggctgcaagaaaatggggggagtgtattaatttgaattaattaaatttaattgctataattaacaccacttacggggccgacgcgcggtaggccgacgcgccatacgtgcggacaagatgacaaaagcctggtccctcataaactgagcagcgtgaactgcctagagttgctctcttaaaaaaaatatagaattaaaataggaatttaatggcaaacactaaggccacaaatccccgacttttttatgtccttccctgaccctgcattcccaaccgtttggtagaccagactttatttgccctttccgatcctgaattcccgactattntgtgcccttcccacgataataactaactccccgatgttgcgatatccggaaaatgtcttacttctaagcatcacaaaaaccgtcgtcgcactttgtttgtcccaattg

SEQ ID NO: 5894 - DNA, 1683 bp, Heterodera glycines
  unsure (1)..(1683): unsure at all n locations
aaacgggctgcaaggagatggtngaagcaataattttgcattttgattatggtcaaaatgcaccagaaaaatttgttttatcgaaaaattcgctatttatttttcttcatttccgtttaacccctgtgcccaaatcaaatttggaaaaattcataattttcatatataaaatccgttttgcccacgcaaaaatgccataaaaatgtatggctatagcttccctagattagcgctgggttactacgtcatagccttgttcgacctgcacttagctatttagcgcctagcccaactgtcgccccaattttgtgaaattaattgcctctaatgaatgctgcacacttacggggccgctgcgcggtatgccgattcgccgtataagcggtaatgacgacagaagcctggcccctcccaaattgagcatcgttttttgccagcagtggctcgctaagatttatttattttaaaatttgaatttttaatttaattttaaaaataaatttacctccatacattcacagaattggttgtcacagctcttttgtcctatttgcttgttgtagcatctatattttaaagttgataccaaaattgaagaaattttgttttcgattaatttaattgaaatttacctaaaaaatgtcgctaattatttttggggataattttgtaaaaatttatatgtgtttaatccaattccttactcagtctgcacgtagcaacaattgttcatccgatcttaatttttaaaaacaattaaataatgcattgaataattaattacatttaatcatttatttacttttccgtgatgggcaatccgtgtccaccgccgcttcggtgagtgtctgaaatattaattttgaaaatttaaattttgattattttaatttggccaattaatttttttacgtcggtaatttcccatttcattgacacgccgggcttttcccattgccatttggtggcacatgaccacatatgttccattgtctcatatttttcgcccgaagaatcgccaccataattgttgttgttgttgttctcatgtgagtagccaccaggtggaccggcaccatatttgccatcgtgctcatccgacttatcgtatttgccagaaatgccaaggtgaacaaatgccaaacaaaaaattgccaaaattgtcagtgccatttttcttataatatgggtaattaatttaattgcacaagtctcaatattccctagcatgtaattgttttctaatgaacaattatgctaattgtaagcaaaaattggtaatggtaatttgtaagtttttcgtattatttattaaattggttataattttaaattaaaatatttaaaaaataaatgtttttaataaccaagatttattttgagtttaaataaaatgagtgaattcaattgaattgcccatttctttatatatgcagtttcttttctgcaattagtttataaactcattaacgctaataactcattagttaatcaaacaatcataacgctactaattaaccaattaatttcaatcaagttattgtagaggaagtcattttgcaattaggaaaaatttggaaagtttaaattgtgcgcagcagtacaaaacgtttagcgaatggactaaaaaacaaactttgttcaacccaaaaaataggaaaaaataaattgaaaaaacaagtt

SEQ ID NO: 5895 - DNA, 1333 bp, Heterodera glycines
  unsure (1)..(1333): unsure at all n locations
tagtaaacatgaaatgatcagcagaagtgccgaaaatttaaatatncaatgattaaggatttcaaaaatatgtacaaaaagtggtaaaatatgttcataaacatgcaaaaaaattacctaaatatgtacaaaaaccccaaaagtactaaatacgttaaaagaaaataataaaatgcgcgccacttgagaaaatgtcaaacactttatctaaataattgggctaaaataggaaattctaaaaaaaaaatataaaaaaaaaattacaaaaaaaccgaaaaaataatttaaaatggaaaaggaagacagaagaacaattaaatgaaaatgaattggaaccatgaaaaatgatcagcagaagagcccgaatcttgcgggtagttcccaaggtgttttgataagataatcttctgcattttcaattgttttttccaattttgccttttctgccttggccttttcattggcattttcgcataaatttttcatttttcgttcaaattcctttcgaagtttggcaatgtttgtttgtatttctgtttttgatggattttctccacttttctcctctttaattccataattcaattcttcctcattttgcaatatcatttcataaaattgtaatttattttcatcagttttcaaaaaaaaaattcaaaatttctctcatattttttacaacagaaactaatgaattacgatttccattgtcaaccgtaaatattggcttcaccgctggcacatgataagctaattcagcgttttcaccttaagaaacaatatttattattaaaaaatcaaatattactaattaatagggtcgcaacttttaggtacgaaaaatctcaaaatagttaacttaaaacggtggggaaaaatgccaaaaaagtgacaaaatagtggcaaaaagtacgaaatagtgacgaatagtgatcagtctaaaattaagcaaaaataatttttattcacttattgcagttgcaaatgaggtacattttcctttgaactatttccttagcaaatattaaacatttttaaaccaaaatttgtcaaaattgggggaacaatttttaagaaaattttccaattttagtggtattttagaaaaaaattttaggtcgattcgtaggggtatattttttggttttattgcatttttgttaaggaattttccaaaaaagtgtcgaaatagtgaaaaatagtgataaaacgccaaaatagtgaattattttcaatattttaatgaaaaaacgccaaaatagtgatttctagtgactcatagtaacatcagaatcgaaaaaatagtataacactaaaaattgcgaccctacta

SEQ ID NO: 5896 - DNA, 3811 bp, Heterodera glycines
  unsure (1)..(3811): unsure at all n locations
agaattttggatcctccattattagtcttatatggttgcgttcatttattttattggcttcccgtggatgctctattttccaattttctaccgcttttttaagcatttcctccaaatttttgtttctcacattgccaattcattctcataaaatacacagtgccaaggtgagttacatatttttgctttgaatattcaccaatttcaatttcttgctgaccttgcacaaatgcaattagcatattatcgtcgacctaattaataaaaatagattagtaaaattaattgcccctattaattaaattaccgatggatttgcatttgaaaatgagaataaaaaatgataagaaataataataaaggaaattaaagaaaaggaagaaaccatattttttttttaatttacaaaaatgaaaaacatccaattcagctcgccttaaaaacggaccaattttcacttaaaaatcaatttgccaacaatttaattaaaaaataaatgtaaaaatgcatttataaaattatgacttaatacatctaatagtaaaaatcaatgcaaattttgtctaaagtaagaaaaatgtaattatacaaatattatttctaataaatgtagagtaataagtccaatgttgtgaacagttcgatatttttaaattttagttgcaaatcatttcattaattgacaattttcgttcattttccaattttcttccaaaattgaatctcgcctcattataattatgattatgaaccaaaattattgaatgagaaaagattgaagaatttaaattgaattatgaatcaaaattgattataaaacaaaaatgaaagtttaaacggaataatacgacattcggatgattttgcaatatttagttaatcttcgtgctaattatcgcatcgagtgaaaaacgattatttcaaattgatgtgtatggagacggtcgggacgaaattgttgattgaccatcagtaggattaacaaaatcaaatctattttttattttgagccatttttcaaggaagtccaattacttttaaaaatttagtaaattttttttatagcgtttcaattggtattgaaacgatttcgacaaaaaatataataattagggttataaattatatggattaaaaacaccaaatatggacataaaatatggactaaaaaagcccgaaatatggactaaaaagcttaaaaaaggccaaatatggaccaaaatatagactaaaaactgccaaaataaatctttaaaaccctaagaaattccaaaaaaggtatttatattcaatatttgcttaaacagacttaaaaatacgctaaaaactgctaaaaaatggatttaaccataaaaaatgcaaatttctataaattttagcttcacagttgcaagccaaaacatctcaaaatttttgtaataatttcattttttccaaaaaagccaaaatatggactaaaaacgcaaaaaagtcgaaaaatggatttattcccgaaaacccccaaaatatggatttatatggactaaaaaccttcaccaaaccaaaaaattttaatgtagaaatgcttttttgagcccctttcctaaatgaaatcaagaagtaaaattaattaccctaattaattgtctcgtctgtagaacataaatgtaactcgcccgatgggaatcgaacctacgcactttttattttatagcaattatcaaatcaaataaatttaattaacacaaatagcaaaaataaaaagttaaatgaaatttcaataagcgaactttttatttttcaaaaataagagctcatgttaagaaaaaataaaaaaaatgatataagcgatttcccgaaaaagcccaataatataaaagaattctattgaagttctacaatattttatgaattattttcgatttcaccaaattattacaccaattgattataattataataatcgcattattgtaaattaaattaaattaaaaaatatttaaaccaaaatgaccacaaaaagtaaatataatggttgttttttattatgatgattatttatttatttgatggccatgacgagttaatttaatttaattattttggtgtttattttaataaattaaaattaaatctattattcgtttaataaaattttaattttgaacatttaattaaaatatgcctatgatttttagcttcatatttttccgaattcaaagtgaaagcaataataacatcataatatgtttataactaaaataccaatacaataattattttgacggcaatttttaatgaaaatctttctgattaacaatagcacaaataacggcggcccaaatacagaaaaccgcaggtctccgatgttttgtaggtgccacaacgacatcccaacgatcttgcggtggctaataaactgccacaactgctccaatatgtgctgcaaatggggggaggattaattggcaattaattaaaattaattgcccttaattgacctttggtgctctgttggtctatatttgtcgtatgaagaaccgccgccaccataatggttgccgccaccaccataatggttgccaccaccataattgttgttgtcatgatgatagccaccagaagcaggcggacgagcaccatatttgccatcgtgctcgtccgacttatcgtatttgccagaaatgccaatgtgaacaagtgccaagaaaagaattgccaaaagtgtaaatttcatttttaaatttgctaaaaaataattaaaattgaattagttgagaacatgaatgaacggagatgatgatttaataattattgtaagtaatttaaatgtttatgatgaaataaatgaaaaattatttttcaccaatttttatatgcaattctttactgcaattagtttaaatgcccattaatcctaaataatttaattaatcaaacaatcataacgctactaattaacgaataatgaatgcaattaatttcaatcaagttattgtagaggaactcattttgcaagcataaaaatttccaaattaaattgtgcgcagcaatacaaacgtttagcgaatgggcaaaaaaaacaaaataacttcacataaaaaatggaaaaataaattaaacaaaattaggagtcaagattttctaatggacgcctccaaacccaaaaaatgaaaaattaattaaaaagtaattaaattaatcataattattttataatgacaaaaagcgaaaattgataatatcattgagaattaaaaataaagctcaattgacatcataaattataaaaaagattcaataaaccttaagcaaatagagtaaaataatttgattattcaattgtaaaaaatcgataattttggattcgaaattcgatgattcaggaaatgggtaagtttttaatcaaatatcatttattaataatttaaatttagaatgctgatgcttttgtattctgaatttataaaaggtcaggcgacaaattttggaaattttctattttgcctaaagaatatccgaaaaatttgcttgaattcaaagtgcaaatgaggattaatcgagtttttgctgtcctggacgggtttgccatttgaacaatttacgcgacttttgagtaccatcttggccttgtgtatttgatgagaaagaatttgcactgtaacaaaatttgaaacgaatttaaagaaaaataaccaaaaatatttacatatttggacattttaaatgaatattttttcccggtatatgctgaatgaactcccgatcccgctcccgnnaaattttacccaaaacgggagtaaaaatgtactggtaagaattgatttttttt

SEQ ID NO: 5897 - DNA, 1427 bp, Heterodera glycines
attaaaaatggaatccatttatagggcatttgaaaaatgtatgtgaaatatgtcaggtaaaccacacaagtaccgagaaaacgtgtgagataaaaagagagagagagattgaggaggagagaagagggcaaatgagagagaagagaggaaaggatatagagagaggggagaaagtgatagaaagagagagagagaaaagagaggaagcgatagtgagagggggatagagagagagagagagaacgagtgagagaggaagtggatagagagataaagagagagtgagaacgagtgatagagagaggagcgagagagagagatcgaggagaagagagaagaggggaaaggaaagaaagaaaaagattaagaggagattaaaatcgcaaaaactacttttcttatttttatttgcctgcattataaccgtttgtttaaaaaaaattttgaagtagaacggagcggttgggaaccaagcgctcgtaaataactattgaacaattctgcgcatttagctcaaatatattatttcatacttaaaaaatttttatatttgttggcgattcatctcgaattcgagtttcattggttcaacattttgctgcaatacttttgcgccgctttaattgcctgaatttgtttctccaatttatttctaaaaagttaaataaatctgttcattttgtaaatttgttaggccactaaatggggattattttgacacaaaaaaatgaatttttttaaacatgcattttttaaggattaaatgttcgtaaaaaatttttaaattgcgcaaaaaatcccatcggagaagctaaatagtagcaaaaggcagaataatgttgagattttgatagttctactgatgaatccaatcaacattataaaatatttgcatcattatttaagaaaataataaaaaattaaattaaataaaaaataaatttggtaattctaatgatgatcaatcaacattgtaaaataattgcatcatttagaataaaataataacaaattaaattaaataaaaaagaaatttggtaattctaatgatgatcaatcaacattgtaaaataattgcatcatttagaataaaataataacaaattaaattaaataaaaaagaaatttggtaattctactgatggaataatttcatcatttaataaaataaccaatatttaaaataagaactgatgttgaattccttttttatttttttttatttttttcaatcagtttttaattccatttcaaaatgcaattctatttgggagttaattaattaattaagacataatgatgtttaattcctttattcctttttttatcattattttccatcagtttataattccattttcaaatgcaaattccatttgtgagttaataattcgagaaattattttactaatccgttttaattaatt

SEQ ID NO: 5898 - DNA, 3097 bp, Heterodera glycines
  unsure (1)..(3097): unsure at all n locations
aacttaatcaattggtcatttttttttacaaattctgcttcaaatcgcattaaaaattacaaaatttttcccggcggcgcctatcggcaccgccggccctccttgtcccccaaaagtcttggaaaaaacgtgccgcgtaaaaagcggtgttgaaagcaaaaaaaggtcattgatttacattaatttacatggccggtgaccccttcgcaaaattggaaaattggcctgctgaccccttgttttgcaataatctgaattttgaggtctatatctgaattttagtgttctatgtcctgaatttgaaaaaaaaaattggtcaccctcaatatacatatacttctgaacaattctaatgctaaaaaacaggtactcgcgcgaaaactgaataaaaattttgtatttggaaaattttgtccaaaaatttttatgttctaaaattaccggtttttaccggtaccggtaccggttgaaaaagttggtaccggtaccggtttttgcagtaccggtcagtaccggtaccggtttttttgcaattaccgactaccgctcaactctatttcgaaggttaattatgtgtcgttcaaaacgttggaaagtcgggaatttgtgagaaatttgcactgaaaatacgagaaaaaaggaattggacatcaatttcattcaattaaatcggcagattctctcctctctttctttctttatccctgacttttgcatatttattccccctcataaaaacaatcgcacacaatttaaaattttttgtttactttgtgacatacattccaaaaattatatatagaagatttcaccaagatttgtgaaaattttccggcggcgcctatcggcaccgcggaccggccgttaccttattaactctttaaaagttgagtcaaaaagtgcgacatttagtcatttggacaaaaccactagagatcggtattttgaaaaaagcctggacctggattccatgttggacctggacctggatttcctggacaaaaatccaggtccaggaaaaatccaggctcctcgagacctggatccaggcctggacctggattttttgaaatttgttttgaaaagcaaacaaatgaaaaaatcaattatttgtgcttagaaacatctaaaaatatctaattaataataatgaaatgtccatttaaatcagtttatgaaatttggaaataatttattcgattcgaaaaatgatcacttcaaataacaaaagctaatatttataattgatttgtgggagagatttattaaggaagatgagcatttccgcagttttcggtttcaataatgatcgccggtaatcaaaaacatcacgtgccgttttgaaagtccgttcgcttggtacacttgtggcgggagtcgaaagaaatttgttggccagtttagcaagttttgggaattgatttgacaatttccgccgacaatcaatcggggttgagtttgtttcttcgaggccgcactccaaatattcttggaattccagttcaatattctcgtgttgttcagtaggcgtccttggaaattattagggaaactgtaagaattgaagttgtattacctcctgtcaatgttgcttttgacgatgttttttaatcgatcaaaaaaagagtcattccgttttggtgggggagagagagactgatcgggtggcatggtaaaatgttgatcatcgaaatcaaaaatttctggttgtagcggctcagacatcgctttgatccaagcaattacgttcgctctaaacacattgcttgtcatttctgccaaaagaacgcggtccttaaaacgtggatcaaggaatgtcgaaactgcgtacactcttaaaacaaaattaattttcaaaaaaaaattgactatcacttttgattttgaagtccgaaaaaacgtctttttaacgaattgtacataattgttcgaacttggtccactttttttgaaaaaagtttcatttcgtaaagctcgtcatgcataactcctgcgtatggaatcaccaccgaaataggcgactttgataatcctttggtcatcacttcggcaggtttcaaaactaagatgattgttttttacaacatttgctttaaaacaatactcgcaataagttcctccaaaatggaccattcttcgcttgttaaagtgagaccaaagtcacaattttggtaggcatattcattgattgcctttttttgctcgtaaagtcgttcaatcatcatcaggccagaattccaacgggtcgaaacttccttaaaaatactctttaagaattaccaatatctaataacattatacatacctgtaacaagcaatgctcgggaatttcaagaaactcttgaatttcgtgcaattttccgagtgctttgttgctctttttaaaatggccaacgattttacggcatttcacaaacagcttttcaatatcaaggtcggcacttagcccttctttcacaaccaaatttagtaaatgggcggcacaatttgcattcaaaaaagggagaattgcactgccattttcgtcaacttctttaaaggccttaaatatttttatgtaaatataaattttttctaggataatttatacccgacacatattttttgcggaatcagtaacaaaacaatgggtatttgatccttaaattcgccagtgttccaaaatgctgcgaagcttaatcgcaattgctaaccctgtgtgctcaccagggaaatttgtaactgccaaaattctctctttgtaaagccaatttttgtcgatgccatgcgctgtcagactaaataaacaattcttaaaatatatacagaacaaaaatacctaataaaattgtcggaagtgccggcccaacagtcacttgtgaacgacaacactgtgcactgttccacatcactcctaattttggcctgaactcgttcgtaaattttgngcaaaacttctttccttaattaggaaaatattaatttttatatttaattggntcagagacaaacctataatagctttcacatttaacctcctgttgtataagagcatgaaaagtgggatggccaatgattaaatgaaatgttgttgcagatatgtagtgcattatttttt

SEQ ID NO: 5899 - DNA, 4943 bp, Heterodera glycines
tggtcaccataaactctccactcccttttcccattatgttatttccttttcaatccccgacaatgcgttatcggatcacatgtgatatttagtccggcacagatttggttggcggcacggcttatttcgacacccgcagcacacactcctcggggtcgcgcagggtgtctcggaaggagccgtaaaatccgaacaaaaaatcatttctgattttccgattctgagatggtcgtggcttcaactcaattgcattttttcaacttaagtaaaccaacgtcattggatattttagccaaatgggcatcacatcattttttgtttttgggaaaagtcgataatgagaagagcaaagagcggattaaggaagttgtgatttattgcgcatagcgaaagggaagggaagaaacgacggacggaagaagaaggcatttggacgaatcgttcaaagagttaaaagtgagcaaaaaattaatggcggacggagaacggcgaccgaaggacagcagcgaaatgccatttccattcaaatgcccttctcctcctcctccttccttcgtttttgcttactttttttttacatcatttttagttttttttattcttttttttctagtccgattattcctcaaaagttatgaaaattacttgacccaaaatccgctcacagaaatgaattgtttttcgagaattggaaaaattcggtaacaattttttgaaaaaaaaaattaatttaatttttaaatgttctcaatgtgacggtaatgacagaagtgatgaacaaccaaaaacagaaacaatgagtaaaaacctaataaaccaaatgtttgattgacggatcccgccaatttccaagcgatttaaaaaaacaaatcattttactctgctgttcatcacattttattagtttgtgttctgttcattttcaaccatcgcctttcttatttatgattttttcgatggttttttcggtgtgcaaaaaaaaaatgaaaaacaaaatttggtggaagaattaattcgtcgtccgcccaacgaccaccccaaaaactgatcaaaaaaatggttgggaaatgatcatcagcagagtttcgattagctgctctccgacgataacagtcttttttaaagcgttcgcctccaaatatctccaatttttgaacaaattgataatttaaaagataaattctccgtaaaagaaatgaataatttatatgaaataattaatatttacaattccatttaaatgttcataaaattaacattaaattattattttcactggtcattccaagaaaatgaatttgttcacttcgttggacccttctgttaagaaattgttgggctggaaaatgggcgacgaagaagagaaatgggcactgaaagcggtcgaatctttggtgaaaaagatgcaaaaacgaaagcaccatggatacggtaagaggctctaccgtataaaaatgggaggaaccggtgtttttaggtactgtggaggatttggtgcgttactgcaaaatgacattttgttaatcaattgataataatttaattgaaaaaaaaatatttttacggttaaaattaccataaaaaatttaaaaagaaggcaaaaagtaaaaaaacatttattttcgttaaaaatattaaagaaatttttcaatatattttttgatttttaaaatattttacattatgaattttacttaggaatacgcactttcccaccccggctcaagcagcaagtaatcttataaatgtcaattaattaaataattaattgattcatcaatctctcccccctttcattgctttttcctttcttttttcagttgcgtgacaattccccgctctttggacggacgccttcaggtcaaatgaatggctaattacaaaattagcgccggaaaaagccaaaaaatgctaatgggatttttgtaactcctcgtttaatcccttttctgctgaatgagttttgcttatgctattacaaaatccgcttgtccctttgaggtgtcccatcggaagggtcttccccatgtgatttattgccgcgtttggcgttggccgaatttgcagtcccatcagatacgcattttgtcctttgtttacttaacatggatacttcctttacgagttaaggtccaccaccgattgtatgttcccatacgacgggcgaagtgaacaggtggcaaaatcaccaaactaattagggcttaattgattaatttttgttacattatttattatactaaatgataatgttaacattggtcagatatgcatcaatccttatcattaccatcgaattgaaatgctcggacagtcggtatgttcttctttccagcaatattggtcagcaatgtgatttgatcagttgattttccgatttttgcctacaaatgttttcgacattcattaaaatacattttgattttattcaactttttgtctcttttgagaagcctgtgcctcctcctccctcttcttcctccgttgtgccgtcctcctccttttccccctcttccgcttccattggcactttttccactccttccccctctgccgccgcctcttttccgtccgcctccccttccgcttcatccgtctcttccgcttctccctcagtgccatcgttccgccacgtgcacagttatcctcagaccacaaaacaacagttcatgtccaccaatgtcatctccgatcagtccgctctctcctccgcctctcccaccgccgctttgttcacccaatcgccgtcggcactaagcgacgacgacgattttatggcacaacagcagcaacggcacaatgccgcactccaacaacaattgtgccaccatagtcagccatgttgctggtgttcagtttgctattacgaactcaactcgcgggttggcgagccgttcaaggcacgcattttttgttgattgatttgtcattttgagctcaacccataaaaagttagcactgattgataaatgctatgctaagctgatttgatctgattaaatctattagtgtccgatcattaattgtgaaatgttctctctgactgatttgtctgattaactcagatcaattaaatacagtccaattgggagaatattgaattgccaatcaatcgtccgtttttccctttttaggtgctcgaaagtattgtcgtcattgatggtatggcacaaataacaatttgttttgccaatgtaaatgttcccccccccttttttgaaaggttttacgaatccgtccggcgcggggagtgcgtttttaattttccatttaattgcattttaatattttaaggaatttgtcttggcctcctctccaacgtcaacagaaacgtgagaaagcataaaagcgaaaatatcaaagaatttactttttttaaggtgacaattgaaaacactcgcagacacatcggaatgggtgaataatttgtaaaaatattcataattaaagtgcctggtcatggctatcatttttttgcctggttttgaatataaaatgccattaattccctaaaattggtgaccaacaagagtctcgacccaaactcgaataattatttgccattctcaattaaatattttgccctttcccttttcaggcatccgattgatgtgcactgataacaatgttttgcttgtaccgttctttttccatttttggcattatttttggtgctgtccgagagtctcgaaaaaagttcactttttgggttgctaccggcacatatatttttttactctcgagcggcacgtttttattggttttcccgttatgtttattttccatgttccgcagttgaaccaatccgaggctgctgtgttcgttcagtcgagaaatgccaacttcaaatacagccttcagccaacggcggtcaaaaaatgaataattaatgtgccgacaaaatgatcaattaggtagcacaatcttgttgtaaaaaatctgtctgatccattttaaaaaaaaatgtttttatttaatggtttttagaggttcagacattttattgaaagcaattttggggtggtcattttcgcgcgcatattaattgcctaattggctaacattgtcataatgctttcaattttaggtttgtcgtgtccctccgggcgcaacaatggtcagttctttcgttgatctgtttttaatttaatcttcagcagttaatctcggcgtttattaagctaatcttcgatttccatctcttcgccggggtttgtccgtttgtcccccattttgtcatttgtccattttcgttcatttgtccttttttctgcgccagatgcttgaaaaggcgaaggagaatggttaccaacatgtctatgaaattgtgtgagttaatcgcacaaacattggcattttttatacaaatttctcaatccaaattaaacaatttttaaaatgcagcaaaatgtgctttgttcgtctgtcctttgtcaagggatggggagcggactacccgaggtcagtaagtgccaaacagtgcaataatccccggcagggttaagtcgagaccctccgcggcacaaaatcgggaataataatcgacgcatataaaatgccataattcccacgtttattcgcgccatgggttctcaggggaacccattttagttcgaaaattggcgtaatgtttaggtaagttcatttaaggcaggtcagtcactcttccgtttgtttgtgtcgtgctgtttggacgtgcgatgcttcccatcgcttttttaggacgtcacttcgacgccgtgttggctcgaaattcagcttcaccagccaatggcggtacttcccaaagaattgccaatttaattaccccaatattaattgattgattgggttttgctttaatcattttaagtggaccgatgcggcactttcccaattggacccgcccgatcacaacggagttacttcagtgtcataaattggaaaaaacaatgattaaagat

SEQ ID NO: 5900 - DNA, 2588 bp, Heterodera glycines
caattggggaggaggccgccaggagcaatttagccaaagaaactggtcaagcaaccctcgatgccattattgtgcccgtgctggacattttgcgtacaatttccatcaacgccgtggcaatttcagaggaaattccaaccaatcgttccgtcaaggaaaatggtcaaatcagcaacctcgccaatctcagggacaatggcaaaatcggcagaatcctgttaacatgatggatgtgccaaactcttccaacacttcaccaggatttttcgagaacttggcccagtcgttacttgacctcaaaattcaggacaatcgcaattacaaaaatgaggaaccaagatctggggcaatgaatgcgctcacacacatcaaacccaaaacaacagcaatggattgtcaggtcgaaaatgaattagcaaaagaatcctctagtgaatccccagcctgtgggccggaaacaaagacaaacattcccaaaacgtcaaattgggaacggccaagcgtacgatcgaaagtcgcttctttaatgttcattacactaatgcttattggaatgactttgccctttactactgctaatatgccccatctgccaatgcatccccttgtctgtcaaacccaaaacggaggaaaaatttggcaattgccggcagttactggctgttcaaagctgtcaattgatcattcaaaagcacctgttgttcgaactttcgatgtcttttcgccaaatttatttgagcactcggctgatgcttgggcttgccgaaaagtgagaaaatccgtgcgcaagtacacttcaatcactaatgttccgatccaagagactcttgagccacttatgttgcaaattactccgagtgaatgtaagcaaatggccgaaaatggaaagtgcagtttaggcttgctaattaatgactcgggactctcgcatactgacaagaaattggatttgtcaccccgaatgtggctaattggctcatttagctggtcgactgtctcaactgaaaattgttatctttttaagactaaaattatgtcacaacacggtagcacagttatgcaaagtcccctcgggtcagtgaacaattgccaattcaaggcaggccaatgtgagatggaagacaagacattgctcatgtgggacaccaacactacccgtgcctgtgaattttcgaaaattggcacatggaaaggactacaacttgacaatatttggatttcggatgaggtcagttttcgtttgacatttttgaacaacacaaagaaagtcaactcatgtggtctgaatctgataaaatcggaggaaggatttgctgtacaagacttgccttccgacgatagcaacgaatcctcaaagagaagcagaaagacgagatcacttgaaagttgggtcaccgaatcggaaatgaactccaaattgggctatttggatgaacaagtaagagaaatgctgactctttccttttctcagacaattaaatcgatttgtgattatatgttggagacgagaagatgggcagcgacggcacttctctcagatccaacaacttttgccagaaaattattccaatctggtaaactggtggcaaaggtggccgggcccgaattgattaaagtgtggccatgcatcgaattgcaagcacatgactacgaatttgccaaaattgggaactcagcggactccgaattcgaatgctttgacaaaattccaattaaattccgagtgaaggacaacaaaagaatggcatttattgacccaaggacaatgattttgagctccgacgcgagactggcaccatgctctgaataccgcaagcagctcatttttgtgcgtggttctctttatgaagttgatcaaatcgatgctcaggtcaaacaggtgaatgccaatcgcattgacggtttcagccttaatctgtcattggcaccgacttatgctcgccattcctttctccaccttgcccttgtgaatgtgtctgactttattggccaattttacgacgccaatttggcaagagaaagcgaactcacattccaaatcaaaagtgaggacgctatagtcacaaagactttgtctgaacaatgggagcaggtgagtgagtccattcgcaacaaaatgtttgggaattgggaacaaattggaaaaattgtcatgtccatgatgataattattgtttttacagactttttgatccggtttagattaatgattagagacgaatacgttggcagaggaacaacacgacgcatgacttttggtggaaataaaacgcagaaaattgtgaaatctccagcacacctcaacatgatggatctgaatgcatctgtagaatttggtaacgaaattgagctcagtcccgttaagctcattgaacccgcccaaacccaggcacacaaaatcgcaggaaaacgaaagagaccggtaaaaagggctcgcttcagtttttcgggcgccaaaagtactcattgggttttttagtagtttttccttcccaaatgcttttgcaaaaccccgatgtgaataatcaaatcctcattcaattcacttcctccttcaatgatttatctgcttatcattccatttctga

SEQ ID NO: 5901 - DNA, 2604 bp, Heterodera glycines
aagcttaagtcgaatcgaaattctcaaagaaatgcctgtgcctttaaatgttaaggaagtaaaaagagtgctaggacaggcaggcttttacagacggcacattgagaactttgcaatggtcgtagagccattgctgaagcttacgaggcaaggcaataaattcgaatggggcagggaacagcaaaagtctttcgacaagataaaagaactacttactcaagccccgagtctaatttttccagattacgacaaagcatttcacattttcactgacgcctcatcgactggacaaggaggagttttaatgcaaaaggatgacgtgacgggcacattttctgccatttcctattgcagcagaaccctctctgctgctgaaaggaaatggccggcagttcaaattgaaatgagtgccattatttatgctttaagggaattcagaccattcatcttcatgtcggacattgaacttcacacagatcacaaacccctcgcgtttttgctaaaaaaatccgaaaccaatcagcaattggcacgatggcttattgaactacaaaattatcaggtcaaaattgtccacgtggcaggaaaaagcaacactttggctgatgcactttctcgtgccgctgaggacaagcccttgtcggaaatatacaatgtggatgaactcgaggacattatcgaatttccggtctgtctcgctttggcagcacattccagggtggtcgcggacccatttttgcatactttgaccatccgacacgaggatggaaacacttacgaaattaatttgttggaagagcaggcaggagatcctgaagccgcagcctacattgcgtttgtcagggatggggaatttccagctgatttggatgaaaaagaaaaagagttattcgctataggcactgccaattacaaattgatttcgggaattctttattttgaggacaagggactccctccgaggatatatgtcccaatttcgttacgtggactcatttttgaatcatttcactcgtctcttttgggtggtggtcatttgaattacaggaaaacaattgccaagtgcaaaaaatatttttggcccaaaatgtactctgacgttttaacttgggtcaaattgtgtgtcacctgccaattgagacacaatccaacacccgcgtaccgggaagagatgctcatggtgccagccaacacactttttgccaaagttgggctggacttggccggcccctttccagtcactcaaaaagggaataaacacattttaaatatcgtttgttggttcaccaaatacgtgatttctgtcccggtccccgacacaaaagcacaaacaattgcccacgcttttcttaccaattgttacttaaaatacggtggttgcgttgaattaatcaccgataatgcctctgcctttacttccgaatttttcagggaattttgctccatgctttacattgacaaaaagtatgcctgtccacattggagtcaaggcaatgcgtcaactgaacgcacctttcggacatttcacaacatcttggccaaatacatttcgaagactcagcccgacttcgatgaatttttggatgctgccaatttttgctacaacacgtcagtgcatgcttcaacgggtgagactccattttttcttatgtttgggcgtgacccaattttctgtgttgatcagatcattgatccgaaagttcgtgatccgatagccatttcggaccgtaatgaatttaaacagaagctggtcgttgccataagacacgcgtggcacgctgcagctgatgaatatgcaaaagcccagcgaaaaatgaaggaacaatatgacagaaaggcaaggccacagcaaatcacaattggtgaccgagtgctgatcagaaactacgacggacgggtaggaacatccaaaaagtttcaattaccatggcgcggaatttttcgggttatcaaaattgagggcatttatgttactgtgatcagttgcacttcgccaaattcgaacccaaaaagacttcacttaaaccagattaaaaagtgtttcgaaattttgggccctccctgcactatgccaactcaaccagttgaagaggaaaagtgccttgaaaatactgataatgccgataaagcaatttcgaaagggtatgaaattcgaaatgaaatggaccccgaatcccgggaaggcgaaaatttggagcaaatccacgcccgagggccggaaacaagaccagaaattgaagccgatgaggagaaaaatgtcaataaaaaaacggatacggaaccaagaaagtatgaccttaggaagaggacgagaacttggaaagatcttgtgaattattagcacagtaaccattaacatcaaaaatttatttaacaaattcaatgaaattattcgaggtcgatctcgtctaaattgatgaccgaagaggtgcccttctttttcgggatgggcactcgcccctccgccttctgtttctccctctgagcacggcgctgggctgccaacacttcgttgtccgcccgcacgcgctttccgctttgctcatatttcaggcgatatccctgggccctggcctcgctttccttggttttttaaaaatttga

SEQ ID NO: 5902 - DNA, 2753 bp, Heterodera glycines
acttttaaagaatatattaatatattttttaaattttttcctttaactccaatttccatctctaattttcactcagacccccattcttaccagtgcttgttttcccggttcccggttgccctaccgggaccgggacctgagattttcaaaacccgtggcgaggaatttttcgggtcatcaaaattgagggcatttatgttactgtgattagttgcacttcgccaaattcgaacccaaaaagacttcacttaaaccaaattaaaaagtgttacgaaattttgggccctccctgcactatgccaacacaaccagttgaagagaaaaagtgccttgaaaagacacaaaatgtggaagaagtcagttcggaaaggtccggaatccgaaatgaaatggacctcgaatcccgggaaggcgaaaatttagaggaaatccacgcccgagggccggaaacaagaccagaaattgaagccgatgaggagaaaaatgtcaatgaaaaaacggatacggaaccaagaaagtatgaccttaggaagaggacgagaacttggaaagatcttgtgaattattagcacagtaaccattaacatcaaaaatttatttaacaaaatcaatgaaattattcgagatcgatctcgtctaaattgatgaccgaagaggtgcccttctttttcgggatgggcactcgcccctccgccttctgtttctccctctgagcacggcgctgggctgccaacacttcgttgtccgcccgcacgcgctttccgctttgctcatatttcaggcgataatccttggccctggcctcgctttccatggctctttaaaaatttgacttagttgtgaatgagacaattcatctcacttaattccaccaagatactcctcggtttgcttttcggtgaatttataggcttcccgccctttgcagtcacaacgagtgtgttcccccacttctaaatcattaaaattgttgaaaagtcattgtcggagcccattttttactcttaaattgttttgctgccctcgggctacacaactccttcacaaggcaaaccgaagctccgacattgatcccgcaatgcaggccaacggtgagcacgacatcaccgggccgctggatgtggaattcaaagggaattcccgcctgacgcagttgcgcaggggagaaaaagaaactattgtgtccaagcggattcgaacaattgggccaacgatcggtgaacagcacctggcccaattgggaaacctgctgttcgaattccccgccaatgaagagccacaactgaatttttcatggattttcaaaatttttttttatttaactaaaagaaaaaaaaacctttaaacccggtcccaagttgtaattcatatggtggacatgctcgtcctcacggtggagggcgaacaggctggtctcgggcggtgcgcagatcccacgaatgagcgtggcatccttgtcgagtccctaattttttttttctactcaaaataccaaaattttcagcccaaaccatttttccatatgccccattacaggaatagagagctcagttatcagccgatagctttcggtggttttagcgtctggcacaaaccagcgtgtgccatatcgccactcctgcggcaaggggccattcacaatttcgttaaaaaaccttatttttggaccatcttacaataaaaaaaaaaaaaaaaaaaaaaaaaaaacccgctcaatgccggcatcagtctcgtcggtgaatggcagcacctccttgccgtcccgaaagatggttgtgacctttcggtcaactcccttgccatacatgaggtaagagagtgcgccgttggccctcgacgccttcattttatccaccggaatggtggacacagcaatttcggctggcaacgtcgacgcatcggcacctccgctcatgaagcaccggcttccgccaggttggcacccacccaaggtttgcccactctcccgccctgtagtccgtcttgcttcggatgaaataggctgccattgcttatggcgcagctttatggccaaaccacccaccaccgaaacctttttccaattgttatcgttgcgaaggaatgccaataattcattgaaaaagttgagcttataccaaaagtcgaacacttcaatcattttgggttaggacgggacgtaatcacaattttctacaagtcaataattatttttatacttctgagcttatcaggaactctctatatgtaagttgccgactctctacggtttagaaatctcacaaactgtttagcattttcacatatttttattttttctagtgtcaaatcattgcctaaaagaaaccatcaattgcaaattcaatatataatttcaatttatttaattcctcgcctgggggcctaaaaatatttaacaataaaatagtagaaaaaataataatacaaaatgtaaaaattaaaagaaaatttttttttttgatcatttttggctcatctttgtctttggcaacaatttggcacatcaatcggtcatggtccaaaatgtgagcacactccgaacacgctcgaacacttgcgacgtcagccaatagcaatgcgcaacttcagatcgctgcatcaacaaatgtcaaacagcacagtgccttgcctgagggcatgaaacaatcagatttaaaaaaactatagcaatataacaaccattaaaataaaataaaagttcatgtgaatccaaaaataaaaaaagtttttgtttttttaattttctgcggtaa

SEQ ID NO: 5903 - DNA, 3540 bp, Heterodera glycines
ttattttattttattaaattaataaatatgatacattattgaaactgaaatgcaaatgaattattaaaaaatcttttatcacttatacttttattctttatagaaaagaaaaataaaaaaagaataaatttttcttctaaagtatttttattaagggataatctaatgaaagaataaatattaataatttaaaaaataaactcaaacacaaaaaaaaattaaaaaagtttcaaatcacgcctaatttacgctttttacaaaaatgctgcttttactctttgtgacgttaaacaacaaaatgaaaaaattaatgacatttcactggtagggatcggatttatagttttttcactatttttttcctgaactccccatattgaaaaataaaaaattactaataatattattagaaacgagtttaaaattatttttttcaaaaatatctccagtgatgcagaaattattacgttgcaaatgagcttatgaaaattagaaaataaactataattagtaaagaaaaataatattattaacaaaattgcttaattataaatgaacgtttaaagaagatataaatgaaaaaattttcaaaagacgataaatattatatataattgaatttattttaaagttaaggtgataatttcttttgttgtgcttttcaaatggacttgaacggtgcagagaacacaagggaatattaatgaaaaatgaatataaaaacataaacatttgtttaagactaagaaatataatgaataatacaaaaataaaagcttgaatgtgaatgataaacaaatataaacaatttagttattttatcatattattgaaaaataaaatttttatttttactgataaaaaacatttgaatttcgttgcattctctctcaatgtagggaaagaagacaagaaaattttaaaaaataaaattgattttatgtcaagaattacactaatgaaaactccgaagccacaccctagaaaatatacaatttgctctaatttttaaaaccttatttcatcatatttagggaaaataagaaattatcacattttgacaaaaaaatattaaaaaatgtatttctctatacataaaggagcattcgcaatatcaaaacctaaaacgcataatatgaaaatattatttttacataaatgacataaaaggatatgaggtcaaaaagttgaataaatatttaaatattaatttaaatacacaaaaataaataaaaagaatactaactatgaatgtctgatgaatgcatgaacagacaaacaatgtattatttattacaaataatatttttattaatttaattcattttaaatactatatttaatataattttcgaaacaaaagcttgccattgaacatctattatcgaaaaaatactttaattttttatagaatgaaaaaaaagaataaatttttcttttaaagtatttttatgaagggatgaatctagtgaaagaataaatattaataatttataaaataaactcaaacacaaaaaaaaatttaaaaatagtttaaaatcacgcctaatttacgctttttacaaaaatgctgcttttattatttgtgacgttaaacaacaaaatgaaaaaattaatgacatttcactacaaataaaagagaaaataaaaataaacctgatcagaattatataagattaataataaacacttaaagaaatttgaaaatattaatattagcatagaaaataattataagggaaattcatcaaaaaaaaatatttaaacattttattttatttatttcataaaaaaatttccatcttggtttaaattatattattagggtgatgtataagttctatcataatgactaaaaattcatataaaaatccatcacaaatcaaataatacagcaattttaacgaaactttgccattttatgctctttcttagcccggatttttgaccaattgattatgctttttatttgaacttcacaaagttatggtcccgtgaattggccaaggtctttctaaaaccactcacatttccggaagcattgcttagcccaaaattttttatttgactaaacaatattttcctgaaaaagcaaagttagaagaataatttagaataaaaaaaattcataagcaaactctttcattttttattagacaatgttttttggtcaaaacgttctctgtcatttaaatcatttaacgaaaaatttgttgccattaaagcatcaaatttttcaacattttttgttgttggaattttcaattcattaattaattcatttaattgttcattcttcagattttcaaccaaaaagacaaccatttcccaatgcttttgattttctaattcaaccttaagaatttatttttttagtttacaaaattaaattttacatttattttcaagtgctttccagtgccataattgaacaggtcccttttaattgctttgatcagtggcattgctgagctcatttggagttcgccttgcccaaccagcaggaattttggcttcatgcaatggcattccaattgattttcttataattagttttaaatataataagaaatgggcaaaatgttaaacctcagctgggaatcgaacccactcatacaaaaaccctaaattaattttttgtaaatttttcacgtttaagtcattttgggttttcaaaacactttttggccacaaggaactcaaaaacccatttttttaactttttttttgccctttttgtttgcgaataataatttttcagtttttgcaggctaatagagttagttactcaagtgctttcgaatataccaagaatatttaatttaattgagaaagaaaaaaaagttatggccagaaggaacccaaaaacttagtttttcgaactttttgccaaaaacttatggtccaaaaactcgtccggcaataattcgaatgacaaggttttgtcctgctccgaaattaaataaaatggaattagctagaatttttataaaaaattattaatcaatgtgatttttattcacgttttgctatgctttttattctgttctcttctactttctattctactttctataataatacatttttcacaaccatttacctatgtattaaaacatttaatcttaacattatacataatgggggaatctttaaaattgttatttttttctataaattatattttctattttttaaacgaaataaataattgtaaaaggaaactaagaaaataatcctatgatttcgtttttattttgccatcgtaaatatttttataattttaacaatatattaatatattttctcttttacttctataataatcaatttttcactctatttaccaacgtattaaaggatttggtaaatattcatcataggtcccagattcgaaattgcgtaaaaacacttttataggtttttttaggtgctgaaaacgcctaaaccgtcaaaaaaactgcgcgacaaagcgtttagaccgatttaaatcacgaaaatttgcctcaaaaactagccaaaaacactttaaataaaaaa

SEQ ID NO: 5904 - DNA, 3582 bp, Heterodera glycines
  unsure (1)..(3582): unsure at all n locations
atattttattttngggactcaaaatttaccccatttttcgtatgttctttgtgaagcagttttttatttttattctaatttacttcctccaacactcaaattgggaaaaagataggtccttttatgttcaagtgataaaatgaaaaatgaagatgaaaaattccgacttgtaacaccgaaaacccaaaaaaaaataaggggaacataaaaattccgcggtggttccaaagtgatgcttctgaaaaaataaaatataatatccgtaaaaaatttctaatcaatttttcttagaaaatatattaaaatcaaaaaataaattttcggccgcgcctatcggcaccacttttctttttgaaatttaaacccaaaaatggcaaaaattagtcctattttttggcgaaaggcggctaaaatttccttttttttttgctcaccgctgctcaaattgcttttcggttgcaaattcaaattgttctcgctttgttttttaaaaattttcaaaagacaccacatcggaacgagcgcttacaattcccataaaaattgcgttcaaaatgcccttatcggttgtttccttcttatccataaatgtgcatccgtttctttcctctgtctctaattccacaaatcccaccacacaactgcgcacgagtcaaaatatgtcagttcagggcgtccgtagctgtacccgcggctgctgctgctgctggtgccgaagcagcaacaacagtcactactgctgctatttctgctactgcttcctccggagttgaaaatgaaaatgtctcctccaccccgtcgcccgccgttgtcagctgtagccaaaatgcacgagcaaatggcgattagtgcggcaatgatcagccaaatgagaatgatgatcaacagaatcaggctgatgcattggagccatgcgctccaattcacacggcttctggaacagccggaagtttctgatcctcctccgaatccgcgcttacgccgacgccgtcccttttttgcatctgatgggttaaaaagcaaaaaatttaagcaatgttttaagaatacagcatatgccattaaaagaaaaatgaatgaatttcctctactaattaccaccaaaactgctaattaaaatttatttttatgcactatcacagtgggtgtaagtccctcgccttagtcattttaaaacaaataactaggactatgcttaggttttgtaagaatcgatttttcaaaaatcaaaaatcctggtcatgattttgcggacaatcgaaaactttttactcctgaaaatcttgaaatttgtttgaatacaattttgcaatcgaatttagcatctattagggttacaacctatttttcggttttagcacctaaaatcctagccctgtaaattaccgtcatcattttgaggaaacaatcgtgcgtagactgtcttgtataattttgcattttcttcaagccatttttgatatttttccttgtcattgttgctttcttggtgctgctcctgctgatccccgttcttcttccgttttggggtaagaagctcaacgattttcttggcatttgacacaatgccaattttatgaaaactaatcagtgcccaatagccgtgcattgcgagacgccaattggacatctcttcttgggtgtaaatgccaatctttttccaatccaacttcaaatgcttttccatggctttgctcgcttcttcagaagtgcttcttagctctttgctcaattcttccgaattgcttttcgccgcttcttcgggtggcttttccccctttatgattttgctcaaacttttttcgagtttgtcgattctcatccaatcattttcgtttaatttttctttcaatttgtccatcttttcttttaaacttttgagaaacatttccaccaattttttgccccactcatttttttccatttctccaaattttgcgcattctttcgctaagttttcgtattgtcgggtcattagcaaattgctttccttcatcacatccatcaactcaagtttcactttcatttcaataatttctgtttggctttgatttttgcatccttttccatttttcttccagaattttttggcttcttcaattttgtcatccaatttctttttcaaaatttgcaattcttttctggcattatactcctcttggatttcgggaattgtaaattttttctcaaaaaacattaaatttgcataatcttgtgctgtcatatttatggcaaaggtactcagcgtttcaatgaaaattttggcattggcaatgtcttccaactttttgatcactttgtcatccatcgtttcttttccttcattttcctaaaaattattttttaaattaaaaaaaatattttttcaaaattaccctcccaattgtttcagttattttatgcttaattttatcaatttgtgtgttcaaatctttcaattcctttgttgataatcccatacaaagcaacactaaataaaaaagaattataattgtttattttttacttttaacaatattaatagaatatgataataatgaatgaatttaccagtatatgagataaaaaaataatataaaattatcatcgcgtattttctaaaatgaatgcttttcatttatgttatctatctgtattattaagggggttttaaggaaatttttagaaatggccaaaaatccaaacttcgcaattttttgtacacatttcattttttaaatcttttgacaacaaaccccctttaaatgcaattanaacgttattaagcctntcgtattttctccttaatggaactcgggtaaatttcttttgnagattgggncacagaaattaatttaaaaatntggtgaattaaatgggtgcaccccaaaactttttttggaccataatggacataaaaataatttgaaaattgcataaattaaatgggtgcatcccaaaatgtctccggccgaaacgtcgccagaatactttttggaccataattatgtccgtgttagtcaaattaagtattcttgatgttgctcggtacctctaggcgtttttttattattttgccaaatcacaaaaatatctttaagtgtttttgtacaatactaagaatgtttattttggttgagaaaaaaaaattatggccaaaaggaacccaaaaacatagatttcgaactttttgctaaagaattatatccaaaaattcgttcggcaatgtttcgaggggcgacgttttgtcatactcccaaataaaataaaatagatatttcattatttcttaacattatacataatggggaaattccttattttgaaataattaaaattataattttttataaattatattttgtattttttaaacgaaaaaattattgtaaaggaaattaagaaaataattctaatgatttcgttttttgattttgccctcgaaagctatttgtatacttttaacaatatatgatttgtatagcatatcaattcgcacaataatacgaacattcattggcgttgaaaaaaagcttacttctctggagttttatattaagcggggatctctggaaatcttagaatttttcgagtttttcttat

SEQ ID NO: 5905 - DNA, 1020 bp, Heterodera glycines
  unsure (1)..(1020): unsure at all n locations
aaaatagatttggataatcctactgatgatcaatcatcattttaaatatctgcgtcatattaaaatataatatgcaaattatatgaagtgaaaaatagatttggataatcctactgatgatcatcaattatcatttaaataatgncatcataattaataataatattcaaattaaatgaggtaaaaaatagatttgataatcctactgatgatcaatcatcattttaaatatctgcgtcattatttaatataatatgcaaattatgtgaagtgaaaaatagatttggataatcctactgatgatcaatcatcattttaaatatctgcgtcattatttaatataatatgcaaattatatgaagtgaaaaatagatttggataatcctactgatgatcatcaattatcattttaaataattgcatcataatttaataataatattcaaattaaatgaggtaagaaatagatttggataatcctactgatgatcaatcatcattttaaatatctgcgtcattatttaaaataatatgcaaattatatgaagtgaaaaatatatttggataatcctactgatgatcaattacaattttaaataattgcatcatatttaaaataatatgcaaattatgtgaagtaaaaaatagatttggataatcctactgatgatcaatcatcattttaaatatctgcatcattatttaatataatatgcaaattatatgaagtgaaaaatagatttggataatcctactgatgatcaatcatcattttaaatatctgcatcattatttaatataatatgcaaattatatgaagtgaaaaattgatttggataatcctactgatgatcaattacaattttaaataattgcatcatatttaaaataatatgcaaattatgtgaagtaaaaaatagatttggataatcctactgatgatcaatcatcattttaaatatctgcgtcattatttaatataatatgcaaattatgtgaagtgaaaaatagattggataa

SEQ ID NO: 5906 - DNA, 2034 bp, Heterodera glycines
gaccgaactttaaaaaaaccggaattgggaatccggtcaggattggattgccgagattccaatcccgcttttatcggacttctgatctcgattttttcaaagagggtcgggatgctgccaccagtttaggtgcaaccatcccatggtgccctttttttgctcaaccaattaatcaagtcgaaaatttcctgcgctatttttcaaactttaaatagagataaatcgatgatccgactgtggttttctcaaagattaacttgttaagctaaatgacaaaaattaaaaataaacaaaccgtttttaggtgtatctctgcgatggctatgcatttgggcgaaaccgtgccaaaagcccggttctcaacagagacacgggtaattccctttttctttttcttgcttttgtttacaattatattcgatttgttcattcagtgaccgttttgaactatcccttcgagccggtcactattccgccgggcatcgattcggacgaatttcgacgagcattcagcgcagcgcaattgtatttggttggaacggcacatttcaggtttcttgccatatcttttcgccgaaattactttttttttgattatacaaaccctcattagatggtcaggatgaattatgggttgacgggcatttctaaaacatttcttggtatcgtccgacaatcttaacaaaataagtcccgactatccatggagtttcgggattgaatcgtagtggccaatagccatcacgcgcttttcgatgccattttcaaccactttttcagcaaggaaagctgccgtgatgtgatgcaaacggtgctggagacccagcccgactttgtgatggtcgaactgtgctcttcgcgcattcaaattctgtccatggacgagcaaacactgctgagagaggcgcaggcactcacacgccagaaaatactgacaatcatcagagaggtggaagaagtttcagaaactaacaatcacagttaaagtcgaatttagcattttttttagtttaatcgacgaattaacagtaaatactaatgacaattggcatgcatattcacgacttttgttagacaagcttcgcattgaattcagttttaacaaccaaattttagtcaaaaaatagtctggccgtacaaaaatattttagttgtgcacattggacgtgacttactacccattcgtactgcacagctaactaattgctttccccgtccgctttcagaatggactggcccagggtctgctgcaagtgcttctgttgtccctgtccgcccacatcacccaacagttgggcatggcgcctggcggcgaattccgcgccgcgcacgccgcctccaaattggtgcccggttgcggtgtcattctcggcgaccgaccgctcaatgtgacgctgcaacgcgcgctcagcgctttgaacatcttccaacgcatgaaatttttcttccacttgaccgtctcgctgggcatggaaattgagtgagtgaacggtggggaaatgatggaacaaattaactgatagaatgcaatattgtggagttttggaattcattgaatcaaaaatagctttaattatttaaaaaaggcctcccaattccctttcattgacagtgaggccgaagttgaacgctgcaagaacatggacatgctggaagagatgctccaacagatggccggcgaatttccgcaagtgtcgcgcattttggtggacgaaagagaccagtgagttcacagaatactaatatatataacattgaaattgttatcattattattttttaaatttgtattcaacattggtataactttttaattactcagaatttaaacactaattggggtgataattaagaatttgttgttcatttttgtccccaattaacacaaaagtcttccttaggtatatgacccaagtgttgcactcgctgctccaacggagcaccatggagaaactgtacgcaagcaaaaagtgcaatggtctgtctgttttttgatgcgctttcgctaaatgtttggctttttcaatacttttt

SEQ ID NO: 5907 - DNA, 3079 bp, Heterodera glycines
aaaagattttattcactgattgcagttacaaaatattttcttagcaaatattgaacaagaaaaaaaatttgaaggaagaatttttgtgaaaattttccaattcttagggatgtatttttgaaaatttttaggtcgattcttaggggtgtatttttgaaaattttttaggtcgattcttgggatgtatttttgaaaattttttaggtcgattcttgggatgtatttttcgtttttattgcattttttgggaaattttccaaaaaatgccaaaatagtggcaaaaataatgccgcagaaaaaatagttaaaaactaagaatcccatccctacttataaatttcacgatcgggtttccggtgtagacaaaaacacatcttatttttttcgccatgctcagtttcttaaaccataatttctttcatacgtgaccaaggcccactgtaattattcttcatgtcagcattgaggatagccatgcctaaagtgaaatagaacccgtatccattccatcaatctcggctttttctcgagattcagattaaaatttccaaaaataaaaccatccgaccttactgaccaaacaatgaatatttgccgattttatttaaaaaacattttctttgtattactcaaaacaaaatttttatagttacaaaagaaatgagattataaatgagagaacgagagataaattttgatggatgttacaaaggagaaaatgaagagcaaaattatttatgaatggaggatacctccaaattatggtaaaaggagaaattatgttgcggacagatgaaatcccagagaataaagatacaacaaaaaagtaatatttaaattaatttgtctctgtttctctcatcggaaagactgtctctctcctcctccactggtcatttccctgagtgttcttctctcaccctttgcctcacacaaaagcggtggcccgaggcgtgcaagcgctcttggcggccgcagcctcctttttggtggcacagccgtggctcttgagcatcaaagcgcccaagctgttcgcgtagaagtcgggcatcaggtcgtcacggccttgcatttgactttccatgatgtcgtccaccttaaaacaaatttccaaaattttaaatgccgaggacaaaagaatccaaacaaatgccatttcgagaggggggattttcggggtctgagccttttccaccattttgattcatgcaaaatcgctaaaaattttcgagcagtttcaccccgtgacagccggacaggacgagcatggagcgcagtccgtgatcgttgccaaatttgacatcggtgttcagacggtcgcccaccatcaaagtacggcgcgggtcgatggtccatcggcggcagatgtagtcgaaggcgggcgtgttcggcttgccaaccacttgcgggtcgcgtcctgaaacgaaggcatacacgtacgtacaacaaatgggtgggaaacatgcctgatgccgttttgacggctgccaccagcggtcccgcgtccgggatcaccatgttcgggatcgggccggggcacgtctcgtcctcgttggtggccacgaacatacagtcctcattcttgaaatggactgtttttaatacatataaaattcggtattcttggtaaactgcgtaagtcatccctcccgttcaaaaaacggctatattgcacttttatgagtccaaaggtagttgttataagtctaatcaattgacacgtacaatactttgttcatgttcgaacaaaccctatttgattattttcgtttgtaactttctttaaatgctaaaattctcttgttttctcgtattattacattattcagactttgggctttatggacaaagttattatataaaaaacaggtattgtcaattgattggacccataaagagcaatagagcccaaaaaactccataatagttggcaatgaaagttaaaaaaaactaatcgtaaggttttcgctacccatccccttactttaacactgacaaacgcacccgcaagtagttggaggccttcatcagctttaggtagttgaagtacttctcgtaaccgaccaccaccgcaccgacccgctccaatttctcctccaattccaagtcgtaaaggaaggcagaccctttggaggccggctgctcgtccaccgggtcaaacccgtcgccgaagtagtcaatgcccaattggtccatctcatccttgacgccttggccaccgatcaggtacactttcttgtccgagccttggcccaggccagcacggtgcagcaaatcggcaacaacggcggccgggttgacgatgttatgctgaattttggaggggaaatgccatcaatcgcaatgattttaaatttgggaaaggtatttgattaaattgaattcattttattttccctccattttgctcttcggtaaatacctcgttcacacagcgtccgaagccgagttggccaagctttcgagcgtacaccgcgcgagatttggtcgcgttgttggtcaacacgatgatgcgcttcccgtttttggccaaaaagttgacgaaatccgatgaaccggggatagactgctcgccgagccagagaacacctgaaatttaagattcgtggggaaacaaaataatttttttttatctattccacagaaattggtggccaatccagcaaccaagataacaaattcaaaattagattttgacttgttgctcaaatacaaatacccaaaaaattaccatcagcgtcaaagatgaacgtgtcgatgttgtggagcaacatttgctggaaactgttggcgtcaagatggcgaggcatcggcaaagtgaaagacggcattttgcgaccaaaatttgaataggtttattggtaagaagaggaagagagagcaattgagtcagataagctaaaaaagtggattggttttttgatttactcaatttaggaattttgatttcttaagtgatgattggaaaacagttctttcactattttggtactctgaatgaaaggagaggagaagacgttttgtgtaagcggctgcatgttacagcaagtgttttatttttagaaaacttttaaagtgg

SEQ ID NO: 5908 - DNA, 1370 bp, Heterodera glycines
ttcctcttccagtcttgtacatcatcctgttcctctttttccctttctcttcctcttcccctttgtcgtccgttctctgtcttcctcttacactcctgtccctcatccccttcctggttcctttttatcttccttttccactcttgtccctcatccgccatatcttttcacctttctgttccgcttctgtgccttatcccattccccttttcagctttggtaaaaatcaattttggtgcaaaattaattttcgacttttgttcgaattcgggtccagggttcgaaattagtcgaaatgatgtcagattcgtaatcaacgaccccgaaaaccccctagaaatgtttaaatgtatgatttaaaaacttttttttatggtctgtaaacgacattaataccctcttgtttttctagaacctgcagaattagtcaattacgagaacttccactgacaatgagctctttccaaaaagcacaaaaattgcagcggttttatacacaaaaagaaatgcgcagtgtttctgttaatgtgaaaaactgctgcttctgatctgatcagcgttccccccccccaattttcttctgtgactgacaattgcagggactcaattagccaacgctccgccagcacggaggcgcacatgactacataacatcgtggacttttacccgataaattagcgggaatggggggggtctttcgcggggaaatccctcgtcgcacagccatcgtgcttgacggcggagataagaattgaatggatgaatgatgggatggatgggcaatgtgtgtgctgtttgttggtggtcaatgttttgggcgacggcagaaacaaacagagcgaaagagttcagctgttgtagagggttgcagagagagaaaggaaaatgagagagtacggcacttttgcacagagtttcaacggtagatagagttggtgttttgatgagggtgcatagaatggcaaagaatggttgagatagtgtgacacaatgttgagaagcggaaagagcggtgagccgaggagaatgtgcagacagtgcgagactgggatgagacagtttccaactgtgcgttgagtggcagaggcgaaacacaactacggcggcggcggagccaaaaaaagccccccccccccgcccccctcgcaccgctatgtttttctgagcatttcaccaaatttggctcgctttactgctttaaacactataataaaggcgaaggacgacgagacgaagaaggtggacgaccacaaacgaagaagatgacggatgctcgaagaagagacaaaaaactcccccgcgggggggggggggttgtggcggaggatgaaaaagatggatggatggatcatcgacggacggacggacg

SEQ ID NO: 5909 - DNA, 1707 bp, Heterodera glycines
gcgcccgtctgaggccgcaaagcggccgaatgagcctataaaattttttgattaatctcaaatatcttctggaccaacaattactccacaacccataactgatctaggtagcgaagctcccaaagcgcgaagcgctttttcccagctaaatagccgacggttcacgcacccgctagttactatatatgttatattgacaaggagtttcgttgctaaaaccattttctcccggccgaaggccgggagcgccctgaaagtagtggaagggtcttacaactttttgaggagaatccgggaaaactatagaaaaaaatttagcgcggacgactgagtcccagggacggatttctcattttttcgtgcatttgggggcccgtaactttttttctaaaacccaaatcaaaaaatgtctgctgtgagggggctaagttgaagtgttttctaaaaaacaaaaaaaattccaagcctctatctgcaataggaaaggctgtaggttcgtggacttattcagtaccaactttgtccagttcagtcccggttgaataactcattagggtttgatctgggcggggagttaccagcagacttaatcactattgtacctcttttaatcacttttgtacctcttctcatcactgttgtacctcttctcatcacttttgtacctcttctaatcactgttcttcctcttttaatcactattgtacctcttctaatcactgttgtacctcttctaatcacagttgtacctcttctaatcaatcacagttgtacctcttctaatcactgtttacctcttttaatcactgttgtacctctcctaagcactgttgtacctcttctgatcactgttgtacctcttctaatcacttttgtacctcttctaacaattttgtacatcttttaatcactattgtacctcttttaatcacttttgtacctcttctcacactgttgtacctcttctcatcacttttgtacctcttctaatcactgttcttcctcttttaatcactattgtacctcttctaatcactgttgtacctcttctaatcacagttgtacctcttctaatcaatcacagttgtacctcttctaatcactgtttacctcttttaatcactgttgtacctctcctaagcactgttgtacctctttaatcacttttttaatgttttaattcatttaaatgagtgtttttttctatataaaaaaataaatttttttaatttaaattaaattgtttttttttgtgaaaaatttaattaaaaaattaaaattaattattattttttaaattattatttttggtgaatgttttatttaaaattaattatttattaaaattaaaaaaatttcatgttttaatttaatttaaatttgttaaaaataaattcatttcaatttcaaatattctataattctatatgctttatagtttatttttaataaagaaatggagaatttcttttgttatattaaaaatattattaatattcaatttttctttttttaataaaaccatttccttatttgtttaattttaaactatacttcttttaaccgtaattgtacctcttttaaccgtgtttatacctcttccacccctatggttgtaccctactaatcactgttgtacctcttctaatcactgttacacctcttctatcacttttgtacctcttctaatcacttttttacctcttc

SEQ ID NO: 5910 - DNA, 3920 bp, Heterodera glycines
ttatctaggtagcgaagctcccaaagcgcgaagcgctttttcccagcgaaatagccgacggttcacgcacccgctagttactatatatgttatattgacaaggagtttcgtttcaaaaactaattccggccggccgaaggccggccgggccctgaaagtagtggaagggtcttacaactttttgaggagaattcgggaaaactatagaaaaaaattctcgacgcccaactgagtcccgaggagcgatttctcactttttcttgcagtttagggcccgtaactttttttctaaaacccgaatcaaaaagtgcccgctgtgagggcactccgcagaagtgtcctctataatccggtattttttattttttgatcagaccaaatcccggacctgtacagacacggagactcagttaattttttttccccacttcagtaccaggcgaataactcattaggctttgacctgagcgcagggtggccagcagacttattgtagagctttaaaagcccgatttttccaaattttaaaatttcgaaaattttcaaaatttttcgagctaggcctaaaaaacggttttcgggtttttgaattttaggattttttaacaaattttcccagaaaaacgaagaccacttccaaaacatagtttttcgagctctatcgattagtaatttttttggaaaattttcgatttttttcaagaaatagaaaaaatttttggcctcagcgggacatttgagtcctgggcccataactcgtcaggggttgattttagcgaaaaattgacttaggacatttttgtagagcattttaaatgctatcgaatggtgtactacatgtttggaaaatttcaaaaattttcgagctaggccccctagaaattttcggaatttttttttgggttgaaaatgtgggtgtaaaatttttttctggggtattttggggtgctgagcacgaatatgatgtttgtttttcgtttcatgatttttggaattttttaaaaattcgaaaatatttttatttttttggtccttggaaatttgggttaaaatttgaaaattcatatctggcctagggtttgaccaattttgattaaataaagcattaaaaatggagaaaaatcaggagaattttatgggttttatttggcttttgtaacataaatatgaaaaaagttattctagaaattctgtaaaaattcggattttcagaaaaaaatttataactcgcttctgaaaagatattcaggaaaagtaaaatgctacaaaaatccgcaatttttagctctattttataaattttatttcacatttttatcacttttttgaaaaatgttataaaaataaaagtgattttgggattccagtccaaaggggggtgaccaggatttttgagtggaaaaattttttcaccaaaaatctttcaaaaacatgtcattagggctattttatgacgctgatcacgaatacgtgatcagattttacttttaacatcgataagacctcagaatccctgtgtgattggggattctgagcatcatttgaggggggaggggtggggaagttcgaatccgggcggtgtacattattttcgttatatttatggttatttttaatgtttttaattcatttaaaagagtgtttgttatataataaaaaataaatttttttaatttaaattaaattatttttttatgaaaaattttattaaaattaattatttttttaattaaataatttcatatatttttttttatttgagtttttcagaaactaatttgatttcaatctaaataaatttaaattattataagcttcaaagttttttttaataataaaaagaggcatttattttacaatttttaaaaattattaatgcatttttgtacctcttctgccatttgttgtacctcttctcatcactgatgtacctctttgaatcacttttgtacctcttttaatcactttcgtacgtcttttaagcacagtttgtacctcttttaatcacagttgtacctcttctgatcactgttgcacctcttctaatcacagttgaacctgttctaatcactgttgtacctcttttaattcagttttgtacctcttttaatcactgttgtacttcttttaatcacttttgtacttcttttaatcacttttgtacgtcttttaatcactgttgtacctcttttaatcactgttgcacctcttctaataacagtttacctcttctaatctgatgtacctcttctaatcacagttgaacctgttctaatcactgttgtacctcttttaattcagttttgtacttcttttaatcacttttgtacttcttttaatcacttttgtacgtcttttaatcactgttgtacctcttttaatcactgttgcacctcttctaataacagtttacctcttctaatctgatgtacctcttctaatcacagttgaacctgttctaatcactgttgtacctcttttaattcagttttgtacctcttttaatcactgttgtacttcttttaatcacttttgtacttcttttaatcacttttgtacgtcttttaatcactgttgtttaaaattgataaactaaagaatttatttgttttttttaattagaatttgtcaacaaattaatatacaataaataatcaatcattgtacattttagaatttttaaaaattcgaaaatattttcaaactttttttggccttttggaatttggacgaatatttgaaaaatttcaaggggtattttgaattatttaatttttttatttaaattgttttattaatttattttaaattattttctgatgaataactgttttatttaatttgaattttcgagaaattaattcctttcaatttcaataaatattctatattataaatttcgaactttatcatagttttacttcttttaatcactgttgtgcctcttttaatccttttatatctcttaatccctgtgtgattgcccgtctgagttcaactaaattttaaaaacgggcgcgaagcgcccgtccaaggccaaaaaattgaaaaacgggtgcgaagcgcccgtatgagttcaatggatttaaaaaacgggagcgaagcgcccatctgaaccaacaaaatttaaataacgggcgctaagcgcccgttcaaggccaataaaaattgaaaaacgggcgcgaagcgcccgactaaggccgcgaagcggcataacaagctaaaaaacgggcgcgaagcgcccgtatgagtttaacggatttaaaaacgggcgcgaagcgcccgtccaaggccaacaaaaattgaaaaacgggcgcgaagcgcctaacaagctaaaaaacgggcgctaagcggcagtataagttcaacagatttaaaaaacgggcgcgaagcgcccgtattgagcctcgatgtgtactaataacccataatagttttttagaaattcaaaaaaaagatctccaaccaattcaagtctccacgtcccaaagacgagagcgccctgaaatagatgatagggaattacaaattgtggagaattatatgtgaaccatataaaaataaattcactttggcgaactgatattctagaatcaatgtcccactttatcttgtagatgatttaccgttttattataatcaatgcttgtctttacatgatgacctgtgcaaatttttcccaagtcaaagattcttcttataataagtaccgtacctaattaatagacatttgagattctagcgctttattacacaaaaacaattaatttattttcgttagaaggaattggtgtgtaccaagaatatacatataatacatcgcaaaatatgtgcacaaaatatgcactatgcgtagtatgcacaaatatgcaaatacgcatatggaaatacgtccctagaaacacaaaacaaatttaaaa

SEQ ID NO: 5911 - DNA, 1944 bp, Heterodera glycines
  unsure (1)..(1944): unsure at all n locations
tattaaaatttccaattcattttctccttcattttcattcacatttctcacaaaagcgatttgtgattcctgctcttcctcactgctttcaaatccaaattcggtcaatgattttttaaattctactccctttttgtcccttttttctttatttaaattttcaatttcagtatttttttcttcctcatcaaaactttcttcgtcagttttttcctccaattctaaattcgggtcattgacaaatttttcccaatttaagggttcatccgcttccctcaatggaagatcgaccggtccattatacatttttcttttcttggtggacttttcgcaattttccttttttatttagcgattgtaaaattatattatttttttctttttccactcctacacattgaaatggtcctgaccaacgttggtcaaatttatgttttaatacctctttttttaacaaaactaaatcaccaattgttgtgttcttccacttagaacacacaaagaaaaagaaataaataaataattttattgattcggtcggagggcaaattgggaaataaaatataaatgaatgatgaaaggaaagaacaaaaagtgggaggaggtgtccacttttatggacgagggaggaggcggatggacatagaaataacaaataaagtcaataagtcagatcgccataaattcaaattattcactatccaacaccaattttaaattcttttctgtcgcttttcgactgaatcatttacctttttaaatttttcttgtcctttttctatttcttcacgcactattttccaagctttcgatgccttttctgagtgtatttttgtataaatggatatatctgactctaaattttcggagttaggcaactttagcaatcggtctactggtaatttagaatgtcgtaaatatactatataaaatggtgtgtgtttaataactgtatgtatagctgtattataagcaaataatgcatgagtcagtaatttatcccaattgtttcccttttcatttattatttgtgacataatattagctacaattctcattgagccttctgcttggccatttgactgttgatgataagccgttgacattgtatgctcaacaccgtaaatttttgataaattactaaatatttctgaagtaaattgtctgccttggtccgtaacgactatttctggggtggaacatttatgaattactgtctctacaaaagcttcggaaacagtctccgctttttggtcagaaattgcttttgctgttatccatttagaaaaactatcgattgtcagaaaaatgtagaaatttcctcggtcagttttcttaagtggtggacccattaagtcacagtgaaccctttgaaatgggtattccgctgcttttatcggaacacttggtgagaaatttgattgacctggttggactttccttctctgacacccatcacatgcatcaatcaaaagttttacgtcttctttcattccgacccaataaaatctgctttttcaaatccaaaatgtcctttgtcgtgtatttcacaaaaaattctttttcttaatgagtgaggtatgattaattttggattttcagaattctctgtccctttttggttataaatcgcgccgtttatcaggcagtattccaaattacctttttccatttcaaaatttcattgggatattttccagtttttaaaatataaaaaaattttgctaattcctttacttgccgctgttcttcaattatttcttttaaagttattttgttgctattgtcctgattttcttttttgctttcactattctcagtactcagaattttttgcgctttattttcttttttgtttttcttttcacttaaatttatttctatttcgtcttcggttcctgngatattgtaccgtgcgaggaaatctgcggctttattcttttt

SEQ ID NO: 5912 - DNA, 4820 bp, Heterodera glycines
ctttttattaactggtattgaaatttaatgcttttaattttctctcaatagctctaaagcgcttaaaagcggtctacaagaattcgtattgatttttcatagtacctctatacaatattttattcttgcttattaagtcagtattgggtaaataaatcttttatttttctctcgaaaactctaatgcgcataaaagtagtctttaaaagctcataaaaattagtcatgttacctctaggtaaataaagcttttatttttctctcgaaaactctaatgcgcataaaagtagtctttaaaagctcataaaaattagtcatggtacctctatgcaatattttattctcgccttttttaccctctaaatataaactgcatcaggtttcggaagggtcgagttgaaagatcatgaaaattgtaaattggagattactgggacttatcagtagggagtccaattatatgcacatgcatatttttttcctggactgtgggaggcctgaaacgcacgaaaaacatgtttttagcgtgttttgaagcttctaggatgactttccatatgcatgttttgcatatttgtgcatattttggcatttcgtgcatattttatgtgcatatttgggcatttttccaaaaaacctctaatagaatggccccccaacagacaaattggcctttttgacctcaaaaaccggaaaattttccaaaaaaataattttttagcaaaattttcacgaaaaatattgaataaataaattttctcaaaaaatggttaatttatgtcaaaaataagcaaaaaaagcaaaatttcgctttttgggttggtttttcgcaaaaaatgagtaaatttttgctttatcatgtttttttcttctaaaatgatttttaataccacatttagccattttttgaagattttacttaatatttaacaaatttgaagaaatttagagatattacacccttaatttggaaaatttatatgcatatttttcactttttatgtgcatattttgccatttttggtgcatattttatgcgcatattttgcgattttatgtgcatatttttggactccctaattatcggtcactagaaatcactattttggcatttttactcactattttagttaactatttcgggatttttcttcactaaaattcacgtccctatgtgagttctggtgcattttccgacgttcaatcaatgtccatccatcctgttttttttgactaaaacatttcgaactaagtcaaagtttacattcagaatttgcctaagtatacaaaacttttaggctctaatgcagtttatgagtccaatcgacttttatgagtccaaaagtattttatgagtccaatcaattgacaatccagggtttttatacaataactttgtttatgttcgagctaaacctatctttttggtatcattcgaaagcacaaagtctaaataatgtaataatacgataaaactaaagaattctaacatttcaagaaagttacaagcgaaaataatcagcaattacttaattaatcaaatcttttttagcaattgccttaacgatatggttttatatattttatttacagaatcgaattaattctaatatttgcttcaaaaaataataagtcaaaacagcaatggaacacgacgagcaacaaatgtcgatgctgccgtacgaccatggaatggtgagagggaggggggggggcggagcgggggacccacgcgtttcggcgctcccgtttcggcgccagctcgtttttccacttaagcttttttctttggcatccaaatccaacaatcttggtatcattcgaaagctcttaacatgctctattagccttatcaaaaacgaaaagtttttcaagcctgtaaaaattttattaagaaaaaatttcgacttttcacaattttcatgcataactgttttgataattgtctaatcgcaaagcaatagcttagaaaaagcttctaaatagattaagctttcgaacgacaccaacaatactggatttagtttacaaagaaaaaagttatagccaaaaacatgctggcgccgaaacgcagtggaccccggagcggtgccgttcaattgcatgttaaaatattcatttcttccatgtttagctgttgtctgaggacgcggaggaatttctgctgtttgatggtgattttttggttcgcaaaactgaagaaatttccgacgatggacgaatttttgtgttgtctgtgaatgtcgctggccgagtgagtcacattgttttttgccgacacgaggccatggcggggatgtacaccattgagggcaatcctgagggtttcctaaccatcgaacaatttgtcaacaattatcttgggtccagaacttcgatcatcagcgtaagacaaagcttgaatttttttttgttgcgtgattttctattttttcaggggcaatctttattaagtaaaagcctatccggcggtgggaaaatttcacaaattttgaatgaaatttgcgatgaaaaatgagttaactttaattaaatttattatttaatttatttaaaattttttggcattctgtcttagaaaaattttcaaaaaatcaataaaatcccgcataatcccgcacaaaaaatcaaatttgcggatcccgctgcgggattggaactcaaaattctttgcgggacgggatcccgcgggattaatcccgcaaatcccgcattttccaaaaaatgcgggattgcgtgggggtcccaggttcggttcccagtgcatgctattgatgtatttcgatgattttaatgaataaataaaaggaaaagtgaccaaaataattttaaaattgtttcaaatttttaaaaactttatttgtcacttgtaatgaaaaaaaaaaccatcaatccgcgatcagtcaacgatatcgacttcggcatcttgatcactttcttcattcgttttgtcaccttccgcttgctcccgttgttcctcctcccgcttaattagttggttaaaatttttaaaattcccttctgtcagcccaccagcttcaattcgtcaaatctaccggtgtccagcagccaattcgagacgaaatgatgctccagctgttggcgcattttttcatcgtccggcatcgtcttccaaagggaatgcagtgcctcatctcctgaaaaattatgaaaatttgaacttttcccagatgtgccattgtttggcaaattattttgccccattccatctcgaaaagggcctccatttgatcggcgtggacgaggattttccggatgctgttccccgtcatgtctcgctttcttctccagctgttcgatgcgctctgatcgctcgtcaatagccagcggtggcggggtcgtctctccggtgtccattggcgcagtttgtgttgtcgaaaacggcaccaaatcgccgattggtgtgacagatgtcgacggcagcgaaaagccaaattccaagatttcctcgtccatctcgggcgtcagcactggtcctggagttggtggcggcggctccatcgcttcttcggcaggtgcagcagatgttgacggccctgcgtcttgctgtggcgtttcgggattgggattcggcggtggagcggctgaaatttaaaaaaattatttttgaattaaaaattggtgaaaaaactcactcttcttggccaaacgggctttcgtcgcctttgccattttggttcgtccgctcctcccttttttgttcacgatttgcgttgaatttcttgcgttaattttgctcaataattttcttttaggcatctaaaattataaaaataagttattaatttataattttagattgaagcgtaaaaaaataaaactcgagcgttaaaaatattcataatatttttctctatcgatatgcaaaatttggtgtaaattgtatgagtagaaaaaaagttatatgtggcgaaataaatgtcgtttttcctaataataaaaatattagatagtacgccaaaaggagagaaaagttagagaaaaaagatattgttttttctctgcattctctatttattggtacacttctcgttttttggaatggtgtgttaaatcattttcttttctcaaaaaagcagaaaattagcatctcaaaaaaaaatcatcgttgaacccttgaaaagcagcaataaaatggcggagtttacgaaaggacctagcacccttcaacagttgtgcctcatgcatttttaactctgtttccagactttagcttttatcatgttttttcttctaaaataatattttcatacaatattagcaatttttgaaggttttactttacatttagcgaattttattttgagaaattataccataaatttgtaaaaaattatgtccatatttttaaataataggccccaaactcaaaattgtttaaaaacggtcagaatcgatgtaaaaaggttcgaaatgggttggaaaaatagaattgggggcgcgcttgccatttttcaggctgaaaaagtgccggaattggagtgccaaactcagctgggactcaagtgaccgcactataaaaagcactaaaaagacattttaaataatttttctagggtaatttttggcgctgatcacgaatatgacctttattttgcaaaattccgaaccccgaatccaaattcgacgaaaaactcaaaattattaaattaaacgaaaacatattatagggggttttgaggttgctgaacacggttatgacatccattttgatcaaattcgaaccctgacgcgaacaaaaaaccgaaatttaatttaagagtaaattcaaaattaagcctaggcttaggcttcagctt

SEQ ID NO: 5913 - DNA, 6205 bp, Heterodera glycines
  unsure (1)..(6205): unsure at all n locations
atgttttatctattgattttggcctcttgtttgtggtagggaggagaaagctgctgctgtctttcaaaagaagaaaaacagcaattaggtaacacacgacgaacaattgaggccgtatttggagatataattagattaacgaaagaggccaaagatttttctttctcggcaaataccatggttgaagctcaaaaaataaaagataaaaatcctagtgttcccgaggtaaaattttggcatgaaaagcttttaaatggggtaagaaaaatccatacgctatttgataaaataaaaaatgaggagaataacattaaaaatataaaaaaaagtatggaaaaatgccttgatagaaaagatgctgaaatgggccaagaattagcggatgaggcaaaacaatcaatagaaatagcaaaaaactatagaaaggaaattgggcaaacctatcgggccgcttactcaagcccgatttaggcattggagagttggccaataaattaaaagaaacaatgcgagacaagcaaatagatttggaaaggccgagacccaaacagaatttagagacgaatttattgcttataaaatgtcctggtgaaaagaggtgaaaaccaaggaaatatgtgaaatgtccaggaataagtggtgaaaagaggggcaaaatattccataacaggtgtgaaacatatgaaaaaatatgtcataacaggtgaaaatggtaaaaaatgtttcgtaatgtaattggtatggggtgacaggtattgttgtgttattatgtgatttaatggtcagtttttcccaatcatatttcaaaagcggcattttgcgcccgtgccaaccaaaaaaattggtgccagccaaaaaaatacgcagcagtgaaataatgtgacggcttccttttccatttcgtcgccgaccaaattcaaatttgactctagcgtaccgttttccctctcacctgtcaatcaaatttcaatctttcgggactctatgcgcttcgttttcccttctggcggaagtcatgcaccaaaaaacgtcccctctcggggtgccatccccttcccacctgtcaatcaaatttcgtagccagccaaaattcaaattttggttctctcgcgtgccatccttctctgctggcgttcaaattgcttctttcgccggtcttttcccttctttcaccacacacaccactgaaaatcgatcacactcttccgctaattactccgccccttcgcatttgtgccagaattggcgtcctttcattcactcttctactctctcaaaaaatcagctttttcaaccaaccttctcgcccagctaatttcttttttattatcttcaatttcctaatttaattcgtgtcagcgcagcacgtacttgcagtgtttgtgagggagaagaacgggaatgtgaaatttgtgaagggccaagaatggtcacctggtcggcaaaagacggcttggaaccgatgagcgaatttgttaattgngtgaagggcttcagcagatttgaaacggtcgcttttgcacattacgggggacggttcgactcgcatttcgtcttggccgaactatcaaggaaggaaaacgaaactgagctaatgatggcggaccttaagatctatcaaatcaaagcaggaagggtgtgctttcgggatttctggatgcttagtcagaacaagttggcggatctccctaagaccttgggactgagcatcgcggccaagttgtactttcctcacaagtacaacaaaaatgagaactttggcaagagattgcccaatctgccgccacttggagactattgccccgacagtatgaaggaggaggaagcggtaaaattggaatcctggtataagggtaatttcgcaacagatttcgaattaggtaggcagaaaaaatattggcttcttaattaaattggttttaaggggaacagctcagggttttgcagtgaggtattttgaatggttggcgcaacgcaaaggggtgaaagttcgacatgcctgcaacggcggggaggttgaatttggaggtgaaagtggactgtgtgattggtaccgaaaagaaaatcattgaatttcaggttttaaaacatatatatgtatgttcaaatttctattactccagggatgtgcatttcacgggtgcccgaggtgttatctgccgtggacgattggaccaaatgggcgttgcatggaagagaattacagaaggacagagatgcggatggaaaattgagagaaaagtgtatgttaagggcagcgcccttcgggtttcgagtgtggtcaacataacgccacacgcaatgccttttgacccaatcgatattcccttcccctctgttcgtttgttatttaaattcaccctttccctcattcatgttcactcttccctattcagttcactttttgtgcaattgacattattgttcttccccaatttctcttcatttattttcttctaaataaattgtattgtctgcacccaaaataaatatttatatttgttggacactaaacattggcttagcacccattgtgtggaccgaacaaaattggcgacgcccgttcggaagcagaaaaaaagaggaggacaaataaaattgcagcttttagcagcaattcaacaatttgttgactcaaagagaagtcaacaaccaccgcaacttttcaacaaatttgtcatccctgctatacagcttggcgctgttagcagaagaaccggcattccgctagaaagctttcagcttttagtgtgaaagaaatattttgcgctgctatttatttgtctaggcgacaaaaacttagctcaaccacgcgcacccacactgatagcatccaggcgctgttatcaatagtgtggtgaacaaccaaaagaatggcacaaccgacggcacaagagcttttaaagctgattgccgaccagcagacggcgatgacacaacagcagcaacaaattgcacagcttttagctttgcaacaaacgcaaaaggctgatacagtgctcacactgccggatgtggccatcttcgagccgagtgatgacaaatcgcgaataagcgaatggctaaagcgcgcacaattcgcaatcgattgcgtgtctccaaacgcatcggacgctgtcaaggttaaggcgattatgaacaaactctccgaggcggcattcagcgagtacaccaaattctgtctgccagagcccgtgacaagtttcagcttagacacaacagtcaaaaagcttgagaagctgttcgccaagcctcaatcgatcttcatcgaccgatttgagtgcttgatcgcccgcaaaggggagggagaggacttccgatcttttgtcaaccgtctcaagcgtttgatcacggatttcaaattcagcgacttaaaagaacaacagttctatgtcctgatgttgctgacagcgctcaaatcgcacggcgatgcaatgctaaggcaaagaattctgtccaatttgaccgcggatggagacaacatcacgtatgatgcggtggtggaggactgcatgaattttatgactacaattgcggaggccaaagtcatcgagtcttcgtctagtggaagtcaacgaagtcatgccgtaaatgcagtccatccaaaacgagaaaagccgaagtatgagagaccaaaaagccaacaaagcacaaagacggagcaacaaaaatgctggaggtgcggtcaaacgaaccatcaccacgcagcttgcccgcagaaaggctacaaatgccgaaagtgctcacaaaacggacacatcgagtcgcgttgtgaagcagtgcaggaatggcgcaaaaagaacgccaaaagttggctcaagaaaaatgttggcaatgtccacatagtgacagtcaacattggcaccacagcaaaaccgacaacaaagtcaacattgctaagggtcaaggtctcctttcaaggcaaagtcatcgaatttgtcctcgacagcggtgcagaagttaatgtcataaacgaaatgacatacaaattgatcggcagccctaaaataagacctgcaaaagaaaaggcagtgctttacaatggaagcacaagaagcttcatcggaaaagggaccggcacattcgaattcaacggaatgaatgttgaacacgagttttatgtggccggcaaagattccctaaatttgctgtctattcaaacaatggacgcatttgggctgctcgacgaattgaaggaaaagatttcctcaaaaatggtgaacatgtgcaaaggcggtaataaggagaacgctccaagccgaccaaaaggcaccgaggtcaacgaatacctcaccaagctgaaagaaatttttcccaacgtgttcaaagaagaactcggattttgcacaaaggcaaaagcaaatttggtcctaaaaccggacgcacagccaattttcagaaaggctaggccggtaccttacaactcacgagaagttgtcgagaaagagctggaaaggttggagagcctaggaatcatcacgaaagttgagcacacggattgggcggcaccgattataatcgtgaaaaaggccgacggatcagcccgtatgtgcatcgactactcgacgggcctcaacaacgctctattggaccatcagcacccacttccgttgccaaatgacatttttgcgacgctgaatggtggactagtcttctctcaggtggacttaaaagatgcctacctgcaaattgagttgactgctgaagcaaaaaagctatgcacgatcgcaacccaccgtggctattaccaattcaaccgattgccattcggtgtgaagacggcaccaggaatttttcaatccatcatggataaactcctggccggactcgagtttgcgacggcgtaccttgatgacatcataattgtcagcaaaacaaaggacgagcattttcaaaatctggaaaaagtgttcgatcgaatccaaagctggggatttcgggtcaaaatggacaaatgtgcatttttcaaaaaacaaatcaagtatcttggccaaatcatcgacaaggatggaagacgacccgacccaagcaaaatcgcggcaataacaaatatgccagcaccaaaagacgtcccgtcacttcgcacgtttcttggaatggtaaaccattaccaacaatttgtaaaaaacatgcgattcgtccgacaaccattggatgatcttctgaagaaagacaaagactgggactggagcaaagaatgccaagaagcattcataaaaatcaaggaaattttatcctctgatttgctcctaatgcattacgacccaaaactggaaattatcgtggcagctgacgcctcagatcatggaattggcgcagtcatttaccaccgatttccaaacggagcaattaaggccatcgaacatgcctcatcatctttgacacccgctgaaagaaactattcccaaatcgaaaaagagggattggctttgattttcgcagtgcgaaaatttcacaaaatgatctacggaagacaattcattctccaaactgatcacaagccactcaatcgccatttttggcaacaaaaagggaatccgccagatgagcgcgaaccgtcttctacgatggtcactcatgcttttggcgtatgacttcgagattgagtatgtgaacaccaccgaatttggacaagcagatgcactctcgagacttattgcaaaaagcaccggtcccgatgaagatcgagtcatcgcgtccatggaatttgagaaggaagccgaaaatttcttcatcaacactttggaaacagtgtcactctcatcgaaagatataatttcagcaggaaacgaagacgaaaccatcaaaaaggttaagaagtttgtcaaagatggatggcccaatgacaaagcaattgcttcggaaacggaagaaattaaattgttctttcgtcggaaagatgacctctccatcacaaaagaatgtctgatgtacggagaaagagtcgtcatcccgccaaaatttcgagcgaaagtcctccgaatgctccacaaaggccatccaggaataaagcggatgaagcaactggcacggaaccacgtgtattggccaaaactggacgcggaaatcgaggatttcgtcagaaattgtgagccttgccagctcgcggcaaaatcgcccatcaaagcggagctgcattcgtggccgaaggcgagcaaaccatggcaacggaatcgcatggactatgccggaccatttacggaaa

SEQ ID NO: 5914 - DNA, 6385 bp, Heterodera glycines
accaacaaactccgtctttacaattccatcgctttcttcggctccgctcttttcctcgcaatgttggcatttttccccactgaatatccctcaatttgtctcggacttttgggcatttcggccgggcttttgggtaaaaaattctgaatttttctgaattttgggattttcaacattttactaattaggctttaccaccggcggattcttcaaagcgggcccacttgtggccaaacatttcgcattggtcgtaatgggccaaatttcactcggtgagcttacaattaggggggggggagaagctgaaaagggaacaattttgggatggaatgccatggattcaatcaaataaaaacaattatttattggcataatgttttagcgattaccgtaacacttttgctggtgccaattatgcaaaacacttttgcgccgcataacacagcggaggagtggcggtgcgctttccaaattcattttaatactttttaattattttaatttaattttacttattttaattattaaatataattttcgcttttcgttggttttgtccattgtttcgttttccatttcagctccgtctttctgatcactgctgccactttggcactgacaaacgtcgctttttgcttcctttgctccgccgaagcggccgaatgggcaaccgacgaattttcgcgcagcgcctcgcgtaacaaagtgcattgtgtggaggcggcgcaggcgccacaaataaacgtgccgaaaacgttggggtgaagcgaagccgcccaaaatgttacaaagaaaaacaatgtgatttgtacagaaagaaaaatagtctcaatttttgaatgcaattggacaaaaagggcacaaaaattgggggggggggagaaatggcacaaaaagtgaaaacaatcaatcatttggaaattgattgcctttaattacccccccccccctcattagttccaattttcacttttttttctccctttccctccgattgttcccttttttggccttttcttttcttttccctttgcctttggtcccatttttcttttctttctctctctgaccatttttagctttaattcgttgtttttgccttccactgacttttcttcttaaatttgattttgggtattttttcgaatttcgcagaaaatatataaaaaatgccgtggcattgaaaagttacccggaaaaatatttatttaaaaatttgtatttttgttgttgttagcaaatgatgaagtccaattttataaatattttatgtcaaacaaagacacaataaataaatgcaaaatttgaataaaaaaataaagaaaaagaaagaatcaccgtaatttattggaattttgaatggacgaacactctgacagagaaattattattatatggatgtacggtaggaacaaacaaacagacaaacatacggtagtctgtcatttggtattgaaagagaatatgggaaagggggagggcgagagagagaaaggaaatggggaagagatgaggatagagagaggagagagagagagaaagagagagagagggaaagagaaagaaagagaagaaggtaattaatgaataagtgacgaaaattcgcctctcattaatattttgctttggcaattaatttcactaatttatctctgatcagtagtcactggccaatgtttgctaatactcgaaatattattaattaaatgcttattaattaattaaccttaattagcggatagcaattaatgcaaattgccaaaagacagagatcaatcaataaaaatagactaaaatagtctaaaatgcataaatggaaattaataccacctgaaggaagaacatagccaatagcacttactgaaggacggtatactgtaaaagatacggtagaaaaggaaaggaatggcatacagaatgggaccgaagaaagagattgggagagggggagagagagagagaaagagagagagaacgggagagacagagagtgaaggaaagagagagagagagagaaagagagagagaacgggagagacagagagtgaaggaaagagagagagagagagagagaaagagagagagaacgggagagacagagagtgaaggaaagagagagagagagagaaagagagagagaacgggagagacagagagtgaaggaaagagagagagagagagaaagagagagagaacgggagagacagagagtgaaggaaagagagagagagagagaaagagagagagaacgggagagacagagagtgaaggaaagagagagagagagaaagagagagagaacgggagagacagagagtgaaggaaagagagagagagaaacaatagcagcagagtttaacataaaatagtggagaaaacaacaataataaaacaaaaagtgcctaagcgccctttgccggccatcccccggggcgacgcgcgtcggccgtttgtccgcttaaagttcggcatgcatagtgcgtccgctgccaataatgccctcttggcttccgcccgaagagacggacatccgtcgtcccccgcccttttgcttcgcgtgcactttcgtgtgccgtttccgttcgtccgaccgtgcgaattttcgtccgcacacatcgcaacagaagggcttttcgcccgtgtgcgtgcgcatgtgcgtcgtcaaatggtcggagcgggagaaggcgcgcatgcaaaatttgcactgaaattgaaaaaggaaaagcatttggcactttcaaatgcttctgcttcgctgatttgctcacttggaatggcttgtgccccgtgtgaattcgaatgtgccgcgtcagttcgtccgagcgcgagaaacgcttgtcgcaattgtccaccggacattggtgtggtctttcatgcaccggcgtcctcgcgtttcgttggaatggcgaagttgaggcctctggcgtcgttgcattggccacaatgtcaggcacagtgctggctgtggcagcgcccgaaaaagtggagcgccgttcgcgcgaccgttgcggaacgaactcaacggccgaaacggacgcgatgccattagcggaatgttgcggatgggcggcattggacggaaacatcggcgccggttgataagttggccattcatcgaacaacggcggctccagcttgaaattcttaaacaggtcaatgccttaggcaatggaaaagcccgaaaaatgccatttgcgaagtgccaaagtgctgttggagcggagagtggtgcattgcttccagtgaatgagcaccggccgaactcgtcgtcgaggtggaggagttaggccgcgactgctgctgctgcggtgtcaatgcgaccgttccgccggaaagggtcgtgccgacagtgcccggggcgtttccgtcgttggctgaagacgcggcggagactgtgcggctgctgctgtgggtgttgtgactcagctcacaactgcacgaaggggctggcataatgctgcagctgatgctttgatgaatctgcaacttcagagaaatatccgatttcaaccccaactgatcaaatgcttttctatcagatcaatctgattacccccaccactccacctgaaatcgtccggccggcgagcacatttggtggtgttggtgaagtgccgctgatccaccacccgcttgtccctgctgaagcccataggcgctgaattggtgctgctgctgaaggaatcgaaaagatcagtcaggcattcccttggtcaacatatcgcagttcagacttattacttatttggacccgatcaatctttccctgggttcggtctgatcactctctcaccgcttgtccatgcgttgctcctcctccgccccctctgctgccgtactgttggaagtgttgctgttgtatgctgtggttgtgctgcggctgctggtgctgttgatggctctgctgttgcacaatttccattggctctgttccgccgatgactctttgcgctgttgcaaaactgttgttgttgttgctgttattattgttgttgttgccgttgccctccaacgaatgcagcaaatgcttttgttcgcccccgggcgtcgtcgcactgctcgcggccgatgggaccgcctcgggcgtctgtttgccgcacgcgaggggaaaggcaccgccgtcatcgctttctctcattgcctgcggtgggcaaaagggcgcggcatttttgggcattcaatttttgggcaaagtttttacctcatcggagatggacgttttgctgttggtgtccaccgaaaggacgggaaggccctgattacgccagcacgactggaggaagtgctccacgaggggcgagaaggtgaagaagggcgtactcagtcctaaggatttggaaaatcatttaaattacattttaaaattccgtttgtttttgttttttgctttttgtccgaattctttctgcaaaatcatctccgttcgttcgtcactttcacaatttgcgcttctctgccttccccccccccccctctgttaattaatttgtcacatgtttctcccccgggggtgtcttcttctccccccccccctttcccttttttcctatcggacaattcggcgaacaaattattgtattggtaaaagttaattcgcaactgttttggtgaatctcggaatggaatgcctattcgttcttcagaggggggggggggggaggtgcagagagaggaaaatagtgaaaagtgtcgaaattggcaaatgccatcggcattttgggtaattaattaagcggatttcaaatattaataatcagtgggaattcccttctttcttcgcttccgacttcctctcacctggtgagttcaaattttgtgcattcagtggcaaatttgtggagatggaccctttgatttggaaactgagcttctgatcagttcctccggcgttattttttgctgttggcgttgtgccaaaacttccggtggacgcgtggagaagcgaagcggcggaacgatgcgcacactcagcggaagaagaagaagaagaagcgccttttgaggggggggggcaattatggaggaaattaattcatttatttagcaaaataaaatcaaaattggaattttacttggctggtgatggtcggactgaggcggtgagtggtggtgagaagatgctgacacaacggtggaggtgatttcgatgttggctaaatggggggggggaattagacaaaaaaagggggagggcatggccagcaaagcaaaagcattggcaatggcaaatgccatcgattggcattgatcatttacagaaaagttaaaaaacccatcaaaatgacacttttgtaaattgtttgaaatcgtaaaaagagaaagaaaataataaataaatttaaatttaattaaatttttaatttaaaaatcaaaaagttttgtcctcctcagagtatgtgaatgaataataatgggcttcccttttcctaattattcattcttttccatttctccacctgttagcaatggctcgtggtccccgaaaaatgcctgtgaatgttgactttttggtgtcgccgagttcaggcacaacggcgtgttcagttcgtcgatgtgaaccaattgctacgggggggggggcggtgcttagaaagacacgcccctcagctgatctctgatcacatgcgacacgaatgaatcaaccaactgattgcgatgcgctttttcatattatttttaatggattgactgatcaatgacagcgtttatttatggggtgacgaggggtggggagagaaaggtccttttgggctcttaagccgtttttgccattttaaattcgtgtcgcattgcgaaacgatgcgtgccgtcgcgtcaagacgcgtaccgacgattttgggccgctgccgccgcctgcgcaagtgtttgttggcgatgtgagcagtgcggtcggcgtgcgtaaaaggtccggaatcttcggcgtcggcgtttccaaagcgtgtgccaaaagtccgtttgaaagcaatgcgccggcggcaacgttcggcgtcattctctgctgccgattgccgcgtattccagcggagttcgcgtgcaatacgcacgcgctgttgtacgagtcgatcttcagctcaggaacattgggtgtcctccgcgttgggtttccgcttccgccgcctgttcccgcgtgtgcgcttttgtcttcggcggttcggtgcgcggaagcgcaccgcagctgaccaggttcaggctgtggttgttgttgttctgctgttagcgtcgtaattgtctctaacggctccaccggcgatgctccgtcagtcccttggccaatgtcccgaggggaggcacacggcgaatccgacggagacgaaatggggcgcggcggcaccgctgtgatggaaggcgatttgaatggaagagaaaaaacggtagaagcggcaat

SEQ ID NO: 5915 - DNA, 3519 bp, Heterodera glycines
actgattgtccaaagatggccaaattttgcacctgacaccatatcgttggacttcgagcaagcggtggtcgctgctgtccgcacagtctttccactttgtcgtgtgcaattctgcttttttcacttggtgagaagtatgaagaagcgaattgcttcagagggtttaacacaggtattgattgcatttttgtattttccaatagaatttttcattttaagacatacaacaacgatgccgtctttgctgaaaaaagcaaaatgatcacttctatggcgtttcttcctgtccaccatctccctgctgctctcaatgctttgcaggcacaacttcctcaacaacttatgggcgtcttcaattggtgaatacgggcatttgattgtacacatccaactgtcttccgcttcatcaacacaattcgatgtgagcaaaagtctattgatgcagaaatctcacgatgcatcgctggtgaactccctcctcaaaaggcgcccaaatatcgtgccgccgatgcgagaattcttcgactcttgcagagctacaatgccatcaacaataaccaggctcaccaaaatgatcacaattaccatgcccttatcaatgttaacccctataacatcatcaattttctccttggtatttctcggaattatgagatgcgcccgtaatattttcaatgttttgttatttttttgttgttaacacattgataaatctattatggtgttaattttaaagaattttcgagaaacaaatcagaattggatcaatgtaggacaaaaacagcttgccagactaaaacggccagactaaaccgacccccaccgtgcaaaattgggaaattcggaaaatgcgatttgagtttttataaataatgggctggaattaaaattcggaaattcggatcccaacgttttattcaaaatttatacgaatccaggtgatcagggttcgagaaatttttgggacaatttcttgccttaattctcgagagcagacgatccaagaaaaaaaaatgatggacataacacacaatttgctaccaagaaatatttgtttgtggtggataattgcgaatcaattaggggaaggaaggaataattaatcaattaatgatcatgatgatgattaattaggatggttaattaggataatgattaatgaacaaaatgattttcattgttttttttgcagccatttgcgaaaactttgacaaacttttaaaaaatttaattatttgattttttgagaaaaaaaaatctacgttttattgaaaactcttaaaaaaaccttttttgtaaaaaactgcgttgtacgaactgccattgacccaaaaataggcactaaatctttgaaaactggtgccatcgagaaaaaaaaaattgtaaaatttggtgccaaaaaaataaaatttaaatttgattgaattgaagcccattcattttaaatatcattggctctcctttttagccatcaatttatgttgccatgctaattaccaacaaatgttgcggaaacattggcactgcacttttgtccaattttggcatcttttgtcatgttttgggttgatcacgaaaacattttgtgccaaaaagggtgaagtttgttaattgctcaatttactctctttttggcattcattgtaaatacataatcgtttgtttgttttgtttgttttgcgttgtgtcgtccgtcgtttgtcgtcccttttccgcttatttttggccttttgtccaaaagggcgcgcaaattgcaaatgcgtcaaaaaacaaatcgcagaaaattttgcactttaaaaggacaaaattttgtttttgaaagaaaattatggtgaaaatcaaccaatttttgatcatttaatattgaatgaacgattaattaaaaaagaaaatttaaaatatatatttaaaaaataattcatgttttaaaccaattcatcaaagttttaattatattgaaaaatggatgaattcattaaagtcaattcgaaaagcaattaaaaacaattaacgcatgtgacttatccgtgccggtactcaattagactacagcgaagaataaaaaaattttcggcatttttgttaatttcatcatcgtcatagcacagtatggcattccaattttcttgataacaaatgatgacataacacattcgtcgtcatctgtccttccgccgttcttcctttaattaaaccatcaatcaccgccgccggcgctaaaatccgatgttttcggcacggcacagacgcattgtcattttggcgagaaaaatcccgaatttgctctgatgcgtgcactttcagcggatataattcccatggattttgcaacactaatccggcgcaaatttgcgcgcctttttgcgccaaacattctaatttcattggctacaaacatatccaaaaatggcacactttctgtgtgcaaaatgcctgcgggcacagccattagccaaaattaacttttctttttttgtagctgttcaatgtgccgcctgtgatggcggcacaccaaaacaacaacaacaaaaacaacaaacggagcataatccgacaatggcattggcatcggaaatggtgctcatctgacaggcaaccaaagccaaccaattagccaaatggtgttttgttcgtgtgcccggcggcgatgaacacacattcgcgcaaaattataataactttgaacttttgtggcatgctgttgaggaaaatgaatgaatggatgcgatgttgctgccgactggcgttcattggcgaaaattggcttttatgtgattagtgccattttgaaaaaataaccaaatttttggcattccgtagtgcaagaaaaaacatgcaaatatcacatgaattaatattgaagaaaatttaaattgtgataatggggataaaatgattttttaaaacgctctctaatcacagagaagcaacaagaaaaaaaagaaattttgggaaattcggaaaatgcgatttgagtttttataaataatgggctggaattaaaattcggaaattcggatcccaacgttttattcaaaattatttatacgaatccaggtgatcagggttcgatgaccggaatgatcaggcaggaacagagaatgtcccgtctaaaatacctttttgggttcgttcatttgtaaaagcaatgactcagtttcataagcacaatttgagtgttcttgaatgcaatcaaaattaaggtgcatgaaaaatttgaacaaattttcgatgcaaaaggtgaaaatgctgaaatttataacccaaatttttaaattatccaatcaatttatatctctataaaatataattttaaaatgatcaaagtatatccaatcaaatcaaaaagtgatcaaactaaattttcatctaaaaatagtccaagacaacgtccaaaccattcattacgcatttctgctttttgcacatgtgaagttcaaatgtgagcctctcggcaggggaggattaatgtcttagaagaagcccccgaggggcaacagatttcgtgcaaattaattt

SEQ ID NO: 5916 - DNA, 2360 bp, Heterodera glycines
atgcgggggaaatgaaaggattggaacagggtcaaattgggaccgccaacaacgtgatgatggcacaattgatggccatgctcttgagaaaaagcccatggatcactggcacagtggccgaatgccatgggtcaacaggaaaatatgtcgaaaatgtcgggcaatgccatgctattacattgttggacggatcctccaaaaacaaaacaaaagacagaaaaaagctcattataatgtggttggaatgattgtgacttgagtgtgtgctgctcttgagaaccccgactggtttcatgtaaaaagaaatttttgggacaatttcttgccttaattctcgagagcagacgatccaagaaaaaaaaatgatggacataacacacaatttgctaccaagaaatatttgtttgtggtggataattgcgaatcaattaggggaaggaaggaataattaatcaattaatgatcatgatgatgattaattaggatggttaattaggataatgattaatgaacaaaatgattttcattgtttttttgcagccatttgcgcgggtccttaagatatgtgctgctgttactgcttcaattccgacccatttccatgatgcgcttcatcttctcgcaaagctctcggatttgatggcggacaaataggcggagaatgtcggctcactgttgcacaggtcgtagttgcacacgcaccggaacgcgaactccaccgccaggtccggctttatcgtcatgaagcggctgaagtcgtagcgctacaaaaaaaaagcaaaagattatataatattcaattttacagtacaaatgggcgagataagtaatacggtatcccctggcccctacagggtacggtgggtaacggcagcaacccgtgaaaagaaatcaaagtcaatgcaaattgtttcaaaataacccctcaaattgagacccagaaaaaccattaaaaacaatcttgacatataattgatgcccatttttggcacaaattctcgactccaattattgactgtgttatggtgggatgacgtttttttttgtgtgaggtcacagcacgtaatttgataaagaatgtgccgcttttggaacgcgattatgctgaatttttgccaatttgagggatttcaggcaatttctatttatgagagacttaattgaacttcgcgaaaactctgatcagcatgattccccctcccatcacatctttaacccacactcacttcgtaaatgcatacggtcaagatccggtactcgtccaccgacatggcgaacgcggtgttgtacgccgccatcatgtcattgtcggggccaagcccgaactggctgccgttgaccagctcgttgcccacaatggtggccggcaccagggcacagtatgtccacgattcgttttgcacaattgtagttttgccctaaaaaattttaaaaaatatattttttttggcaccaataatagcatttaacgtaaaatggcatcgccatttccccccgtcatgtgaggcatttaattacccgccgctaaagtgccattatacctatattagacatgcatataagccacattaatcccccggtggggggggggggggagacaacacaatgggcaaccaaatcttttacgtgccaaaaattcctcggcatttccccccattttcaggaaggccaaatggccacacttccgcaattaaataccccgccgataatgaccccccccccgcggcgtttgtgccgtggccgatcgaccgccgactcacgtcatgccaaaacgggaacaaaattggaaaagagaaattaaaaaaaggcagagagtgtcgtgtcttggctttttgttcccctccctcatcatccaattttctgtgtcaccacattttggcggggaatgtgaacatattattcgcaaattcccccgggggtcgctgaagggagtgatggcatataccaaaagaatgtttaattagtcagcaccagtccccgaaaattcttgaaactctcgaggattaaaatatgttaactgtgccttaatgccatcggcaacaaggtcactatgccaatgttggcacggcatgcaaccccacggaacgcacccgtcaacacaacaacttacattcactgtctcgtagcaggtcaggccggcaaccagcgcgttgttgctcagctgggtgcagaggatcaccaacacgagtgcgcaacgtcgggccattgtcatcgtcaacgacggcattcggcgatggcacaagtgccgccgttggagtttgccacaaccgtactccaccaccactttttcgtcgccaccattgcgagcagccggtcgaacgttaattatgccgttggcctctctattgccgctaccgtag

SEQ ID NO: 5917 - DNA, 1170 bp, Heterodera glycines
gtcgaggatgagctctttatctatatatttgttacaaagagtaatgtaattgccaattcaggccaccaaaattttaagtcattgacatttgaattaagccattccagaatcatcaatgcctttccattcatcacctaattgctgcagatgacaaaaatgaatgaatggtgccaatgccattcattttgccaaccctcggcccctcaattcacagcttaaatgttgcatttagcaatgtgtatgtacaaaacaaaatccgatttgtgtaaaagcaattcgtttgagggcgaaatccgattcttatccgtttttaggtcttggcaaagttgggaaggcctaaaagtctgtggattgagatcggaattgttgatttgggactgtagtgaccggaagtcgagaaaaacccatttagaaagtccgggagataccgggggaaaactgaacttttattaccaatgtttgggtcccgacctctgtttatagtagggctgcacgggcccgggtacccgaccgggtcgggtacccgcacgcccggttttttaatatccgagcccggtacccgggcccggttttttgaaaatccaatacccggtacccgacccggtaggtccggatacccgagtaccaaaaaatacactggtaagaatgggggtctgagtgaaaattactgaaaaaaattgttgttaaaagcaaaaattttttaaaaaataattattaatattttatataaaagtgacactgccaattgggcaaatggcctagtggctttactttcccttcttctttacaatgttcaatccctctacagaaattaaagtatttttagttttctttttgtatactcatgggtttcctatcgacaaaagatgattaatttacacatttttatcatttttaaatgaaatccgtacaaattgagcctactaatcccaaaaaccaacctttttgttgaaaatctgttaacaaattacactcaaattttcaaaattttccccggcggcgcctatcggcaccgccggaccgcccctgccccgaaaagtttttagaaaaagcacaccgcaaaaaagcggtttaaatagcaataaaaaaatttggcaaataataaagcgtttatttgtaaaaccattatatttttcatgcttttttaaaagtataagcttttattttcat

SEQ ID NO: 5918 - DNA, 4813 bp, Heterodera glycines
gaagcgtcaaaaattatggcattttcttttgttttgtgtttttgtttgctttgttccttccgttggagtgagtcaccgcccccataaataagcaagcgttgttctgctggacagagtcgggctgcttctgctgctttccactatggccccaatgtttatgctaataccccaccgccttagtgcttcatttttcccactgacttctttgcccattcttctttcgggtggctttacccttcccgtccctactccgtccccccgggggcaattccatcgattttcaagctgtccactgtccactcccaacttcgccacccccagcctgcttcattgtcctccaatgctttttgaggctttagccgtccctcgagataaaatggcatcgatttggtggtgtccacccctaatttgccatgcttctcccctcccccaacaatgcttcatctccccaaatgtttataccatgaaatccctatcgattttcgtggtgtccaggccatcccccaattagtgccaccacaatgccctcacttttattgcttcggcgccagtctttgccaccacttcccgtccattgctctcatggtcacttcctccgaatttcagtagaatttatgggtcaattacaaatttgtcgcttattttgttaatgcgaatttaatttgccaaaattaagcatttaaaaattaagttattattttataaatttaaattgacgcactaaaaattctttttaattcgcttccttttattgtttttgtttaaatattttaaaattcatcaatcccattaattaaatattttaataatttagattaaaataaattttattattttaatttaacatagattaaaaattaacttttactagttttaattgcaaatttatttcctcatttttcatttgattcaatttttaaaattaaattaaattaaattatttagctttattagtctttcttcatcacattttctctcaatatgatctttgggctgtcttcttgtaccttttgtcaacttccgcatctgattcttgccatctcactgtacaataatttaattttaacaaataataaaatatatttcagatttttatttgtttttattaatattgcataaattaacaatatttactgaatcgctttatcatttatatatttaaatattgtttatgttttttatttttgttatttcaaaaaattaatttattaaaaattaattaaaataaaattttgtccttcccaaattataatttgaattttagcattttttctgtcataaaagcgttccgtttccatgcctatgccaaagtgttgttccacgctctgttcggccttttgcttttgctctttccccagctgatccatgggccaatggtccattaaaaataaatttaaatgaaatagtaatttcaattattatttttttgacagatttcgggcggcaaatttgacgctgtccatctgattttgcaacgctttacagctgcttttcatgtaaaaattctcgaaatacttaaaaaaattgacagaatttggcatttcttgaaaattttattgaattctttcttcaatcagtaaactaatcggttgatcatttggatctctgttaaactgccgtttcagcttggatttgcccttttccattatttgtcggcattccatggcaatgcaaacggagtgaatgccgtaattttggtaaattaaattgaaaaatatttttatgaaaattaattttaattttacatttttttagttttccaaggccataactgctgcatttgtgttgttgaataaactgatcagtgcttatttgctgtatgaacaacgttcgcgtgggcattacgtttcacaaaatgtgaaaaaaatatttaaaaattaaaataattacaaatatttaaatttaatttttcagtttcttcgctgctcactgattttggatggaatttggctgctcgtcgaactttatgcactgattttttcctcaaaattatcattaagcggtgaaattgaggtgttaataaacattattattgttttttattatgttattttattaaattaataaaattgaagaaaaactactaaaatttctaataataaaaataaatgtaatcaaatagataatttatttattcattaaaataatttttcaacaattttttttattattattaaagtaaaattatttttcataaaaatatattttatttttgaaactcaaattcattataatttttcaaagttatcaggtctttttttcaaaattttttcgaaaaaagtaaataaattatgaaattaataaatccacaatttaaactattttttaatcattcctttcaattaaaattcctatttggcaccaacaaattgcagctgatgtgcgcgaggacgcgccgttggattggcacgggccatgccaatgtcaactcgcaacgcgcccttttctggacggactgcacaatttgtctgttcagtgccatgtgccaattcgcatttgctgaacatattcttaaaatcatggtcaacaagttcaaaaatgaaatgtcaattgcaactaattaattaattaattacttagccaatcaattaattaattacttagccatggcaaaattttgacaaaaatggaaaactatttgaaaataacaaatgttttggctccaaaattcacacagatccatcgcgagtggcccatcaccgaagtgcatgaaatgtacgcgcgcgaattcgcctgccaatgtttggcaccggccattgtgtcattggtcggctccttccaattcaccattgaacagcagaaacattacatttggcaacgcattttggtgccatttttttacatcttttggcatttttttttctcattttcttttaatgctctcggaattttcggcacttttttgttctcaagtgccgcgattgccagtctcgggcttagaaaaaacagaaacagaacctggagacctgttaaaacaaggacttcatagttctgaatgctgtccggttccatctcgtaatccgtgttccgatcaccgatcctggtccaggtttttcaaaattccgggctcttgttcccagtctcgactctcgaggtccgttaattggttcttgagttttgcgaaatttgccgcatctttgtgtatcggtctcagttccgccgatgggtctcaatttagcggccttttcccacatattgaaaatttcgactttcgaccactgatcgatggtcggttaatttttcacgagagtctttggactcgcggattcctaaaaatgctaaaatttgttcaatatcgagcgtaatttggctgactaattgcttcacgcctttcagtgccaagtggtcatttgtgcgctgaacagttgggcccattttggcatcggattgttctcctcaaatcacaccgtcccttttgtgctttcatttttccactgtgcccttttggtgccactttttttaattaaaataagttaaaaaataaggaaatttttggcgattctggactaattaggcatcaaaaaatgatttttatataccggatactgtaaatgattttatcggatactttagttggggacaactttctggacgactgcctgcctggtttttgttgaattgaaggaatttggttatcattttagagtcctacaggactttctgtccgaaatactgtccatgtccgactcgaaaatccgggtcatggtccgagtttttcgaaattccgggccctaggggccatggtccagttgtcgctttctgctaaccccaaccccatttttaaatttgcaaattttaattctccccatttccgttcgtcatttggcaacgcgtgcgcgaggaggccattgaagcgcgggacgaagcgggcgccgacattttgagtcccctgcagcagcaaacgaacgcccgccacccctccaccacttatgtgttccgcaccaccaccgtggagaaggccaaatgagcgcggtcaccaaaaaacaataccgtatagtaaagccgaaatgaatggcggcactaccgtattccaccaaaaacgcaccctaccattgccatgccaaagcataccttacaaatcacccagtcctctgccccatccctacgcctcggggcaatttcgtaaatttttaatttaatccttcaaaaatgagattttttaattttagtgtcccctaattaaaatttcccgattttccgtttcgggagggggggggggggttactgtactttcgctgttttactgtccccatgtcattcaacattcattcattccaatactatatatttgttcatttaattgtgtaacacaactcaggatatatgatgtatgcatgttttaaatgataattatgccgacatttcttcaatgatattgtaaattttgtgtgtcaaataataaaaaaagatggaaaacatttttcacccaatatgtttaataaaataaattaataaaaataatgtttaaaaaacaactgcaaaatcacaaaaagcaaaaaagagagagagaataacagcaacagaaacaatacaaagaaacaattcacaaaacggaaaaaaggattagacttttcatttggcagaatttttcaggtccatacccggaagtttttttaaaaattttttgctctgtccgtaaaaaatgtgcccaactttgagtcaaaaaaataattacacagaaatttataatggcattggcgaggaaacacaagtgccataaaaaagggcgaagcaaaatgtcgaaaagaaatggaaaatatatcccccgccccccagcagggggtacgacggttatgccgtgggcatttttgga

SEQ ID NO: 5919 - DNA, 4063 bp, Heterodera glycines
  unsure (1)..(4063): unsure at all n locations
cgctttaatttatggatcaatctcctctaaaacacagtctgataatcgtccataatcatcaatcatggccttccccccgaccgtccgccgccccctctgatcagtcgaccaaatttggagttctcctcgaacagactgcggatggtccacacttggatgccgccaacaatcagcatcacaacggtgttcacctgacaatgagcatcatttttcaaaaaaaaaattttccgatttaaaattttaattttcggggagtgctaatctccaatttttgggcacttgtttaatcccttggttatggtaaataaaatgtcaaaaaaaactgttaaattaccctttaatttttggttggcctgggccagaaaggcctggattttttctggattcccgggccaaggacaggtctttttcaaatgtctgaaaatttttcatgggtctttgtccagaaaacacaggatttcaggtggacatggaatccgggacctgttttttctaaatgttgaaatttaatacaaattttttttttttaattttgtcatccctaaacggtttttcaccatttttttttgtttcctcccaattttatgcccaattaaaatggcacaaattagttaggtaattaaatgcacagaaaaacgtaccaacgaccagaactggacacggtcattgttggcaccgacaacggcacggtcacgtgcttcgctggcccggaattggccttggtaatactcgacacggtccaaacgcgatttgatcgtcgtgaaagactcctgttttggatagaggagggggggggggggtggcaaattttttgaaaaatatcgactgacctggaactgttgcacggtcatgccgacctgcttcaacatctcttgcattgccgcgtcggagcctttgatggcaaatttggtcacgtcctcctcctccaaagtgccgttggcgtcgtacaaataaatttctgtgttgcaaaaaagaaatgtgagaagaggaccttttgttttcgttgcaatttcaacatttttgcataaataaattgccaatattttgaatgcattttttatagggggatgaggtgatagaataattccaagcattttttggtatgacagtgccaaacactaagaaaagcgtaagaaatttttcaatttttgaggagcggcgccgttgggaaatcaaagaaaaatagcgaaaaaatggaaaacgaaccgaagaacaccactttacgggtttggtatgagaatgagttgtcaaaacagagctggtagtcggcaggggcgggaatgtcaattctaaaattcaaaataataattagatttacttggcgaatctttcaaaatttttggtttaaaattggcaggcattaggtcttagaaataatggaaaaatgtattgtcaaccttacactcgaacattttgtgtgcaaacattcgagtgacctgatcgacaaatgaacggtcgcttttgagcaacaaatttggcacttccaaccacacaaaatgtgcgcaaacggaaataccaactcaagttgctcagtttgttcaacatcaccaacaaggtcattaaccacttgaccaccgaacccaatggaaagtttaatttaccagtgtcaaatttaagaaaaaacaaatttttttgccaatgcacaaatacgcattgttcatttgtcagccaaattccatttcaaaaacaggacgggatcccgccgagattttctcggaatcctggccttatccagaattttttaaagttcaggagtttattaaaaattatataatttacaactttttttcgggaatcctatttccttattttgagccgacctcacattttgaaaaattctacatccagctggattcgggaaacgatcccggaccgggttttcatttttaaaaatgggaattttaaattataaaatcatttttacaaaactactcacttatggtcaccgtccgtcctcatctggtcctgcttcagcacatttgcgtccaaaatgagcataaaatttatgttcaagtcgccgccgtcgataacctaaaaaagtccacaaaagaaacaattaactgctaaacccttcagttacctggtaataaacttccatggatttgtgcttctccaacacgggttgaaaaaaacattggatttttcctgaaaatttgcaaaaattactaaatttttgtggaaattggatcagcttttggaattgaaaatttaaaaaatcggaaaatcctggcaggctttcgttaggtttctgtttacactgtatttcctttttataaaaatttgtctagttatcttgaaaatgtagaaatcgttaaccaaacgaaaaacagacctggaggaacctcggcagtcaaatcgtactcgcctccggtcacaaagcttgaaaacaatagcaaaacaagaaaaagggtcaagaaaactgccaaggaaccaaacattgtctctaaaaaaaatgatagcttgtttattcaattattggcttatttagcacaccatatcacacgtaaattatgttatagataaagcagcatgattggatttatcagtcaacactaaaaaattaaatttgcaattttgaaatttgcaaaacataacgccaaacatgtcaataacaaaaaaacaattgtcttaggcttaggcttggcttaggcttctttaaaacgtagctgtaccggacctatacttttgctttcctttctctatttttttctctttagctttatctgtttcatattttgttttgcttttcctacttaattaaaaattttatttccaaataagtttttattttccatttattttctctgtcaattttgcggccacaaagtctctgtcactcactaatttttttcaatttttaatacttttaaattgtcaaattcatttttagcttgtctttcactgtcgggtattaattgattgtttccttctgtgttgccattttcatttttgctctgcttttctctctgtctctgtgtgaatggacttcaaagagttggtcaaccaagcggaacgaaatgcgaagcggcaagagcgcaaagtgcacgaggcggaacgcgagatgaaggcgcgtcagcagagccaaatggaacgcctcgcttatgaaaaggcacgcgaaaagttggtgttgaaacgacgcgctgtcgccacaatgcaacagcaaaaggaacagcaacaacagcagcaggtatttgggaaaaaaggacggaatttttcaaaacgaaaatgggtctctaaaacttggacttccagggtaaaaaacataattctgtccggtcaatccgggagaactatacattcattcgtcttatttttgtccgagttccttggttaccgcgtctgaaattgccgttttatcggccggcccaacctcggcgaagttgctgggccacagtcaacggcacggcataattattgactacaaagcaattttttgggaggcctctaaagcatgaattttcgaatccaaggttcagaattgacaaggaatttggttacagactttctgtccttgaggaaatatcgttttcagaatacacacaattttctatttagctacaacagtcacaaaagcagtcgacgacgcatgaacgaacggatgggacgacgaaagcgatgacaaagcgagaacggttgggcagcgacgcggtggccactgacaataaacatcgaaagggagccgggccgggagacgcagcacagctgtgcaacggcagcaacgaggtttgtgcaggacggtttcggattaatgccgaaaaattggattgtgcaatcctggccgttcggcattaaaaactacttttttaaatttataatgggaaaaccaatgtttttcgtcatttttggagcactgccggccttcaaaattttcaaaaattgacgtaaaatagccaattttggtggaaatttgttaaaaatggtcacaaatttccaattntttccccctgntgtctngtgnngcaccatcagtccctaaaaaatctttgttttttctanaaaactgactncactcgncaaaaatttttttcattttctgaatatatccaccctgataaacactgat

SEQ ID NO: 5920 - DNA, 3230 bp, Heterodera glycines
ttttctctatcaaatatgcaaaatttggtgtggatttaaccagtaaaaaaagttaaacaggatgaagtaaattcggtttttctctaataacagagacaaagaaatagcacgtaaaagactttcacgttctgttttaagtcagatacggacacattgaaatttgaaatttatcattgaaaaaatggtgcgttgtatgcgcgcaagcagaggttcttcaaagggtaaaggcataaagcacatgagcagcaggacgcagcatgcgcagtctgcttcaaaaagacaaaagttgcacaacaacgaggacgactgtcaatgggagggatgttcaaacggcacggacagcagacggaagatggtcggaatcaacgaccttcctcatccggtgttggtcagtcgcaacgcaaaacaatcatgaattgtctttttgactaaaaattataggggcttatcctggcaaatcttaacccggccgaacgtctgcgagccgaatctgtgtgccatcgatggaaatttgttggaacacactttagttggaccaatcagcgagagttaactgtcaaggaaattgtgcacccttcaaccgcagtgcactcgctgttcagcatgtcaaagccgttgaccaacaaacatgtacatgctagttcataaaacaattccgttcttccaaaagttttcagcgaatattcatacaaaaagaattttcctaaatccgtcaatatccaattcaattccaaatcttaataacattaaatacagattgaaatacttttgaaacggtgtgggtcaagtcttcgtctgctgaacatcggctcactgagctccgtcaacagagacagcatcacttacgcggtctgttccttgttcgtacatgtgccaatgctgcacactttggatttgtccggcatccaactgacaaactccgctctttcatcgcttggctttcggttgccgaatttgaagagagtggcgtttagaaattcattcaaggttttgaacattcctcattattttttttaatatataaatttcaccatctggtttcattaattttgttttactgaaaaaatatacgatcattgttaaagaaagcccataatttgttaaaatcaaatttggcagaacacccgtatggagcgtggcctttcttcgtttctcgcgagttgcaggcggttgacgcatttggatttgagcgggaacgaaaacctcatcggctctgctttttccgaccttcctccgtcggtgagtggaaattttttttagcttatttcgttttttctcgggaccatttttctttctaaaaacaattacttttccattcatttacagctggaagagctcaacatttcctactgttatcacattggcatccacggcattagacaaattcgtgcaacttgcgccaatttgcgacgcctttacatggaccaaattggcgattcggtgtctattagggaattggacgaaatgctgcgagaactcaaaaggtattttccgttgctttattacattttttacagtagagttttgtttatccttctgacaaataattggtcttttcattcagcttggtctacctcaaattttgtgaatgctatggctcttccgacttcaacgacttgcaactgaatcatgaccaacatttgacgggcattggcgagctgacaaatctgacggaattgcacgccaacgaaaatagactgttctttttttaatttaattttttcttccatttttttttactgtttattgccatttcgcagtgttgatgacgaggtgctgagggcgatctcttttggttgcacttctcttcagtttttggacatttcgcaatcgcaacggggcatcactgacgcgggtattaattttgcttaattcattcaaacaatttgctgaataaattttgaacgtttctttgattaagggcttcgtcatctctcccaattgcctaatttgacgacactgaaaatgaacggacagcggatggtagggtttttacactgtttaacaaatccatatatccaggatacaaaaataatacaacaacataatttttaaaccatttagtgcgtttattgtgataagtggtcaactcggaattaattccaattttaggtctcggatgagtctttgattttaattgctcgtcgaggcattttaaaagtttgcatttagttttttctttaccctttatgctcaaagcaatgctttttttgccacttaaggagctaactattagtcgctgcacacaaattaccagcgaatcggtgctacaaacaatcaaacactgcaaggttgttttgttttgttttttgcttgcatacatcgttttgaaatgatgaacattttttctgaactcaatttttaatactctaaaacaatccttctcttattgttggttcaaatcaattcaattgaaatgacttaaaagtttagaattaaaaaccaacttttttggcgcacaaaactattatttgagaactattttgatggctcatacttgggttgatttaagggttttattagcaaatgcttgtccaaatcatcaataaacattttttaaatttacattttcttgtcagaatctcagttctttggatgtctcttattgtgtgggcgtcacacaaatcatttttgctgaactcaacaaggcaatggagcgtcgacatggcaaaaatgcgccgtcgcgtcagacacggcaagaagacaaatttcgccttactatttgccgttccggcatccaaggcatggcacaaataaataaataaatttattcgagtattctctcatcatctgatatcgcaataatttaaattttattggtctcttatccgttttttcttattaattcatttttaggaaatgtcccgtcccattcgccatggattcacttggtcgactacccgcccaactcggaaaactcgctgacatcgaacgctgttttcatcactgctcagtgagttcatcttccgtttggagtgctttactaatgaaaaatgagttcaaaagattttagtcttctgaacattccgatgatcgccatttaaatgatagggaaggaagagaaggtgagtagtgtttggtgtggacatgtccacgggtaatccgttttcgtttcctcatttaaatgtttttaaggcacgcattggtgcacatctgtcatcaaagttgggctcataaaccttcgtgtccacctccattttctccctcatttacaattttctttctgttgt

SEQ ID NO: 5921 - DNA, 1102 bp, Heterodera glycines
aacagttgatactttcctttgattgatatattctacaatttgtctgttgtctgtctctccaccattaaatattgtactgtcggattcggtgaccaaaattgtatagtcatatgagtcatcgtctgattgtgagcaaatttacggtttaagagtgccacaccggaatgtgtatgtgtgttttgctggttgtctttttgtcttcccattttgtcactcatttctttgtctgactgtctccgcctccggcatctctttttctcggcattcgtttgtttgattgaggcgatcattgaccactcttctttaacattgctctttgctctccaccacatcatctccatttagaccaggaattcatcatttgacaacaaaaatttttggtgataacatagaataaatatcgcagtgacacgtcaaaatgttacacattattttttccaaacatttcgtttctaatcgtgcttaaatatttgctttaccatagcgcattttgtgttcttctcaatcggttctatgaactgttcattttttgtttttaattttattgttcgtgcattaataatggcatagtttgttttttagcttttttctaatttgttctgatctcgactttctccttttttcccgtcaaatggatttggttcgggacaatcaaaatctccataagtttggcttgcaagtgcagcagttgctcgccgctgagctgttcggatttgacaacatcaacaacctgaagtgggagctgaagttggtggttgtttttgacgttgctctacctggttaatttccatttttattcattttttcaggcgtgagtttgggtattccgttgacgaaaaggccgaggaatttgggtacccatccttcaaaggtgattttccgcgtcaattgttcatgaaaaaatggtttcgatttgaaatgatagcaaaattctagaaaaagttcatttaaaaaaaagtgaacaagaaattttgtactaaaatccattgtatggattgccatcacccagaattgtaacttcttgttttctgacaagggaaggggcgaaatgtaactcggaaaacctatttatgtttggtatcgttgatagaataggccaact

SEQ ID NO: 5922 - DNA, 1425 bp, Heterodera glycines
tcatgttcacagcacctattaatggaagtatatgcgatgatatcatataaaaatatgcaaatcagggcaatcgcttgaccaaatggttaggtaatgggtcctcgcccccctttcatccttggccatactttctcattttcaattccttttccacagcccaatggatgcaattcttgctgttttttaatttacttttgataggcacagttttggtcccaaaatggtcacataataccagttcttaaagaccttgtaaatttaattccttttttgagttacagttcgcgcccttatgaacaattaatccttttccattgcaaaagaaatttcgtaaaaaaagctatgaccaatactgattttctcattacagtccatttcattattaaattatctaaaaacaaagtccttctctgctttagacatgctcgactcaaaagttttggacaattacgtggaaattgagaagggccgcttcagcgaaggggggcaaatggtgcagacgcggtacaaggcgaagcacgacagacacacaactgcagtgcgccaacagcagatcattttccagagggaaaaggaacgaaagtgagtaaattcgcatttcttttcgttttgctcaaaacctccccaaattgggaatttaacaaaattagcaagcgaatattcttggagaattgttgggattcattttgttttgttaagagaggagcgaagacaacggcaaatggagcgtaattttgatgcacaaatgtggagaccgtcggaaaaatttggtcaaccatccgccagtggaaagaggttagtcccggaaaaataaacataaacgaagaattgcatttagaacattgaatgctttctgattacgaaatagtttactactttttagaaaaatgaaacgcataaaactaaactcatttaacttttttttagtttttccaattactacgagtcgcaacagcagcagaaccatcgattctatgctcagcaaagggagcattcgccagcgatggaaatgaacggcgcattggacagcaattggtacacaaatgaagacgacgacaacaacagaaacaacaacagcgacggcatcgacaacgtcgacgaccgcgaggaggtcagtgacagcgacggtgcaagtgccaaattggcggcggattacagcaacttcttcggggccagtaaatggccaagtaatttgtacaacaacacccattgtcaggcaaaacctacagcaaaggagcagcaaaaacagcacaaatcaccgccaaaaaaggttggcggggtgtcggagtggagttcgggttcgggagacgaacagcaacagccgagcgaggaggaagagaagccaaagccagcacaggagcagaaattgacaaagcaccaattcgtcgggatcaggtgggtataaagtgttgatcaggcccctat

SEQ ID NO: 5923 - DNA, 1151 bp, Heterodera glycines
cccccccccccccccgcctcgtgcgttcgacaccctccgaccccttgccggagcttcgtttattcaataattccccatttaaattaaaaagcaatgttcattcatttcacaaccttttcaggaagtggacggtgcctgccttttgctctttacgcactttcattaccaaaagttgggcctgaagttggggccacaggtgggtgaattgataattgatttgtttttagccgagagtattaacttttttaggtaaaacttcagcaaatggcggaggtaaataaaacaaaatcgtttaaaattgaattaaatgactaataaaaattcaattaattttgtttcagtatttgcgacagttcacttttgctgatggccattaagaataatattgtaagaatgtggaggaaaacaataatctgacaattgcttctttttgggctcttatttttgtttatgtctttctttttactctgtcttaaataaaatggtaattgacctttaaaaaccgatttttgcatttgttgcggtaccaatggtgaggccatgccatgttaactttcattttcactttattattttttcatttttatttcttagtgccactttttcgtttcgtcccccattttgcaaattgtttatgagagtgtgcgctcgactctccgccgtgcaacaagcaaagcagcagaaggcggcgaccgccgccgccgccgaagggccgcagaatggcgaacagaagcggccacagacagcccggaagcggggcaggccgaacagctcgttgacgacggacggcggcgccggtttttggcaagcggcggtcgccacgcggccgagacgtaacgcgagaccgatggctgtcgaatggcaacaacggcagcggcacggcgtcgttcaggtgtggctttgtacgaccaaccaatgttttggtgacgcttttccggaaatgggaaaaattcatgtcattaactaatgcaacttccagcctcttactccagccgaagttgaaaattgagtgatatttgactaatttgatcgccattttccttttttgtccccacctgacctaaatgtcatttttgaatttgtattgaacttcatttttcaatcacgtacaggcgtccaacttcgattgggagcagtacttggctgtccgt

SEQ ID NO: 5924 - DNA, 4365 bp, Heterodera glycines
  unsure (1)..(4365): unsure at all n locations
accatcgcataatttttcaacaccaaaaattattcgattttctttttttttgacagtattttttataaaatgattgctttacccaaattaaacaacgtagcacttccagtaacaacatgttgggcttggtttgatcattcctccgcccgtctctctcttatcgttcgtttctccagtatcttcttattcttcttctttcttcttttattgatcatattcattttattcttttgttagcattcgcaaaaatcgctttaatttctgttgaataagcacttttttcatttccattaaataattattaaaaaaatcatttgccttttaaattttatttttgctttacattaaatgaaataatattttattcaaatgtttttattgagggtgtcatcaatcaatcaattcagtcttattaggaaaagaaaatgaccacgttagtaattaaaatagcaaatttaaactattaatttttggtattacaatgatttatagtattattagtgatgggagagaatgtttcagaatgattaattattttgattgactaattaaaacacatttgatcgatgcgagtccaaaggcaaacatcagcaggtagaaatgtcatcctcattacgattattacaataatcatcatcataattacacgaccagaaactaattatgaaataaaacgatagagtgaataatttgaatttatagaaacattttcggctaacattcaaatattttgatcatttttaaatgagtacatcttactaatttggataattagaatatatgaacgagatggggaagcttttcaatttgctcaaccatataggattcattttcgcctcaattgatccattaaattcctctcggggaagcttcttcttctctatctcagttataatcgtcccatttacataaggaaaatttaacgatacgaattaaaaaattttaaatttggccgaaatgaataactcattttttatgattaaaagcaaaaaatattttaagaaattcctctcaaacaatggcattattgtccattttttgtctgttgttggcactttgccccgttttgtccattaattccaccggccatttccttcacatcaccgacgtgcacatcgacccgaattatgacctcagcggagacccccaaaaatggtgccatgggagcggcgacagcacaaacaaatcgccaaagttgggagtgttcggcgaccacaactgcgactcgccaatggtcggaaaaataatcattaattattatacaaattaatttttaaggcattgttagaatttatgttgaaagaagcaaaggccaaagtaccaaatccaaacttgatcatttggacaggcgactcactgccacacgacaaatacgacgaaaagggtgctaattaattaatagcccagttattaaataattcgataaatacgacgaaaaaagtgctaattaattaatagcccaattattaaataattatttaatcatgttttcttaattcgtccattgtttagtgttatttgacatattgcaaaaggtgaccaatgcgataagtgcccaattccccgacgccgttcttctgcccgtgctgggcaaccacgactcggcacctggcaattcgttcactgaccatccggcaaaacagcaaatttacgagaaaatgttcataatatggaagcaatggattggccaagagggaaaggtgggaaaaatttgtagaacataaaaggtaactcgcccggtgggcctcgaacccacgaccccagcgatccgtgccgtgctctaaccaactgagctacgggcattccttttagaggttcttttaggtcttttatcccactttctctcacactccttttccttctgacatcatgaattttttctggagtaattcgaaaaccaaaccatttaggagagttttacgcgtggcggatattaccgcgtcgaaacatccgccggactgtttttggtgctgaacacaaacatttactacgaatcgaatccgctgaggaaggagcttgtggagccggaagacccaactggccaattcgactttctgcaatttgagctggaaaaggcccgccaaaagggggtgccggtgcacatccttggccacgtgccgccgggcggtgccgccaattaaaaacaaatttaaaaagcaaattttattttcattttagcatttgaagaatattcggtgaacaaactcgaaatggagcaaatcccgcaaaaatacaatcaaaaattggtcgatttgcttgttgaatacgcgccacaaattggatggatatttttcggccattaccataccgacacttttcgagtgattaaggtgaaaatggcaaaacaacaacaaataaaaaaaatccattgtaattaaggatggcatttttagattttagcctatttttcctgagctcccagtgacatgaaacacacgaaaaacaagtttttgggaggttgttaagctacttttcgagttatttgagcctattttctttcttgataagaatttttgattttaaaaattatttatataatgatttggattaattttttaaacttttttgaatagtttttgttattttacacaccataaatttgagggtttttagtgcctatttttggtgttttttagagcctaaagcctacttattttggctgtttttagagcctaagatatcattcatatttataagaaataattggtggaaaagctttatagcgaaaggtttttttctgtcggaaaagtaaaattttaaattcagagcaatagcgcttaaaagagaaaagaattaaactatttaaaaagattattaattaagaattccgacggaaaagcggtgcagcgatttttcacagcgccggcacttacgccggcatttcagaagaataacccggcatttcgtgtggccgactacaacactgacacatgggaattggaagacatgaagtgggaaatgaaagagggggggggggggtaattagtgaaattaatgagttgtaaatttaaaccatttaaatgcacttttaattgttcattatttatttgaagaacgtattacgtcgagttggacgaactgaacaaaaatggggcggacggaacgcgcgcgaaattggaatattcgatgcgcgacgcattcggcggattggacgcgcaaacattggacgcgcacattcaaaaggcgaaacggaacggcacagtgttcgacgcattgatacggcacaaccacgtgatgtacgaggcgaacaacaattggcgactgaacgccacgcaacggtaaaataatggaaaatatatatattaaagaaaagctggaaactatttactcatcgacaaccccacaggcacaataagcgaaaaagaaaccaataattgggagaaaagggagcaaattaggggggggggggggggagggggagcgctaataggggtaagtaatgttttatttgagggtatttataccattaataatattattaatttttgggggctttctgagccatttttttaattttcagatcagatatattctaatcgcttctttcaaaaattaccgtttcttgcaatgttttttcaaagaataagattttaaaaattatgggattacgcatattttgggcacccgaataccgtatttccataattgaaacaatctccgtaattatggatacttaaacgaattttcatgtaactgcttaaagccttcaaatctcaataattaaattttgagaaaatatttttcgattgaatgattattcagtgctgttcacctttgtgccttggaatttgttgactacaaaatgtttgagcagtgtttggccaacgacgccaacaccaatgaccaagtataatttcgactatttaatgcccatttgagggcttgtgaactttttattgctgtgaatttctttaaatttatgccaaaaatttcagattcccgcggcaattccgttggccatcggcggtttcgctgtcccatttttggtcacattgtcttcaattctaaccttacttttgccattttgacttggtttctgatcggctattcctttttaaatattattgtttaatgagattaatttcactaattgctcaaataagaaattaggacaaaaataaataagaattatttaacccataaaagttatttataaatgctaatattaataattcgggttgtttgttatcaaagttaattttaatattcatttcttctgatttttcaaagaaagcanagcctatttcttccttttttacaaatatttctgttgctaaatattttattctgatttgntcccgtttacccatttgtcttanatatgaaatttaaattttccatcaaatttccatctgattggcgttt

SEQ ID NO: 5925 - DNA, 1279 bp, Heterodera glycines
  unsure (1)..(1279): unsure at all n locations
aatttttatattcatttcttctgatttttcaaagaagccaaaagcctatttctcctttttacccaaatatttctgttgctaaaatatttattctgattgtttccgtttacccatttgtcttaaatatgaaattanaatttccattcaaattttccatctgattggcgttttgtttgttgtctttgttcccaaattgttccgcttcggccattagcgcctccttcagctgttccgcctccaatcgttcgattgcttccgcatcaaatccaatcgctttcgtcccgcacggctcattttccgggtcgtggtacctaaggaaagtggaaaaatgccatagaataatcaatcatttgcatgtgtaagcaatgtaacaaaataaatcaaggaaaaatgagttaatctctaaacaaggttcgtaattgagtatttactcttgattccaatttatgtgccaaaggaccgcaaaaaacggcccatttgatgaatttgcttaaaattagggttaagccccgacccctcggggaagaaatctcaggacgtttgagaggccagattcggggatcggggagaggcaaaatagggcggagagcctggagcccgagctcaaccctaattgaaattgtggcatttatgtctccaagataataaatagcaccattgaactgctttttaaaaaaattttaatagccctaatcccaacaaaattacaggtccaaatattggtgcccaagggcttcttcagccgaacaccgccgccacggagcgatttgcatcatctgagaacaacaatttaaaccaaccaattataaaaagggaatataatggagatataattgatgaaccattgcaattaattccatcgcttttggcgttgcctttggcaaaatcgtagcccacggcaacggcactctgtcgccgcatttttcaatccaagcgcggaccgaaaataaaacaaaaagcatttttaaaatggaacagaaatttcaaccaattcggagttgattttttcaaggacctgaaatctagcgaaatttcattccaaatttggcattttaaatcaaaaaatattacctctggcttaggggtgcccaaatagcaacaaatcatctgataaattggaaaacattaataaaattggcatggaaaatgaattttggcttttgccatgaaacgaatttaatcacttttatttgcatggccgcgtctcgtccagggaaaagttgccgtcgcataattagctcggcgaaaattgtgccgaccgaccaaatgtccaatcttt

SEQ ID NO: 5926 - DNA, 1087 bp, Heterodera glycines
tgtttttaccggattactgtacataccatcagatccatgaccaaatatacgtcttttccctgcagaaaaacgattgaattcattcatccccgatcattttcaaacagaagatgaatgagttttttctacttgagcgccgtcgcccaccgtgaacatgtccaacactccgacaatgttttcgtggcgaatgtcccggagaatgcgcacttcccctttttgggagagaagagaaacaattagtctcttaatccataaataattagcaaaaatattttcgattttaaaatataataaggatgatatttttaggctctaaaaatggaaaataggcactaaaattcaataaaaaaaacctcatttcaggggttaaaattacaaaatttattcacaaaagtcaaatcggtattaaataaaaaattttaaaaattcttgtctagaaaataaattaattattttggagatgaatttttgagaaatttttcaattctttggggtgttttttgaaaattttcgggtcccttcttaggggaatatatttttcgtggttttcaggccatagggagcccatgaaaaaaataggaaaaattaaaaattgagccctaataataagcagtcgaatataattaattttatttgtttactcagtgtccgtttgaccaaagcaatcgcggaaaaggcgcgcgcaatctttttgatggcaacattttgttgtgttctctaatcaaaatgtaaaggcaattagttatgcatttataaagaatgaattttattataataaataatcactcatttgtattatcattatttatcaccttatcaattgcctttcccacggagccataagcgcccgaaccgaccattttttccagcgaataatttgtgccgttcaattggaagctcatttaattaaatgattaaattctatttaaaaaaatgaggataatagtataataaaaagtttatgatttactgaaatttgtcgtccctttaaatttcgaataatttttaaaatattttttgatttaaaattgtaatttgcccacaattaatcagcagagtaaaaccagtcagtctcagcactctcaca

SEQ ID NO: 5927 - DNA, 4298 bp, Heterodera glycines
cgaagaacagcagttttatctttttcatccgctttatccctatccctaattcagttcagatttccctctccgtcgtatatcccacccgctttatcactttccctaatcagtcgcatatcctcatcccctttgtctcccatctttgctttgtccctatcccaaatcagtcgtatgtcctgatcacccagttcagaaccacccatccccaccccttcttcagttcagaaatatatccgtcgtatatcccctccctgcgctttatcccgattccaattcagtcccatcatccccattcccgctttatcccgattcctcccatcattactctcacccactttcgcttaccgttaattctcccccattcagctgttgcttctcctttggattcacctccgctgctaatctgtgcccattttgtgctgccaatgccatagtgctccatcgccctggcacattaagcttcttcaccggcttctcctcatttattattgctttttgtgccactttatcctgccgtcgcagctgctgcttcgtcttcatccccggcttttcctcgcccgccgtcaccacactcgccgatggtgccctcgccgccgtcactgtcgccaccgcctcgcccagtcgctgctccgtcgtctgctgctgaggttgatcatcaacagttcgaaccctcaacactcgcttcttcttcttcaccactttgatcactttctgctgctgttgttgcttctccccatgatcactcgccctctcctccgcctttttaagcgtcgccgtctttggtgcgatcgctgtcactgccagtgacaacggcgacgctgacgccgaaaccgctgaccaccttgaactcgtcggtgtcgtcgtcgccgaactcgccgccgccgctgcaccggcacctttctgctccaacttcttcaacaatgcgctcactttgcttgacgacgacagcgatttcttctttgtcattgtcgccgcttccgctgacagtcgcttgtcggcaccgccgccattggtgctcgccgaagtacttggcgagcactcgccgccgccagcattttgttcggccagtcgcgcagctatcctcagcaccttgctgtctccgccgctcactcgcttcataatcggcgaccccgttgcgctcgtcgtcgccgctttcggcgccgccgcggtcgttgtcgccatcgtcggcacctcctcaaacttgaccgatcgccgtgccatcagcggtgacttgctgctgctgctgctgttatcactggtgccaccgccagtcgctgctgcagtctctcgctggcccagtcgccgtgccatcaacggcgacttcacgctgcaatcgctgtccaccgccgctcgctgattctgctggcactgctcgccaccaccagcgccaccgctctcctggcgttgctttttgtttgcagtttgctccgtggaggagcgcgtccgttgctgatccgctgctcgccgcgcctccgacttggaccgcttctcgccccgtggcactcgcttcaccaccaccactttcttcttggcactcgctgcggtagtctcccccgcttttttggcatcgccgccgtcaccgctgtcgccaggcggcgtgacagcgatcactacctttttctgctggcggtggtggtgatcattgtcgttgttgctggtgtccatcgccatttcctccattttttggccctcttgtcgccgttgttgttttggcactttccctttagcagtttcgttggcactaccgccgccgctaattgtcgtgccaatcctatcactatcactatcatcaatgctatttccatgtccattttcgattgttgttgttgttgttgttgtgccgttgttgttgttgttggcattcgtttggtgctgttccgccgccaccagcaaattctgtaagcaaaatgccaaaatcacattaattagtgaaattgtaagacttaattagcccccacagtctctcagcttcatcggtgtcatttgtgataatttgttcagagttttatttgttttttcttttttttcttttaaattttggtttaaattttttttaaatgtataattttttatccattttttcagtcgattaacaggggttttttggtaaaaccccggcaaaacggtcagtgttcggcactatcttttccgaatttccaatcgaacaacccacccgatcaaatgaaattttcgttttcccctcactgattttcaattttcccaggttttttggtgaaatcaaaattgatttttcggggttttaatcagaaagaaatcgatcaaacccattcattggcccccaggcatggtctctctgctgatcactaccggtgtgtgttaccgtatcttaggtgttaccgtatcctagcgattgattgcggtgagtggtgcccgtgccctttggtgaccaccgttcctatacattttgcgtacccgcacatactccgcgccgtgcacacttttgttccgctgcattgtccgcatcatgcgcatcacctgtaaaacaaaatgccaaaatgtatttaaaatttttgaaaaatttaaggcatttttttgtttttgcatttaaaaaattccaatacagcgaaaacgagaaaacactcggaattttctcggttagatttttcccgtcttaatttattttaatttttttgtttaaattataattttattaccgatttttaaatttattttttttttaattggaggaatttctaacaaaaaaaaattaaatttgtcgatataaaatcagtttttgagcccagctaaaatttgaatttatctatactttgtaattttttttttgaaaaatgttcaaaaataaatttagaaaatttaattaaatgaaaaatttaaatttaaaaaagggcctcagattcttttatttttctcataagtgtatcaaccaaatcagagtttttattcatcattgaccaacatttatcccactgagccacggattgcgcgatacattccatccttattttttattagtagggataaaaatttcatgcatatttttttcttggattctccatgttttaaatagtaagaaaaatttttgaattgtgcacaaagttgagacttttatttacacaatttttacatatttaatggatttttctacatattacggtatagttcgcactttttgatatatgaaaaatatgaaagttcctatcaaaattcaaaaaaaaaaaaaatttttattgaaatgtgctcctaatatcaatttttaaaaagataaaaaaccttttctatgcctaattagatatttatgtggcattttatgttcttttcacgttttaattatgaaataatttacaaaaacaaaacctaaaatttttttaattgatataaaccaaataaattgaaaataaaaaaactccaaaaatttcttttaatcaacagttaacattatagtatccttttcctttaccgtatcattttcccactaccgtatcgccaagtttcccccgctactgtcttacatttcccattactgtatcacacgcacacactttcccactaccgtatcccctccttttccatcattaccgtagtatatgccaaaccacaacacccacctggttgatgaacagtacgccgaacacaaggcgacggaaccgtttgttcttcacgtatttgcggaatttgtccaccgccagcgggtggcaaactgccggactcgcggtgcgactcgccgccagtgctcgctcgcgattcttgcgaatccacgcgtgtcgcaggcactcgtcgggcagcattcgacgcctaagggggaaggggtgaaaatttggaaattctcgcgaaaatttcctgaaaatcccccctcgcaaaaaaaactaactcttttttgagaatgagcagttttgagatgaagtccttggcgtccgacgaaattccgttctcagcaaactcttggaaaagaaagaaaaatatattttttaaaattgaaaacttaaatttacaaaaaaagaaagaaagtttttgctgttttttttttggttttcgaaacaaatatctttccattataaaatttttgaacttcccaaaattataaaacaaaattttaaaataaaggacaaatcttagaaatcaaaggacattttaaatttataagattcggcctctcgaaattgggacacacgtgtttcggcgccgcgcgtttcggcgccagcccagtttttggactataacttttttctttgtcaacgaaatcaaacattgttggtatcattcgaaagctgtaaatgtcctatattagcctacaaaatttgaaaaaattaaaggttcaa

SEQ ID NO: 5928 - DNA, 1010 bp, Heterodera glycines
  unsure (1)..(1010): unsure at all n locations
cgatttaaatacaaaaatgccaaaaaagtattngatttatttatttttttaacgattttaatataaaaataccaaaattttgattaaatttttctaatttaaactttttaacagttttaaatacaactgccgaaaagcagatcaaaggactaattaaagcgatgctaatcatcaggccaaaagcgatcattcgggattcagttatacagcccaaatctttttatcaagcttttggtgatattctgatcatagggcagagacacgctggtcagaggaaaataaataaactcatttatcggtttaaatcacctaaaagtgaaactgatcaaccttctcaatttaatcaaatactgacaaaaaaaaaaaccaaaattttcgtcgtaaaacaaaaagtgccacaattacccacctcaggagtgccggccatgaacatcaaatccttggacccgtcgtaccactgggccaacccgaagtcgatcagcttgatctggttggacgtttgcgacacgcacattatgttctcaggcttaaccgatggagagtattggcaattggcacaaccgacaaaaagcccccttttttgaatttggcaccaccttcaaatccaagtggatgatgttttggctgtggatgtagcggatggcctaaaaaagatgatcgttgagcacatacataagaggcttcgatttgaaaaggcctaattaggtctaattaccctaattacccctcgtcattcaaaatttaacatttgtctgtgctgtataattaagtgaaataaaattatgaaaaatagtgctattgaaaatttttttttgacaatattttttttgacaccttaggcattgagaaaattttattttttatcggcgggagatacaaaaaactcacttcacatatttggaacatgatcaatgcgaccgccatttcggtgagtctttaaaaaagtaatattattgcatattaccgtatttattgagtttctactaacggcatattccaatcggtttacg

SEQ ID NO: 5929 - DNA, 903 bp, Heterodera glycines
tcattatttacccaattcattttcagttggcgtgccgtgcttcttctgttggttgattgtgccaccattctttggttctttttgtatcatttcaaaaaacaacgacgccctcgcaaaaaaatgtaaaaaatgttaaaaaaattgagaattccataaagctatttttcagctttatctgcgccgattgttggctggcggtgttcgatttacttgcgccttctcaacttggcctcgaaattggactgattagccgtcgatttgacctccgggtggacgaacatttcaaaacgcgcaaatggagaatggacaaacaattgctaatccaatgggaaattgaaaaaaatggcacgaagaaaatgcaaattgtccaatccgatgggaaacctttgccaatcccgcgaaatccgttgccgaacaaagtgatcggattcagaggcattcagatcatgtaacgaactgattagattggaactgatttgttgccatcacattttctgcgcttttcagctacatcgatcaaaatgtcgtcgcatttctccgccattttcaccgtcttttgggcgtttgtggaatctttttggacattttcacgggcactgatcgcatttgggactactttttgctcaacatttggccaatgctccgcaattccatgcatctgatgcttttgaacagcaacttttttcgccgtttgcgtcaattggacccatcaatgctcagcaattgtccatcacttcgctatgtctctttgaatgtcgactttgtgcccgcttttccgcccgatgacagtgccatggcgtcggatggccaagcagtggccaaatggctgttcacgcctcgtccggacggtgtgccgaagtgggtcgcttgccgtattaattcttcagtggtggaccaatggtc

SEQ ID NO: 5930 - DNA, 3564 bp, Heterodera glycines
gattaaaagtgtttatattatattagtggcatttcctttctttagtgaatgtttttacattttttagaacaaataaagtgtgtgaaatggcagttaacgcaccttttttgagccaaaagttacaaccgatcaaaattggcattttataagagttgggctagggaagttttgccagaaattttccgtttatttttaattaaaaatatttttttatttaaattattcccatcgcatctttgttctttctttacaccattcatctgctgaatgaaagccacgattttctgctgacattaaaaatattgattctgtctgtcactccgcagcatttcaatcagggctgtgcgaaaatcacaaaaaaactttttcgtatacgaaaacgaaacgaaaaagtgcattcgatacgaaaacgaaacacgaaacgaaaaaaaatattttgaaaaccgaaaacgaaacacgaaacgaaaaaattttgacggacgaaaacgaaacacgaaaacgaaaaaataaccattttcgtacgaaacgaaacgaaaaaaccgaaaattttttgaacttatttcaatcataattaagaaacataaaactttaaaattgtatcctctaactgaaggaatgaagatcctagtaggtggaaaagctaatgtggctctaggacaggggtgtgaccaaacaatttttaaaataaagaacatcaatgacaaaaaataaggtttagggtcaaaaaagacaatcttgcaaaattggttcgaatcagttaatatataattttttcgataaaaaatgtattaaaatgttatgtttttcacatcctattatggattttaacaatttttggggaagaaattagcaactgctgaaaaaaaaagattttcaaacgttttttttgcagtgtatttttttttacaagttgatgaatgggaagtgggtccggcggcgccgataggcgacgccgggaaaatttttgaaaatttgagtgctattttatagcagattttcaattaaaatcggtaaaaacatgattaaaaaatcggtaaaataaagtgcggtcatgcgggatcgaacattaatgcacagcacaaagcaaacctgctgttttcaccactaaactaaaatacttaaataataaaacttattatttctttccaaaaaagtcattcttaagggtgtaaatattttcgtctttttcgtaaaatattgctctgacgaaaacgaaacgaaaatcctaaattttaaaaaccgaaaacgaaacacgaaacgaaaaataaaattttgaaaaccgaaaacgaaacgaaaaaactttagcggacgaaaacgaaacacgaaaacgaaactcaaaaagtgccgaaactgtaggacgaaacgaaaacgacacgaaatttcgtccagccctgatccccgcccccgcgaaaaggccacccccgcccacggggtccgaaccctacttcaaacaaagtgtggaacactttttaaatcattttaaggtcatttaaagtcagcaacaaaaaaaaaattcatttggcttaaattcccatccctagatatgactgagtttttcctgaaaagtctgtaaaagttggcactttacgaaacgaccaagcaatgcttttatttgtccttgttttattttttttgcaccattttgttttaatttcagaaacaaccggtcctcaatagcaaagctgttgctgctgctgctgttccttttgtgccgccttcgaaccaaaaatcattgccaaatacaccaattgcatcatcaactcagaaatccacaccaatccccacacaagtgtacaaacaaacgaccgctatgcgcttacgaaactcggtgtttattatatattttttattttgtaacgttttaggtttattgttaacatttattccagggctttcgggatcgttgttgttcaattttttttctattcattccgatacgtttttaatagtttaaactagtgcagcgggaccgggacctaaacacggacaactgagtgcctaagtcccggttttgaccgggaccagtcccgtttttccagccaaaaattcccgggtttcaacccgaaaaggtcccccggctttgcccaaaaatttatgaatttgggaaataaaaattttctaacttttttgcatttgaaagcatgtttctgggtggtttttaaggcactgatcatgaatatgacaccagactggttacaaagaaaaaaaattgttttaaaaccggaaaatttttttccgaaagttctacatttcgaaaaatgtgctaaccaacttgaaaaatatattcttaatttaaaataagtcaaaaaatatttgaaaattcataagttccgcctcgattttcgagtttgaagttataaaaaggtgtcgcccaaactgttgagaacatttgtgatttggctcataaagctattgagaagacttgacttctagagatttcttgtacgaaatccaggttcgagtttaaaatttacacgaaaatgaatgtcttttcgtgaaattaaagaaaaatcgtcaaaaaatttttttttgttttttaagcttccaaaaaaatagtttaaaaatttttttcaaaatcttttctcgggacggagagctgatccaggaggaagggaactgatatgggggagaaaacgagatgttcccatggggaatttagcatagttattttttatcgctttatttcttgctcttccagcaggcacctctcaacatcaaagcaattccgttcgtgccgtcaaagaaatatttggtaaatacagcaatcgcgtcgtctacgcaaaagccatcacaacaaaactcgcagccaacaccaacaaacaaacagcagccatcaacaacgacccctcacaagaagaaatcggtgtgcttaattggtttttcaaaaagttgagaccggacgagaacgcgggattccaacgtgaaaagccgcgttttttttgttgccgggacgagatttttacgagaacaggaaaaaagcgggactttcttgtcccacttttttccgatttcccgtaaattttcctaaaacttttagactaagaaaatgaccataaaaaatttgtttaccggactctaccaaaaagcaaatctttggaataatcttcactaatttaactcgaatatcgaattttttttttttagagagagcaaccagcaacaaacaagaaagatgttaaaaaagataccacgaaaaatttggagcaagcgcagaaaacgaccaatgaaatgacaattaccccgaattacaaaaacgggaaggcggaggagaaggcggcggtttgcacaaatttggaggaagtgcaggaaaagacgaatgaattaagcctcaaggataaaagggaaaagacagtacgttttaatatgaacagctcccccccccccccccccccccgccgagaaattaaaaaaatcaagcgtagaaagtttcaagaaattttataagaaaatttctgagagtttttgcaaaattttatgatgaattgttagttatttttttgaaatttttccaaaaaaaatatatatattagcttttaaatcgtctgttttaaaaaaagtatgacc

SEQ ID NO: 5931 - DNA, 1598 bp, Heterodera glycines
  unsure (1)..(1598): unsure at all n locations
aggggtttcagaataaaatgcaaagcagtttcattataatttcaattaaaataattttttccaaataacattgaaaattttagaaacgggcgtcctatgtccgttccttttattgacatgtccggcaaaatgatgaaggatattagagttgtcaggtgggcttttttagattctaatgcactttatgagcacaaacaaattttatgagtccaatcaattaaccataattagtttttatacaacaactttgttcatgttcgaacaacctaaaatatttttggtatattcgaaagcagaaaagactgaattaagtgtaataataataccgcgaaaacaagagaatagttaacatttaagaaagttacaaacgaaaataatcaacaattacttaattaagcatgcctaaacgcgctgacaaagggaggtggccaagtgtccgtgggatttccaaatgaaacttggttggatggatagagcacccatgggttcttaagaaaaatggttttattttctgccaaatgagcacgagtgccgagttatgacgtgccaaagtttttagttttttataattaaagaaaataattaattatttacatatcttcaatgtgttgtttggtgtagaggtaatgtgttagtcaaaatttttattggtcacaagttcgaatcccctttgtgtaaatccattttttaattttaatttttcctttttatgagcacttcaattagcaaattttatttctttatcaaaatctttattttaattttattccattaaaaattgcattaaacataaagatgtaataaaaaacctgtcgaattaaaaaatatatttttgtctaatatttttattgagtattttatgcactaaataatttcaaaaaaattaaaaataaagttttttttaataaaaaatattttgataattgacttggcataatagacaaaaatttaaaaaattaatttacatgtaggtgatccgaaccctaggttaactgatgctgactattgcactaccgctacaccactggacactgtgcggagacacaaataagtatttcttttatttcatcattaaaaagtttggcattttttatctcggcacaggggtccatttggcagaaattgaaaacatttttcttaagaacccaggtgtgctctatctacccaaaaaatctcattccgaaatcccacggacacttggccacctccctttgtaagtgatatcgcaacaataatattcctgattatctattaagatctgtgctaacgtggcctttcatcctcataactttgtgggcgattacttctaccaacaatcccgtaaagagtcggttgacgtgggtcagttggcggaacgcaccacatggattctgcgcatgttggagaccaaccgcgtggtgcacgcacgaccaaaatatatcattgtgttgcgcgacggactgtcagaggcgcaattttccatggtgagtgatgaaatattggtatattatatagttaattttgtcgttttaggccattgatgaggagatgagtgctcttaaaatgggctgcatggaatagacgagagttacaagccaaangtttatgtttgttgtggg

SEQ ID NO: 5932 - DNA, 3351 bp, Heterodera glycines
tttttttcggaaaaattttcgatttttttccggaaatagaaaaaatttttggcctgtgcgggacatttgagtcccgggtccataactcgttaggggttggttttatcgaaaaaactccttagggcaaattgtagactttttaagctctatcgaatggtgtgccatatggccggaaattttcaaaaattttcgagctaggccccctagaaattttcaaaaattttttttgggttgaaaaagagggtgaaaaatatttttctggggtaaattagggtcctgagcacaaatatgatgtttattttaagtttcagattttttggaattttttaaaaattcgaaaatatttttaatttttttggtccttggaaatttgggttaaaatttgaaaattcataactcaatgaaggactgctcaatttaagtgaattaaagctttaaaaatagcaaaaaatcgggagaattttatgaggtttatttggttttataatgttcaaaagaaaaaaagttattccagaatttctggaaattttcgatttttcagaaaaaaattcataactcggttctgaaaggtcatactgtaaaagtaaaatactacaaaaatcagcaattttttcctctataatataaattttattttacatttttatctcttttttgcgaattgttataaaaataaaagtgatttttggtttcgggaccaaaggggggtgaccaggatttttgagtgaaaaaattttttcgacaaaaatcttccaaaaacatgtctttaggggtattttatgacgctgatcacgaatacgtgatcagattttacttttgacatcgttcagacatcagaatccctgtgtgattggggattctgaggcatcattttgaggggggggggcaagttcgaatccgggcggtgtacattatttttgctatgcatttttggttatttttaatgtttttaattcatttaaaagagtgtttgttttttaattaattttttaatttaaattaaattatttttttgtgaaaaattttttaaaattaattttttgtttgattaaagaatttcatataggcgaagttcggacccgggcggtgtacattatttttctttgtatttttgggttatttttaatgttttaattaatttcaagatttttataaattatttaatttatttatttaatttcattatttattttttgaatttataaaaaatgaatttcatttcaaaataaatattcaattattaattttcaaaattatatttaatgaataaaaagtgtattttattataaaaaaattttaaattaaaatgcaatcgatttttataaaaacttttcattatttatttaattttaaaccattttgtacctcttctaatcacttttgtacctcttctaatcacttttgtacctcttctaatcacttttgtatcttttatcacttttgtacctctttaaatcacttttgtacctcttctaatcacttgtatcttttatcacttttgtacctctttaaatcacatttgtacctcttctaatcctttttatacctcttctcacactgttgtacctcttctcatcactgttgtacctcttctcatcacttttgtacctcttttaattacagttgtacctcttctaatcactgttcttcctcttttaatcactattgtacctcttttaatcacttttgtacctcttctcatcactgttgtgcctcttctaatcaatcacagttgtacctcttctaatcacagttgtacctcttctgatcactgttcttcctcttttaatcactgttgtacctctcctaatcactgttgtatgttctgatcactgttgtacctcttccatttacttttgtacctcttttaatcaccgttgtacctcttctaatcaccgttgtacctcttctgaccaatgttgtacctcttctaatcacttttgtatctgttctaaaatttaataacggccgcgaagcggccgtcaaagcccaacaaagtttaaaaacgggcgcgaagcgcccgtccaaggccaacaaaatttgaaaaacgggcgcgaagcgcccgtccaaggccaacaaaatttgaaaaacgggcgcgaagcgcccgtccaaggccagctaaaaaacgggcgctaagcgcccgtataagttcaacagatttaaaaaacgggcgcgaagcgcccgtccaaggccaacaaaaattgaaaaacgggcgcgaagcgcctaacaagctaaaaaacgggcgcgaaacgcccgtatgagttcaacaaatttaaaaaacgggcgcgaagcgcccgtcttgagcctcaatgtggactaaaaacctctaataatttttttaaaaattcaaaaaatctctccaaccaattcgatcaatttgaatcgcttcacagtctaggtagcgaagctcccaaagcgcgaagcgcttttccccagctaaatagccgacggttcacgcacccgctagttactatatatgttatattgacaaggagtttcgttgctaaaaccattttctcccggccgaaggccgggagcgccctgaaagtggtggaagggtcttacaactttttgaggcgcatctgggaaaactatagaaaaaaattcagcgcggacgactgagtcccagggacggatttctcattttttcgtgcatttgggggcccgtaactttttttctaaaacccaaatcaaaaaatgtctgctgtgagggggctaagttgaagtgttttctaaaaaacaaaaaaaattccaagcctctatctgcaataggaaaggctgtaggttcgtggactttttcagtaccaactttgtccaattcagtcccggttgaataactcattagggtttgatctgggcggggagttaccagcagacttattgtagagttcaatgagctggatttttccagtttttaaaatttcgaaaattttcaaaatttttcgagctaggcctaaaaaacggttttcgggtttttgaattttaggaatttttaacgaattttcccagagaaacggagaccacttccaaaacatagtttttcgagctctatcgactggtaatttttttggaaaaatttcgatttttttccggaaatagaaaaaaattttggcctaagcgggacatttgagtcccgggcccataactcgtcaggggtcggttttagccaaaaaatgccttagggcaaaattgtagaactttttaagctctatctaatggtatactatatgaagggaaattttcaaaaattttcgagctaggccccctagaaattttcaaaaattttttttgggttgaaaaagagggtgaaaaatatttttctggggtaaattatggtgctaagccacgaat

SEQ ID NO: 5933 - DNA, 2382 bp, Heterodera glycines
gaattcataaatgtatttaggttctcaattctgcaaatgcaaatgattacttcattttaacataaaaataaataaattgcctctcattttatcaatttcgcccgcacaattcaatttgtcaagaaaatgaaaataaataaattatggagacgaatttttgggaaaatttttcatttcttatgggttattttctgaaattttggtcaattttcaggggtatattttcttaaatttttgggaccgattcttattggtgtatttcgtttttattgcactgtttttttgtgaaatttatattttatttaaacattttttctttcgaaaaaatcttctttcaacatccttctccattttaaaacataatggaatataagtttttaaattcttattatttttattcttctttatgttcataattcttcaattgcaaaaggttgtattattttgattccaaaaaataattataaattatatttttataaattacctgaaaaagcatcagtggaaaattcacatgaatcttttaccaccataattattttcaccgtttaaaaaccgctaattggccaagaccaaattaacgtaatcgtccaactgctcttataattattaaaataaatattattatttctatattttctttatgcgttatgtgcaggcattttttttggcaacctagatctttccttgagctgggtttccttgagttttttaccccgaactcaatccaggccaaatattcaaaaaatacgggtccaggcacaggctcggcacgaattttctggatttttttagggtttatttcaagtgaccaatgttttatttgaagttatcaaaaaaagattaaatagatttacataagattcaatttgtacttttatatgttcctaatcaattaattgttatccaagtccaggtccaggattttccaaaatgtcgtacactaattaacaccaaacgcagttttttaaacctaaaacccaaaaagacatttttataacgagaattatgtcaagaatactgtgcaacagcacaatttgtgctggtgacaacggttaagcattcgtcgtagcattggttggttcaacaactgtgtgtgaatatgaagaagcataaaaattgggaagtgtgatacatggaagagaagcggagacaatttgtggcaattgaagaggaaaaaatgcggcaagaaatgccattgcgagcggaaattatgggtcaagcggagcaggtcggtgccgcactgctgtacacgctgatccacatgaaaatgcgacggatgttcatggataacaaccaaaccccaagcggaagcaacaggtggacttgtgaattttctggctctatttcctttggctttaacttttttctttacctaaattatttatatcaacaaaaaacttaaagcctatagaatatttcgtcgacctaaattctgaactaaatgtaacagacaaaaaaaaaaaattattcttgaatatactcgaaaaaaacgccttttgtgttttctcgttgtaattattttttttattgtcagtatttgctcttttcttacattcgtgagttccagggaatttaagctttcgtttaataccaagaaagtagttattgaccaagtaagaaaaaagttatggccaaagaaactaaactttggacgcctaaaatgcactagagcattttttccccggtccccaaattgatggtcatttttaagactaattaacatttttgtaaaagacgtcaaaatttttaaaataaacttaggaattctatttattaaagggaaatctgtgtatgaactcaaatggtaatagtttagttttcaatttcctatttattgcccaatttccgggaatttttggggccggtgatcaatgatcacgaataaaacactcattcagggctaattctgaaaccgaaattatacaaaacaaaaagcttaaatttctgatttaatctttagtcgttctaaataaaaattctcaattaagccaagctcgtgatgacgacaacaacaacaacaacgaaaagaacaaccagcagcagggcttagctgaccctgcatattttccattttggttgaaaagggtggaagaagcattccgatcacatttcgagaaaggaaaggaacaatttggcatattttgactgaattccctaccgagaatttggagacgtcaaagaatgtgttgccaaatgggaaaacatgatcaaagttgcagcagcagcagaaggaagtgacaatgaaagtgatcagcactcattttctatttgttgaaatgggtgctatgtcgaagcacgaaaagtgcaaagtgatcactgatcaaattaaagcaagcaaaataattattaaaaaattaaaattaaaataattatttaaaa

SEQ ID NO: 5934 - DNA, 1266 bp, Heterodera glycines
cgaagcacgaaaagtgcaaagtgatcactgatcaaattaaagcaagcaaaataattattaaaaaattaaaattaaaataattatttaaaaaattaagagcaaaataattattttaaataaatttaatatagctatatattatttcaaaaataaacaacataatatttataatataaaccaaaattattaacccttacaataaaataatcatagtaaattttttctataaaaatatttttgttgcactatttatctatttgccttaataaatgtccgttttattgagatttaaaaatattataaaataaacgaattaattatgcaagtagattattattatttaaaataattattttaattttaattttttaataattattttacttgctttaatttgatcagtgatcactttgcactttttcatgcttcgcccaaccttgcacttttcgtgcttcgactcagcacggttgaaatgcctttttattattttttttattcatcaaagaaaaaccaaatctagcgattttatttctgaaagcccaaaaataggaccaaaaagtaaaaatcatggcttttaattgcggcacgcggttaattcgttcctgcatcgattcgttcactttgccgtgcattaatttcaccaagtttccttaagtatattgtattttcattacagggccccagaatccctgaaaaacaaaaaaaaacaactcttgaacaaaggataaagctaaggtcgtgatactatcatcacaatgttcaaaataaagtaccctgaattttgcagtaaaatgcgtcagcctaaccagcctgaaaaattcttagaatttttacattaaaagttttacaaaaatccgtccgttactaaaattaaacacaattcaaatacaatgcttgtcttgtatatatattatattagctataatactaatgactatgagatatatgtataaaatttgtttgtctaacactaaatgaatataaaaataaatgtaaaataaataaaatatttggttttctattgttttaaatcaaattatcttctgtcttgaagtctgatgagctggcacacctatttatttttattcattaaaataaatttaattttccattttgttttcaattatttatgataattgggtgcccttaatggtggcgcaaaaagcgcttcaatcttcccatttccatgaaatttttcattaaaattacaattgtcgataaggaaattaatggtgaatggctaagcgacgacaaattcgttaatga

SEQ ID NO: 5935 - DNA, 4528 bp, Heterodera glycines
  unsure (1)..(4528): unsure at all n locations
tcaaatttaatttcttaatttagagaatttccgatgactttgcatttatgtcaataatttatcgagttaaattctcatggaaaacgacctcactaacagcaatgatgaatgaatcgaataagtggccaaattctgttattttaaaggtcgcattttaattaaaattacatttaaaaaattaaatttttaaggtgccgaaaacaaatgatgaattcaaagcaaaagacggtgaaccgaaaatggacgacacttttcaggaatatttcctcgattatttggcgaaggcccacaaagtaaaacaaaatatgctttcgttttttatttaaaattataatttataaaatacatttttatgtaaaatgaatttagcgtgaaattgccttttacaacggttaccatcgcttggacccatcaaatcgttttttgccaaaattgttttacggtgctgactacagttcccagcatcatgaaggtgaattaaaaaacgcgaaatttgaatcgttattggcaaaatttattgccaattttaccgtaatttccaatctaaaaaatattttgacggtgccttcgcagcgccggactaccaattgcaatagtatttcgattttcaaatccagctaaaaaacctgatttcacttgtcccaaaatatagaaatttttatttatctccaaaattggcaattgatagtataaatattgtgatagtgatgcgattttttaaattaaaaaataagcattaaaaatgtttttttaaataatttttgttttttcttatatttgattcccaaatttttttggggatgaattttcttaatgtgaacagtttgaggtcggtttctctgcgctaaacagtgtttttttaaagggataaattctgatcaacagttgtccgcttttagggctgatcatcatggaggacctaagcgaccgcgcgtgctgcgtgccgatgctgccggggctaagcgacgcgcaggtgcgcgcggtgatcacggcacttgcgcgcatgcactccaccgcatggacacaccggacggaactgatgagcgaactgtggaaggacggcacagcaagcgaatgttgggcattggagccgctttttgtggactcaatggttgaggcgggcaacgatttggccaaagtaatcaaaatgccctgcggggctgcaaaggaatttttttatgaaatcgaagaaaaaaaaacgaatttcaaaaaaatgacgggaaaaattttacaatgcagggaaaattttcctaattttatcattttaaaaaaaataatacataattttgtggctttttggcacggaattgtgaaaaatccataagaattgcaattttcgataccaatcaaattttttatttctgaaaaattcaataatttctcttcaaaatcgaaagaaaatggtgaaattatcgaaattgaaagattccgactcacgcctgatccaacggccaaatttgatgctgaacagactaatgattgtacggcacaaacgcactaaaattacttttttataaataaatgccattgagaatgggtgccaattatgagatggaccaatcaatataataggtttgatcagcaaatgagcttaaattctgaagaaataagcagataatatattaaaactattctttaacaaaattaaacgaatttatgaatcttgttttcacattaacaaacaaattcaaaaaaatgaatgacaaagttattaattattctttttgtttactcatcgttttccttaattgttgacaaaaattaaatttattgtacaacttcaaattagtcaatgtttcattattcataattttcgatgtcccaatttacagattgaaccaaatgccatcggtcctttgctgtgtcgaattttgccaaagtttcgagtggaaaacctcgcagagagtttttatgatgaagacaaatatggtggctaaaaatcgtaaaatatttaatgaattttccttgttttgagtggcattccctaaatgttaattatttttttgttaatttattttggaaattcattttttcgtcggggggcgtccgtcataagacatcttttttattcaagtatttgaagatgaattcaccaacagaagaaataaaatataataaaaataaataaatttattgaaatttttctttttaaataaatttaatttagaaattataattcaagggtttcctgcttgcattgttcatgccgatttgtgggccccaaacatattgtggaccaaaaatgcggaaggacaagcaaggtggaaaatagtagaaacatttttgcaattcctaaatgttgaaaatattaaagcaaaagaatgattatttcagcgttttttcctatcgaaaaatgattattattaatttttatcaaattcattattaaatttagcgatcaattatgcgcaattatcgattggcaaacggtccattcgggcaacccttgcgaagacattggccgtctgctcgcgctgaacacgacaagtgcataccgtcgtgccaacatcaaccaattgttggcattttatgctaaaaaagtggccgaatttatgggcggaaatgccccatttacattggcacagctgaaaaaggcattcgtcggcgcaatgccatacgtaatgatgtgagattttctctaattgggcgatgtaatatgcaattttcgagactcaaacccgagacagaagagactctcgaacatatcattatttaatttagcatttttggttcttgtcaaattttgtactaattgccgcataattacttatttacctttgttatttctaaacaatttaaatttaaaataggtttttctgttttggaacgacaaattattgcaccatggaatcggtggtgggcaaagaaggcacggcaaagcgagaagaaaaccgtgccgaactgttcgatcgcgtccgttcattcatcgaagacacagaaaatgaattttacgatcaaattcaatgaaaactattaaaaattaattgaataaatagtcctgtgccataatttttatatttttatttttgcaattttatcaacaaatttgtgaaaaatctattattaaatcttaaataaaccaagttataatctatgttcccctatttgggctaatttttgtccggcaatgtctgtcgagcacctcaggatctttaaaattagatccctcagatcaaagtgtcatacatattaatcactcatttgtattgatcatccaaactcatttctgcagtcattacgattcctttttcctttttatcgattccgattaacatttccttcccatttcccttatctcgtgacctcattagtcctttagaaaataattaatgaatttttcaagaaaaaattctcttaatgacaacatcagcactcagtgggattcgaattttggatttctcacgagttgtggccgcaccgtttgcctcaatgattttgagcgacttgggcgccgaagtttggaaaatcgaacgacctggtgaaaaaatgactgacattaataagtctggcgtaattttttccaaatcttcctgtgagatttttccctcctaaatcgaagaaatgcaaaacaacataaattaatattgaaatcaatttatgtttgaaaaacaaaaaaatttgcttataaatctttattaaccaggccagattgatgtttatcctatggcactgaaaattctattattttagacaaaactaaatattcaatttataatttgaaatggattcaaattattcatccggattttcaacaattgctttggtcacattattcccaattctcaataaatactgacaatcaaaaaccttacaaaaaaaattaaaaaataaataatattttcttttatgttcaattattcgcaggtgttggcgatgattctcgcctctttacaccgcccgaaatcaatggccaaagttgttatacgcttggccttaaccggaacaaaaaaagcattgcgatgaatttggctcatccggaggcacaaaatttggtacaaaaatttttcataagacttcaactattaattttttattttaggcgcaaaaattggcaaccaaagcagatattgtgattgaaaatttcaagacgggttacatgaaaaatttttgccttgattaccctcaattagcgcagctgaaccccggcttaatatattgctcaattactggtatttttgtgtatatactaaaaaatgtaaatctgaatgaatgaaaatcatctggatttctgttcgaaaagctcaatagaccgattttttttttttaaattttggataggataagcaaattattgcttctcgactctcgaggaaataaaaagtcgggcatcggggaggaaattccccgacaaaaattgtcgtgattggctggggaaatttaaaaactttcaggaacatacctttatctgggagtgaattttcataaaaagttgagaaaactggttacagaaatttttanaaattataaattcataaaaccccgctcatatggngagaaacttttaacaattaataagacattgtttcca

SEQ ID NO: 5936 - DNA, 1031 bp, Heterodera glycines
  unsure (1)..(1031): unsure at all n locations
tttaaaatttttttgaatttttaaaatttcccggttggtncccggttcccggtttttcttgcggtcccggtcccgaaaaaaaaatcgaggtcccggtcccggcttctcaggtcccggcaagtcccggtcccggttttggcaaaaattcccggtcccgtggcactctaataaagaaataaaaaaaaaaatagtaaccattttaagaatgccttttgcaaatgagaaaataaaacaaataaaatcaaatatttctttttttaactcatttttacgcaaaaactccagccatccaaatccaattataaattgcttaaattcaaacattcacttttaataaggatttttgcttcctatgtatctttttttaaatattaaataattatgcatttatattttttaccttttaatttatattaattatgacgatatttttttcctttagctttgtgagaaaatggatttgccagaattgtgcaattcatctgactacaaaacaaatgccgaccgtgttcggaatcgtgaaaaacttattggaatattttcaaaaaagtaatgttttataaatttatttcgcattattttatttttcatttctttcaattttaatgctaaattttaatttaattcccccccaccccacagatttcttgaacatgaccttgagcactggaacgtgttgctaaaacattcaaaatttcctgccggcccagtgaacacaattcgtgaggcttttcgtcatgagcaaacgcaacacattggcattgtgaagccgatcactcaccaacagtacggcactgtgaaggtggtcggtaagcgaattgaattgttttatttttagtaaattaatttaaatgctcttgtaaatggttttacagaaaaaccattcccaagagtttattttaagattttggttcggtgatttgtcacggagaaaaattaaaaaatatattggtttaatatagaaaaattgtttaatattttcagaagagggacaattgaaatcatcagaaatttattaaaggattctaaaa

SEQ ID NO: 5937 - DNA, 2034 bp, Heterodera glycines
acgacgactcgtatgaccaaaaaatgccacgacgacgacttgtatgaccaaaaaatgcaacgacgacgactcgtatgaccaaaaaatgcaacgacgacgactcgcacaaccaaaaaatgccacgacgacgactcgtatgaccaaaaaatgcaacgacgacgactcgcacaaccaaaaaatgccacgacgacgactcgtatgaccaaaaaatgccacgacgacgactcgtatgaccaaaaaatgcaacgacgacgactcgcacaaccaaaaaatgccacgacgacgactcgtatgaccaaaaaatgccacgacgacgactcgtatgaccaaaaaatgcaacgacgacgactcgcacaaccaaaaaatgccacgacgacgactcgtatgaccaaaaaatgccacgacgacgactcgtatgaccaaaaaatgcaacgacgacgactcgcacaaccaaaaaatgccacgacgacgactcgtatgaccaaaaaatgccacgacgacgactcgtatgaccaaaaaatgccacgacgacgactcgtatgaacaaaaaatgcaacgacgactcgtatgaataaaaaacaataactatttcgagattcttcgtcattaaaaaatcgcaaccctacttattactagggcttccaattatgtatatggaaatccattttttttcatggactgtgggaggcctgaaacgcacgaaaaccatctttttagcttggtttgaagcttctagtatgaatttctatatccattttttccatatttcgcgatttatgtccatatttttggaagccctatttattactagggatgcgatttttaggtgctaaaaactgccaaaataggtaggttttaagttataaaaaaaccccaaaataggtgctaaaaatgggaaaataggtgccaaaaagtttcgaatttaggggtgtaaaatcgaaaattttcttcaaaaggcaaaaatattacgccaaatcattaatgagatacataattttcaaaatcaacaattctcgtcaaaaaattaaacaaataaattttgtagatgaatttttgagaaattttcatttctcagggtatatttttgaaaattttcaattcgattcttcggggtatattttttgaaaaaaaattgggtcgattcttcggggtatattttttgaaaaaaaattgggtcgattcttcggggtatattttttgaaaaaaaattgggtcgattcttaggggtctatttttccttttattgtatttttgttaacaaattttgggcaaaatgccaaaataggtgaaaataagtttttaaaattttttttaggttttttaggtgctaaaaataaaaacctagaaaataggtgctaataactcgaaaagtagcttaacaacagcccaaaaaaacatgtttttcgtgcgtttcaggccacggggatctcaggaaaaaaatatgtaaacatctaaaaatcgcatccctagttattattttttttgtgaaaatttataaatttaacagtcctatttcaaattactagcgaggaggaaggaaacaaaaactactgtcagcgccttcggcgcatcccccgctaggcagtacgattgtgttatagaattaagaatgataaaatcgactggctcgtcgttcattttttaatactaaatttcgtctcgctgtcctctatcaatattttaattaaaaaatattaagcatgaaaaagcattaaatcaatgtcaactcaaccatctagctttttcaacgtcgccatgccgccccttggacatgtcgaacaacttgttcaacccatgtttatcaatgcggcacatcagcaaatgccggtatttttttatttttttttttcataaaacaaattctgttttaggcaccatttttgtgctgatggcacgcacaccattcaatttttgaatgggagcgtctctattgggggccgcccgttgccgtctgttatttaaacaggtttttctattcaattgattattcaggccgatttggctcaccggaaaagaagtggatccccgcccgca

SEQ ID NO: 5938 - DNA, 2288 bp, Heterodera glycines
  unsure (1)..(2288): unsure at all n locations
ttgtatcaaacaaagctaaaagtccctagaatcatagacaaagaaatagcaataatgacattagaaaaatcgacancgagaaaacacgaaacgcatcctttttgagtatattcaagattttttttttgtctattacttttagcccagtgtttgggactacaaaagattctatagactatgcttttatttgataccaagaatgtaggtattgaccaattaagaagaaatttatagccaaagaaactgatgattagacgcctacctaaaagtccagtggacgtctgtctatatagcctatttttactatttttcatatatatttgtttagaaattgcaatattttctattaggggcatctctctggtaatttttgtcgttgaaacacagcaccagtgacgcattgaccatggactacggcgtggaacgcaaacgccgcagactctccaactacggagcgacgtcgccgacaaagagtgtccaggaggtgaaacccgtggcattgtcttggcacggtctcaccgctgtccatgccaaatcgggacggaaaattcttggtaaaccccagtcggagttgcgttccctacgtcaaagactgtttcgatttttttagacgacgcgtccggcatggccgacgcgggccaactcgtggcactgacgggcgacggcggagtggacaaaacagcgcttttgaacacgttgctggaccacaacctgaagactttgagcgtggagggtcaagtgctgatcaacgcgcactccttgggccggttcatcacttacgtcatcggggtgagtcggaaaactgctaatcttctgttaaatgtcaaattttgaattctaaaacaaataaatggtaaacagaattacaaaaatgtacaatttttcctttgaaaacttgggtttcaagcgtactttaccaattaagttttgcaattctgcgcgccgttagttttaaattcaaaacttgaccgcataatgtaaagtgccggaatggcaaatccaaacatcgacgatatgtcggttgagaccgttaattgaaacgggattagtggttattaaactatagtgtgttttcccgttctcaatttcagtacgtgcagcaggacgacttgttcatgggcacgccaacggtgaaggagcatctgatggcgcaggcacagctttggatggtcggacacacccaacggacgatgcgtagacgcgtcaatgaggtgggattttggatgagtacaaaatggaaatcactaattttctaatggattaatttggctgctaaagtgtcgtcgtgcggtcattggaattagcaaacgagttttttaagaatgaatttctcattttcagttggaagaagccatttcggatggtgaggcgcgtcgtttgccgttcgccttcgaaccgcggcacaacccgcaaatcatttttgccctcaaaccgactaaggttccaatttttttttgaattatccaaaattcctgattaggacctcgactcgtcagtggtggacagtgtggtctcgcacattctgcgtaccctgaatttgttcggccggcgaatcgtcgtcacaattcaccgtccgtcagaaggaatgtgccagaaatttgagcgggtaaaatttgaccgattttccataaattcagttgggatgagtgccacccccaccctaaatcaccaaaatttacgcatttgtttttatttgtctgttgataaattatatttactattaaacgttactttttgaagttgccatctgaatgtaccttttaataaaattgaacatgtcaaaatttatggtcgttttctcttcccattggcagccaaaaaagcagaaatggaggtagggaaaataattttaaaaattttctaagtttttttgaaaacattctgttagaaattttggtaatactaccgacggtatcacaaaaaaaggttttctcaaaggggaaacaagcttctcacagtgctgacttcttacaaagaagcagcaattgtttttagatttagcgcaaaaataaattctctttggcgttttgaccaatttgtctaacactgaaacgaacaataattttcttagtcttagtttttcttaacaatcctttttttcaatattatttagaaaaagtaatccttttttaaaaaagaaaatgcacattccaaaaattgaattccccgaagaaattgttccgagattggccaatttgtcgctaactcgtcgacccatttatgcggttttcttttgactatctttttaaataaatatttctagtcctaggaaagggtaaaataatttg

SEQ ID NO: 5939 - DNA, 2232 bp, Heterodera glycines
  unsure (1)..(2232): unsure at all n locations
cagcagcaatccatcaaccgtcttacgataacgaatcaggaacaacagcaaaccattgccgagcagcagcaaaccattgccgagcagcagcaaaacatccaacaactccaaaaccttttgggtttgtgcaaaattttagttgaatttcttttatccaacaattgattgtaatgcctaatttttcaagccggtcacccgcagcatgcgccagcgatgggcctgggatttcctggtgaccagcagcagcactatgcgctcggcggccagcagcaacaacatgcgccagcgatgggcctgggatttcctggtgaccagcagcagcactatgcgctcggcggccagcagcaacaacatgcgccagcgatgggcctgggatttcctggcgaccagcccgaaaatattggtcagtgccttggttaagtcaggcactctctccatttcctttcgtttaggtgtccagcagcaaatgcagggacagcatggtccccctcctccgccgccgccgcagtaaaaccgttgcaagtggaagtcgaatgatgcgttgacgtttgaccgtttaacctcttatgttttaacgttattttgtttgatgagaataaaatctaatgcctcgtttcagtgtaatagtttttttgttcagaattaccagttagaaaagcaaaaacaataataaaattgtggtatgtcaccatagcttaataaatttcgagatttcaaaaacccatcaattctgacttgattacgcaaacattaatcccttcccgcaaaaaagtttgagccaaatcccacagcgggatcagcaaatttctcagggttatattttatccgtcgtaatgccatcaatttttgttgtcaaaattttcattcgttaaagaaagcgagattgaaaaagcaaaaacagcagtggtctgatccaaacaataataaagcgcagagttcaacaaagaaaaagccattaacattttgtgatttattggtgttgctccttcatttccgttccgttcattttcactgtccccccttcaagtcgcgcatgccggcacgcatcacctcgtccacctccagcagattggaggcgatgttctgacaggcgttcagactcgcctgcttcacgcacacattgtcccaaacgctctaaacgggggaagggaatcaatgaaagtgttcactttttatggcccgacccatttgtccccgtccatttctggggacacacctgagaaacacacggctctccgctctccaagtccaatccgaccagctcaccagcagcactgaacgtctccaccagcttgacaatggcctggcaattgaaaagagttatacatacatttttgactgcttttcactcacctcctgngcgtcgaatccggcattgaccgccanagttttcggaatgactagcaaagcctcagcaaaagcctgggaatgagaatgatgacaataattgaaagggattaagaaagaaagaaagaattacggcaccaaaacaccgagtttggcacgccctttcacattgtcggcaagctaaaatagatatattcgtgaagtctggaaggactctgcttgctacctttttcagtgcacaatatcccgcaatttcaaatgcaccggcgccgggcaaaacggcacctaaagaaaccatgaaaattaaatatgtgacgaccaaatgacagtcataagtaaagcccaaaactgggaaaagaggtgcaaaatcaaataacccaaagtgccaaggcattaattgcctaggtaattagtcattttcatccaaattgtcccatcccctcgtcgcaaaacccaccgtctttcaacgcattggcaaccgcccgctgtccgtcgtaaatggcgtccttcagctgcgtgatgctgtgcctgttgggccctttgagcagcaaagtgaccgacttgggacttttgcactcctccacaaaagtgtatttgtcctcgccctgaagcggacggtaaccatgtgttacatacagtacaccaatggaaaactgtccccgcccaagaaataacggcactgctcccccttaactgaccagcacatgctcataaacactgcccgcccatccgagcacatcgggcgtcaggtcgtccaccgaattgaccgcctcgccgccgcaggccaactgcagccgttccatgttccggcgcttggcacgtcgcagggccaaaatgccgtgctgtgccaacaaatccaacgacggcggatcaatgcccttaggg

SEQ ID NO: 5940 - DNA, 1770 bp, Heterodera glycines
ttttaccttataatagagactggaaattgcaaatttgtgggattttctgtgggatttgaattcaaaaatttaaaaaatgacttaaattataataaagaccaaaagctgttcaaataaacaattcgtcattgagttaaaaaaggttcaggtcatattaacgcaatttttggtggtgaaaaacaatgaaattgaaccaaatggttaaaccgattaaaaaataattatattttcatattgttggataatttacaaattattcatataatcgactaattaaggctgcattgtttccatgcgaactttgttcaactgttttgaaggaaaacattgccaaattggcgaaggtaaaaaatgtaaatttattaaacattgatgaatttaaatatggtttttgttcttttctcagatggcatccgatgccgcggctgtcgcctcgacaaatgccttttggccggcatggatccgacaatgatcaaagctaatgcgaaggacggagaagcgttggcccaatatttggccaggttggagctgcggaagagaaatgctttagcgaggaacaattgcgcggaacgaaacaattgaatttcgattgaattttgtattaaattccttagaattgaatttcaaattgaattttaagttgaaaaattcacggttttcgtgaccttgaattgattccgtgaatcgtgaccgtaaccactatctaaaaacccgtgaaattcacggttttcgtgaccgtgaccgtgaattaactccgtgaatcgtgactatctaaaatttgtgaaattcacggttttcgtgaacgtgaccgtgatcttgaattgactccgtgaatcgtgaccgtaaccactatctaaaaacccgtgaaattcacggttttcgtgaccgtgaccgtgaattaactccgtgaatcgtgactatctaaaatttgtgaaattcacggttttcgtgaccgtgaccgtgaattaactccgtgaatcgtgactatctaaaatttgtgaaattcacggttttcgtgaccatgaatcgtgatctgaattgactccgtgaatcgtgaccgtaaccactatctaaaaacccgtgaaattcacggttttcgtgaccttgaccgtgaatttactccgtgagccttgatcggtgctttttgcgccttttggcatttttcacactgacggacaatccgttcaatttccgaatccatgccgggccaatatacgtgttggcgggcgagtgctttcatgcgcacaattccggggtgtgccatgtgcagggacttcagcattcggttgcgaagcgattgcgggacgacaacgcgattttggtagagcaaacagccctcgatttccaaaatgtccctttttggaaaatacggtgcgatgtccgggtcgctgcatttctttggccaattcgattgggtgaatgccaaaatttttgccaaaatctcatcttttggtgtcgcctctgcgatttcgtctgcagtgacgggaagttgttccgttttggtttgcagaatggtgctgttgtagcactcggtttcggtgcagatgttggcaatcaaaatatcctcctctggtcggggataatttgcgatgaggcgtgagagaacatcagcctggccaaacgatgcggtgttgatgtaccgtatctcaaaatcgtaattggccatgattagggcccatctttggagtcggctggcggcataaatggggatgcctttcttggagacgaagatggtcagcaatgggttatggtccgtgagcagtgtaaatt

SEQ ID NO: 5941 - DNA, 5656 bp, Heterodera glycines
  unsure (1)..(5656): unsure at all n locations
tcgaacgcggactgctgttcgcctccccaactcaggattcatcctttcgaagaagttggtccaatggcgccctgatttctcgcattggtttaacaaaacgtccgtaatgagcgctcccaagaatgaacggagggtcgttttgtcgtgcggcgctgacatttctgaattgcctctgagcgcgctgggtcggggcgtatgccgttggaggagacgacttggccgagaaaaagcaattctttctggaggaatttgcatttttcgagctgaatgcgtaggccaaagtcattaatgcgtttgaaaagcgtttgaagcgcattgacgtggtcttccagggtctttgaggcgattaggcaatcatccaaataagaaaagacccctggaattcctgcgcagatttggtccatcaggtgctgaaaaatggacggtgcagatttaacgccaaatgggagacgttggcactgaaataggccgcggtaagtgttgattgtgcatagtggtttcgatttttcgtccaattccatttggaggtaggcgtctctcaggtcgagatttgagaaaaatgcggctccatttaaagctgcataaatgacgtcgggtctcggaagaggatggcgattcagttcgatcgaatcgttcaatccggtcgaaaagtcgatgcacacccgggtctttccatttttctttttgacggccaaaatcggggcggcccaatggctgaattctaccggtttgattgcgccaatctgcaagaggcggtccagttcggtgtcgacagcttcgattgcaccatgggggactggtcgtgctttacagaagatgggtcgggcctccggttttagaatcaggtgcgctttgattgcgcaatggccaagtccgttcttaaaaacttcctcaaaatctttttgcaacacagcggtgagcgaggattcatccgtgatgccaatcgccgggtttggtgccttgacgacattggcgttgattgacgcgttgggctttcctttggtgctctttgggaacaaaatttctcttgggatgagctcgaattcctcaatccacggaaggccaaacaaatcatgctttaagtcactgcttacgtaagcgatcagtgttttggatggccgatcgaagcaactgacggtgcaatggaattttccttcgggtgaaaatgcggtgtcattgcagttgcgggtttcgatgtccgttggagagagtttgggttgacccaatttgatccacgttttgaagctgatgactgttgcttgggctccactgtctccattcatcttcaaatttataccattgattatgaccgggatcttccaccatcggccttgggttgtgccaatcaccatacaatgtgacttgaccacgaccgtgtgaaatgatcggttctgagatttgtgtgccgtgttggacgagcactgacggcagacaatcgcaatgtggccttgccggttgcatttgttgcaaaatgcgttggcaaatttgcagtccgatcgccagtgatcggtgcttccacaggatgcacatgggtgcggtggatggcctcggtttgctttattgtctgatttttgcttaggcgaaggcacatgatgcggcgatttgggtgccggttcatgttgtggccatttgggtgccggttttgccttgtgtttgcctttgctggtctctcgccattgctgaggtcgcaattggatggcgctggttgagactggttgagtaagcagagaaagggcactttccttgacgatttgaatcgccttcaattcctcttacaccttttggagagtgatgtctgtgccggtcttttttgcgtcctccagcattttgagacacttttgcctcaggtcgtgatgctcgtcgttgagtgcaatgaccaggattatgcacttgttctttggtcggactcaaattggcgttttcgcaggacgcattgatatgagcgaccagcgatgatatgtcctggctcggttgctgacgaattttgaaacattcgtagcgccggacaaatagtgaacgcgtttcggcatataatcctttcagcttggtgatcgagtccacccaagtgactttgtcgggctgggtcggactgatgctgtcgcggtatttgccgtactcctcgtcgccgagtttgccgaggagtagtctgacttttgtcgactcggggaggtccttaccatcttcctcaatcaaaactccaaaccgtttgaaccactgttcgaaagtgtttccggtttcggcgtcgtaattgaattttgaaattcggccgtcgatggaacttgccaaatttgcatggttcagactcgctgacgcggcgttttgcggtgcttggcccattagttgttggatggcatccgattgcactcgcatggcctcaaggagttgcttaatttggtccgcgctcatgccgaattgtttgccggtgccgaatttgagagtccaaagttgaaaaaccgcttattgcggaaccgcaacctttcttaggtctgttggtttttcggtgaattaactgcaatatatgcagacctcacccgcctagggactattggttttgttgatggcgaaaaactgcagtatttgcagacctcacccgtctagggactattggttttgttggtgtgcattccgggtgtcttcttgttggttgaagacgactgctgactgcgccaaatttgttgtgtctttgtccgagtgaataagaccaacaaatatttatttacgaagagacaataataataaataataaaaatggcgaatggtcggtgggagagaataatgaataaaaataataaattgaaggcaggagaagaagtgaacatgggggaagagtccagcctttaaatagacaatgtgagggggaaggaacggacgagagaatggacaaatgtaaagatcaataatcgataattgaacatgagcaaagtacatttgctttttctccaacacattggaagaatttcgtagaaacaaacaaattaaagaattgaaaaatttgccggaaaattttcaaaatggccaatgctttggcattttaattgagccagatgataatgccgaaatggggcatatttcactcacatttgcaatttatgtgaaaccaatggaaaatgagtaccaaccgtcggcggatgaaaataatgaaaatccaccggatgatgaagacattcgaacaatggtccgaagaatccttttcaggttgttcgagccaaacttggcaaaggtgtacaccgtcaatttaggcaaaattgacccacccgaattgtattttaatcgcacaattttggtggacaagaaaaatgatttggccaattaccatgccttattgtatgccaaaatgcatataaatcgacaaaatatctctggttataatcttttgggctatgctcaattaattaaaatcaacgacgaagaagcatcctccagcagctcagaaaataaggtaaaagcaaaaaacggtaataatatataaaaaattatttatattaatttttgattatttttatgtaatttttagtccaataaataccaattgaaaattccaattaatttatgtgcgcttttcaaacacttcattcatagctttggattgcaaatttattcttttgaaaaggtagatttattaatattacaaataaacaatacaaaaaacacttaaaaaataatgggcagtaattagattaattatagaataaaaatcacaaagaaaaaatggagaacagagaagaaaatccgcaaagaatgtgcaatttgtcttgaatcatttgaagatgacaaattaacaatgaaattgcatgaggattataaggttaattaattaattaatgatattaatttagttaaataaataaattaagtaattataattgatataattaataattaacataattattaattaatataattaatccaatgtaatgctttagcatgtgtttcacaaggaatgcatcactaaatggtaataaaaaaagattgaaatattcaaataaacaattgttttttagggttttatcccaagaacaaatacgatgcccaatttgcaatagaaacgcatttcaagtcacaacggtacaattttaatcgctgtaaaatatcttattagcttatcattaggctcgctggtcggggttaagggatttcgtaataaaatattttttaaataagcaaaaatttaacttatcattttattcattcgaaaattaaaattttctaaatattttgagtttttgacttatttagccagatcttcaaccatatttgatagacctgaccagccttcaacttcatttttttatttgaaccctttggcatttttattccaattagcgaatggaaaaacggaaaatgatgaatttaaaaagaaaacaaacaaaattagcaattaaaaagactgaagaatttgtaaaatcacgtgaagccgaactaaagcaaattgctttggaagcagaatttttgaatttgaatctttcagctgagcaaaaattgttcgaaattgggccggacggagtgaaaagtcatccaattgtcgaggaattgaagaatcaaatttcagacattctttcaaacggtcgtcaaaattcggaggaaatcatagcaaaagccgaacaaatgaattttttgatcaatcgaattacaatttgaattatggtgttcgtttggctttattcattgaaaatatgcaattgatcagtgaaaattgatttccaccctcccttcgtcccatccttttgtgtttatctgacaaatgagcttgtctttgactgattattgcctttctttgcaatctgttatccaattcagcatttgttgacatttttctttaaattttcctctcgaaatgaattataattcgttaacctgttctctattagcctgcaaaatttcattgaatttcgttagggttcaataaagttacatcaagaaaatcccaaatgtttgagctttttggaacacagattttttttttgaaattgacggggccttaaaatcttgcaagctaatagagaaaatttcgagctttgaatgataatagaatttaaaatttggttgctttaagaaaacaatttttatcggaacaatggttgaatttgtaaattattagactactgctaaattgttttcccccttaattttcaatgtcgaaataaaatttggactaaattattgaattttggaactcttttccaattgttctggcaacacggattctaacgaatactaaaaaatgaaccaacaataaagcaaaagtgcataggtcggccaaggctggcctgggattaccagaggcggcctgtatctgttatattttttgaaaaacctagcaataatttatatattttttcttcaatttaggagacaaaatacaggtacaggaaaaattaacacacatgtacagaaaaaatgccgctttctgaaaagtcgctgcacaaaaatgccgtagggaaagcccgtagcgttcattttcgttgatcagttattctctttttggcaaagtcctttcgctcatcaatcgctccgcttgtcctttctcgatcatttccattttgtcactgtttagccgatcagtgctgtttttggcactgtcttttcgctcatcaatcgggttcgcttttgcctttgcctcgncctccaccaatttctcgaaaatcaagtgttc

SEQ ID NO: 5942 - DNA, 3365 bp, Heterodera glycines
gattttatcattcataatcctataatacaatcgtactacctagcgggggatgcgccgaaggcgctgaccccgctagtgtaaacaaaaaagtaaacagttgcaggaaattttttctcaatcggtatgccaaattagtgtgtatttaaatccgaaagtgttaacaattttttcctaacaatgataatatggaaaaatggattgcagtttaaaaacttcaacttttgtttatttttttcatttttgtattaactttttctaagtgtcaaactcgcatttgccaatctctggcccattacaggttttactttgagatggctgtccttatttcaattccaaacgcctacaaagttgtattattcattattgcttgcggttatttgatttgtttgtacgtaaattcacaaatctttacgttcgtcgtcttctttctgcttggctgtgttagttttctttaaatatattattataatttgtttttttgttgttgcaatttcaatagtgaattattttttgataattttattacttgtttttgttattcactttagaccgttggatactttggagacggtcggtttatccttccgctcaaggctttacatggaaatggcaaagagttattcatgctgttttggaccaaataccttgatgtgctccgtatggttttgccaaaaaaaaagaaaattttgcacccgcctacacattggaatagacggtaatgatggagtttgtaaaatttttaaaaaatccacctaaattttgaatttatataaaaaagttttgaatatatgaaatcttttgaaattttacagacaacccttataccaacatattttggttctattgaattttttagtccaatcaagtgacaatacctgtttttttatacaataaatttgttcatgtcaacaaccattatttttggtatcattcgaaagcacaaagtctaaggagctaaaatatataaaaaacagcatttaggccattgctaaaaaatttgattatgccaattatgaaattacgattagtaataacataagcaacatttgcaacaaaaaaaattttcgctaaatgtttgaatttaagtccggcgttcgaaaaatggccgtccaaaagccgattaaaatttcgtgaatttgaaagtgccatttcgatggttttgttttttacgtgctcatctcttcacccccccccccccccctccacttgcaatttctctcctcaattttactttagctgcccattgctcctctcctctctttcctccttcgccacttgcacagcgactcggcaattcccgtcgcgggcggaagcaattaggccaacccatcgccgctttcattagcatcgcaccgcttaagtcagtcagtcacaaaccgacaaagaaacggcaaaattctctcgcacattattcagaaaagtcgaggtgagttgttgaatttcgttgtttattttattcaatttattcgggaaaggctctgccaaacctccgaacagcgaaaaattcaatcggaaagtgagtctcgaggaaagggagtcgagaggggacgagcaaaaggctttgcgatgaacatgggcatgcccgcgggcgcgacggaagtgcccgagggggtcgtgcagctgaatgtcggcgggacttgttttctgaccacaattgacacgctgaaaagggatagcggagcactgctgtcccaattgttgacgttggaagggttggagaagaacagcaaagtcagtcagtccaggggcacagcgacgcctttggtcactgattaatttggaggtggccaagcgaatgagcaacggcaccattttcatcgacagagacggcgaacagtgcgtacagcactctgctcttcaggtcgccggtccggtgctgagtcgttatataaaagccatcaaaaagggcttatataaaaaaccatcaaatgaaaatttccaacagaaaactgtccataacttttgtctaagtaaaccaaattaaacattcttggtattattcgatagccctaacatttctctattagctcacctaaatttcaaaaaatttgaccaagtttgagcaaagttatggccaaaagtagtcaaggaaccagtttttcagacatttttggttataacttttttgaaacttgacgaaattttttgaaacttaggtaagctaatagagaacaattaggactataaaatgaaatcaagaaaccaaaaaatataaacaatttataacgtaaatttttttatttagcataaaataattttgatgatcaaaaaaatttcatttgatggttttgccgtcagcatcaaatttgggccttcctaagtcaaaaaatcactattttagacgtaaaaattaaattaaggcccgcgttcaaacccaaggccattttcagcgactccgatcaggcatcatgtgcgtgtccgtccaaaaactatcgaccaaacaacacacatggatttcacatttgctgacaaagcaacacgcatggttttgacaacgacggacaagacaatggacgtggatttggcttaaggacgtcgcgacacaaaacgagcagttggacaaacagcttgaggagcaggaacaagcgatcagctttctttgacagcaggtccgcaccagagacgcaatgatcactgatctgctccgtcaattggaacagcaggcgcagaagaatttgcagaattttggaaccattatcgtccaaattatttttagcatccacacggccgcaaaaagaatgcggctacattggagcagacctcacggcaaaatttggcagagaaaatcgctgatgtgatcgatcgagatcggtgtaaaaatgaaagcccttttgcgattgatcaacccaaaattcgacgtatttccaccattgaaaaaagtagaaatatttcttttaatgaaaaattctaatttttgggtgatccaaataaaaagaaacacctgccttgtactacattatgaggcaaattctacgccggcgggtcccgctttttattgtctggatatagctggagccttgagcttcagattgtccgcagccacgggcaatctgattagcttcagatcagacgaattgattttaaaattaagcgaagacaatggccaaggcttcacaaaaataaccatttctttggcccatgcttccttcacatgcgaattctccggccaacaatttcatcgtggcagcatttcccgcaaaggacaaaagggaaaatttgatcaaattctgcggcaacatttggcaacaaatcggccaattgaatgaaattgcggggaaaaaatcaaattgtaaattaacaaattttttctgaaatcaactcactttttcaggtttctcggcggtgatctgagcttcttgtgggca

SEQ ID NO: 5943 - DNA, 1630 bp, Heterodera glycines
  unsure (1)..(1630): unsure at all n locations
ggccaattgaaggaaaattggggggaaaaaaatcaaattggtaaattaaccaattttttcagaaaatcaacctcactttttcaggtttctcgggcggtgatctgagcttcttgtgggcaattattggacactgtggctctgccgttacgacatttccctcgcctgtttgcgattgtcaccgcgaccaattgttggacgtggaaaagtgcaaaatttgaacgacggaggaaacggtgaaacaagcttagcagtttggatgactcgtggaaaatggtgagaagccgactgccgctgctcgagcgctgaccatgggaatcgttgaagagccacttttgcgatcaatcatttgaccgaatattctggcgccttttcatgtcttccagggcattggaaatgctctgatcaaagagctcgaagcatcgacggaaaacgcggaaattgcgaacgaattttttcggagcatcagggccaggatgtaatcgttcaggaaaaaggacatgacggggaactcaatcagaaaagttctgattcatgcggaccaattggagaggtgttactcagctgaatggccgtaaatcatttgtcaaaccttggggcatttggcaaaaatataaacttttacaaaagtgcttttttatttgatatttttgaaaattaaatataaatttaaggcccagccactgtcgccacgggatttggacgaattggaaacatcaattgatcattttcggacatttctcaacgatcagtcgcggatgtgcactttgatcgccctaaaaccaaaggtccacctgctgttgaaccattttgtgccttcgccaaacagcaccaatttttggcacttttggacgagcagggtcaaaaagaattttgaaattaaagtcctgaattttttaggtgatgaagcattattgcattcggtatggaagcgtttggaacagttgtggaaaacaatgcctgacgaagaacaaatgcgtcaattgttggagcaccattttgtctcaaattggcttctcgatacgggaaaactcgacgaaaatgtcggattcctgttcagcaaccccaaaaacctctgtaaacttgtttttagtgcaagatttttgaaaattttttttccaaaaaggtgggggacaaactacagaattacccaaaaatgtttactggtgtacgaagaaaacgaaattgactgttgattgcctttccacagccttcagtactaatggcacactcacattgtttgatttttagggtaattacaaaaaatcatcaattatttgcctattttccttttttcttgatacgacacaatcggcccctacggcgacggcattttattatcttttagtgtaatttactgtcggattgtccactgtccgattgtccgggagccatatgaaaggtcaatgtattggggtaaaggtaaaaatattcagctaaatagtcgaaactttaaccaccttgagtcaggactttttccaacactgtacacgcgatacaattttgggctccaagtacaattaagttggtttcttcgtcttagtggtctgtgagttaatcaaaaaatggggggtcacaggttcgaatccagtgcatgttgtagctgtattttgacgtttttaaagcaaantaa

SEQ ID NO: 5944 - DNA, 2012 bp, Heterodera glycines
  unsure (1)..(2012): unsure at all n locations
aaaatttaatttttaatgcgatttgttaacagaatttgtcaaaaaatgacccaatctttggttactttttcaatttctaggctgtttaaaatgaaagaaaaaaatttttaaaagaaattttatttaaaataatgactggtaaagtaaatatgaaaaatattttatcccagtggggaattgaacccaagcgagaaataatgaaaatcagaaggtttaaccacttgactacttatgtatatgaacaaatgctttaaattagagtagagcgggaccgtgaattttgggcaaaaccgggaccgggtcttgccgggacctgagaagccgggaccgggacctcgatttttgtgcgggaccgggaacagggaccaaccgggaatttttaaaaaatcggctaaaattgatttgtaaacggaaaaacgttgcacgtcgcacgatgtcagaagagcaaaataaatttgatggttgaattataagaaaaattttcatttctaacacttctaacttttttaaacgatcgaatcctgaaaaatttggtatcatccgaaagctcttgacgagctaagtctaaaaagaagtgaataaattttcttctgtgttttaatctcaatgtttatcaatattcaacacttttggtatggaaatggcccaaataccttagtagggaaacggcggtaggtaaacagctagtagggaaacggtcggtagggaaacggcggtagggaaatggcggtagggaactgacccaaccgacaccaacacataacactctgaggattgagcgtgatcgactccattttcaacgaaaccccgcctgttcgtccgcccggcactgaccaaagaacaactcaataaggaatacgaagagagaatccagctccattcagttctcacaaacgaccaaactcccgttgttgcaaaaggaccaaaccagaaggaggccagtaaagacatttccaaaccgccggaagtttttgaccaaacaatcctcgtatattattaagcattgaattcattgccaccacaaaattgttcactaaattcaatcactcgaaaaacaataccctcgtcttttcaataaatagttctaccagacctcgaacaatttcttaaaacaatacatttattctactacaaatttttcttacaaattttcctcaaaccaaatttttctcttcaactctcaaaacaatttccttttcgctggaggtctgactttctgtttctccaaatacaattgattctttaactacaataagaaatgggcaaaatgttaaacctcgggtgggaatcgaacccactcatgcaccctttccgtgggcagctctaccattaagctaccgaggcacatccgccctttcttttatggatcttatcaacccccgctttccgcgttttaaccgcccagccagcttcttccttacagctccatcctcatcgggaccggtccctcggtccattagttaattgctgctggcgcggtggggcaaccatccggtgctaccaataagaaatgggcaaaatgttaaacctcgggtgggaatcgaacccactcatgcaccctttccgtgggcagctctaccattaagctaccgaggcacatccgccctttcttttatggatcttatttgggtcaggggtacggaatgttgtattcgtgatcagcgacctcgaaaacctcttgcaattgctgaccaacaaaatgacaaagcctcgaaaagcctggacctcaactgccaaatcatcgcagaggacactcgccgacccactacagttggcgcaaaaagaaccagaatcgtacacgaacaccgtcatcaaaattattttttgaacttttattcggtttagaaggatggtgcaatccaaaatggtctcgcactgctgaagtaaaggcgcaaagaagacgcggtcatcaaaggagttgaagaaatctaagtgannnantgtgaaancgatggaccggttgatactcagttggaaaaaaatgttattttttgtaccacataataataaat

SEQ ID NO: 5945 - DNA, 7001 bp, Heterodera glycines
aaattatagtccgatgaggaacagggaatcacacagttcatgggcaaatgaaagtaaagcttttaactagagtagagcggggacaaatgagtacctaggtcccggtattgcccaaaattcccggttcgctctactctacttttaactgagaatttatccaaaaaaagaaaattctaaaatttatttttgcagtgcgccttttcaaaaaaacattggaaaattttctctcacaaccctgtgtttgtcccactgactaagcttttcactgatttaatgacctttatccaaaaaatgtgcaaatggtttctttaacaatagtcaacaaaaaacatttaacgtcagagtctttcaaatcattgactgaagagtttcaatcttagccctaagaacgtcactctcagccctaaggcttacattctcatcacgaaggccggcattctcagcccgaacggcgacgttttggttctgactgtcggtcctatcaatcgccaactgattaaaggtagcaaaggtttcatagagtgcgaacagaacttaatgaagattcaaattattagtataattaatagacagtgtttacgactaacactgcgaagccttgttaatttgggtggcatttacgttttctagcaggttgagaattcttccaaactgaatctcgaaatgtcctgcatttggagcttgactgtcttcgtggtgaggaaatccatagttgtatgccacctgaatatatattacacgattggttatatttagggtttccatattataaaaacaaatatgcgtaccgccgtacttttggtgctggtcaccgtcgaaatgttgcgcatgtgcacagagaaggagttgaagcaggtggaggagcactgcgcaaacacagcacagcaacagaagcagaagaggggcgaaaagtgccaccaaatgatggccaacgcattggcacagtgcggcacgcggaattgtgtggcggagttggcacggaagatcaaaaacggagtaaggagggtttaaagtaagggcaaagccggctgagaagcagagatggcacaatttagcataagcgaggggggggagaggctaataccccctttttggagaaaatgccgccaattcagcctccaagaatgccaaatttctgttccttggccatccatttcgcgcactttcagcaagtggtccaatccatcgccgtccagtcactgctcgcgctcaaccaattgccgtccccgtcggataccatccttgacgaggtgcagcagttgtgccaatcgcaaacagtggcgggcagtcaagcgctgaagcagagctgctggttggcattcggagcgctggtcaacgaagtgtgccagcacacgacggcacaaaatgcgaaggaatgtgccggggagggcggcgccggcgccacggcaaaatgcgcacagtcgggattcgtggacaaggacaagtgcccggcggacaagaagcagaagtacaaagaggtgaagcgggtggatgtcatcccaaaagtttaaaaataattaatgactaattggggtcatttccaacaaatcgacgcttcggttgcccacgttcagacgcttttcgctatgtacaagcagcagcagaacgagcagcagcagacgcagtgcatctacgacaaggcggtggcgctgggcgcgctcggcaacgccggcctggacattgcgcttgcggacctggagcggatcatcaaggacacgcgcgaggcacgcgtggtccgcatgatggccattgacgcaacgcggcgcatgcgcacgcaaatgccgcacagcgtgcgcgccatgttgctgccggtgttcctgaacacgggcgagcagccgcaggtgcgcatcaccgcttttgccaacattttgggcgcacaaccaacggccgaagtggtggaccagctggtgtacgcgattggcaaggagccgaaccgggaagtgcaggcgtactgctacagaacgatgaagaccatggccaactcgcagaagccggacgagacgcaaatgtgagcaaattcaaaatttggcaccgaaaaattggccgaatttagtgccaaacacgtcaaatcgtcactgaaacagttggcaaatgccgtggacgagcagcagttgcgtaccagcggaaagtggcagttcgagcagttgtacaacaatgcgcaacgcgagggcgtgttcatgtcttttgtgaacgcggtttcgtcccgctccgcgctgcccgcctacgcgcacgtgcagttggactcgcacttcaacgaccattatacgtacaacaagctcaacatttacatggtgcagcaggaagccgagcaatggtacgagcgggcaatgaacagcttcggcaacagcaagcggaagcagaagcagcagcagcacggcagcaagcagttgagctccatttacgagcagttgggcatcaaaagccatcggtccgactttggcacagtgccaacggcggcggacaacgacaacgaggcgtaccagcaacaccagcagcagcagcagcagaacaacatgcgtccgttcgccatgcttggcctccgctccaataacgtggacaaggcgttcattgcgctggacgagcacacgattggggagcagacgcgacggatgctcaacggggaggagatgaagccgaactgggccgccattctgtttggccacggggcacagcagcagcatctggacatggcaattgtgcagaacatgggcgagaaggaggccaaaattgcgacgtcggctggcgtgccgttgcgcattctgagcacaacgccaatgatggcaaacgttgagggacgcgtgggggcaaaggcggcgccaaaaatgggaccatctgctgctggtcatgggctgagtgcccagttcgagttcagcgccatgtcggcacggatggcacaaattcagaaaatggtttgccataaaaaataacgcccattttttaccgggacccactcgtcatgttggcattttctcaggaactgatcactccgtttgctgccagcggcgtcgaaagtattcgctcgctgcacatcaatttgccgctgcaaggcgagctgagtttggtcaactctgagcagcagcagggcatcagcatcaaagttaagttgccccagcgcgggactcagttggccagcgcccactcgctgccgttcactttcatcgccaaggcggagcccagcgctcagtttgtgcgcgagccgcgccaaatcatcgccgtccacgaccccaagctggaccagcaacagcgcgaagtgaattccgtgctgggccaaaaggcgttggcactgccgctgcagattcgcggtaaattggcgggttcgatcagagatagagagtggcatatgatcagaggaagtgataaataatgacagaaaagtgaaattgatcagaggggaccatggatgcactgatcactcaaaatatgatcatcggtccgaaaacagggcgactgatcagtaataggaaaaatgggtgggaaatcatgtgactgatcacgaattctgatcagagattaagcctgagatagacagattggcagaccaaaacctcaaaatttggaagttttcgccgtgccccacccattagccgctccctgaaacttttcctgtattaaagtcaggatcggacaattagttacagattgttggtcattagcgcaattgattccgcttaattggctagctgctgtaagtttccgttgttcaggccactaccatgtgccagccgagccgtccaacctgctgcagtttgcgcagctgctgatggccaccgagaacgcagtgcacgtacagtaccaacccaatgaggagagcccgcgcgagttgaccatccgcgcaagcggcgaacacttccgcaaagcggcacagatgcaactgccggacacgccgcagctgcacaatttctacgcacaacagttccacagcagcagcagctgcgacagtgacgactccgtcaatgcagcgaactgtgaggagaacgacgcgacggagcagcaacagggtgaaaacggcggcgagcagtacattagtaacgacaaccagcagcagcagctgaacagcttcatcagcgcgtacaagccgcgtcagcaatacgcacacgcgctgcgactgagcgcgcaaacgagcggtggggcacgggacgcgacggcgcacgccaacatccaagcgcaatgtgacgagcggatgcgctactgcacggtgcaggcggatgccaacaagaaccaacagtggacactgagcgcacaagcacaagtggtgatgccggacactgtgccgtcggtggaacagttgcagcagcccaccatgttgaagcagttcatcgcgctggccaaagcgcagtggggcgaccagcaggacaaacagcacatgaacgtgcgcattcgcggcacgcaagcgcacacggagcagacacgcgcggtgatggcgcaaatccagcagcagcacgagggcaagcgacacgggttcagcgctcaacagcaacgcaaaatgctgcagcgcagcgccttcctgaaccaattccatgtggaggctacgtacgcactaaaggcgtacgcacagaacatgatgaaccgcggaatagaactgctaaagtcggtctacttctggaacaccaaatcgcaactgttgggcggaccgaacgcaccgaaaaacggaaaggtaagcggaaacggacattttgatcatcacccaacaatgatcagaatcactgatgacttactgatcaaaaggatttgatcagaaaacggggcattaaaattgccgaaacccgctgctgatcagttgagcatcaaaaaatggggggaatagccatgatcagacattggtcaatcagtagttatcaaaacagaccgatagcgaagggtctctctaattgatcagcggaactacctcccctccaaaatttgatcactgattagagaatgcgatggcattgatctcgccccccttttgtgccacagatcgccgccacaatttccattgatccgctgcagccaagcaatgccaacgtgaccatccgtacgcctgcgcagcagttgcacatgcagcaaatccaaatgccggccgcggtggggcgccccttcccactgatccgtcaacagagcgcgcagcagacgcattcgctggcacagctgttctacaagcagttcagcctcaaaagccgtgcccaatgcattgttgacggacgaaatgtggacacttttggtaagggggggggggacggcacattagacaaagtcgggaatcaatttgggaaattctcgacggactattcattatccctaatcatttgtctgatgttttaagacggctttgccttcaccgccccgctctcctccaattgcttttctgtgctggccaaacactgcagcagcccaatggaagaacagcatcagcagcagccccaatttgttgtgatgctgaagaaagtgccgggcaaacagaacgccaacaaatcggcacaaaaagcggacaaagtgaataattgaaattgaaggagcgagaagaatttaaaaatgatgacaattttcaaaaaaaggtgctgaaagtgatcactgctgagcaacagatcgaatgtcagcccaaaacagcgcagggcaaaaagggacaaatgatttgcaaagtgaacggacagccgatcagcggggacgagcagtgtcaggacgagctgcagcaccagcagtgcgtgcagttcaacgacccacgccagacggacgtgaccattcgcacggggccaatcgcagtgcgattcaacggacgcaaggcgtggctgaaggtgtcccaggcgtacaagaacgcccagtgcggactgtgcggacactacgacgacgcggacgagcaggagcaggagttgaggatggcaaatggccaaattggtgggtttggagggcttaatttggccaaattggtggatgaggtggaccagtggaccaagcagaaggcggcataatggccatttaattgggtggccataaatgagcctaattggccataatgactgaattgtccgacgatgtgacaccaaacaggacatgtgtctcgtgtttggaatttcaaattgcattcaatatcacaattactgaaaactcatcattataatcatgacactttgggagatttcagcttccaatttggtggaattccatcgctcgtacgccttgaaagacgcggaacagtgcacgcagcaggcgctgaacagcttctacaacgaagagcagcaacagcagcagaacgttgcttacggtgatgaacaacagacggacaatttctacggccaatacaatcagtggaaaataaccaatgaaaatggtgaggagacgaggagatggagcagtacagcgacagggaggagaacaacaacgacagttctggagaagcggaagaggaggaggaggggcaaaaagaacaatttgatggccaaattgaggacattagcgacgaaaattgggccggggaagaagaagacattgagatgagcggagaagagcagccggagaaatgttgctgttgctgtgccaaggagaaggacgaggcacgtaagcaaaagtgtcgaagaaagtgccaacagagcgacgaatgccgaagaaaatgccaacagaaacagtgccaacagcagcagcagaggaagatggggaagaagcagaaacagggacaatcttcggcattggagggacaatgggaaggtgagagagaaagaaatagagagagagagcggatagggagcatggaatggggagagagtgacagagagagaaaggtggagagaaattaagatgagaaaaggggcagaagggagagagaactctgattaatcgatttgctggagggagattgattgaacgttatcaatgggatcaaccgataatggtgtggtatcaatcaattaagcacaattaggtggaggaagtgataaaggtccaattgagaaatgtgaccactgatcagatatacttttgtccgattggaattgcttttgatgcattttgggttaccccccccccccccc

SEQ ID NO: 5946 - DNA, 1288 bp, Heterodera glycines
cccccctccccttcaagcggttatgccgacaatgaacaccaaggtgtacgagcagaaccacgcgctgtgctttccaccgagccggtcaagcaatgcccgcgcggcaccacaacgaacggcggcgaagaagccgatcagcagcttagcggggaaaagccgaagcgtgtccactttgtgtgcatggaccgcgcggagtcggaggcgcgccgtctgatgcgccaactgcggcgcggacaacgctcggtcaaagtcagcagcgcccagggcgagtccttctcggaaatgatggacgagccgcagcagtgctggcggcgccggaactgaacgcggacgaatgggacgcggagagtgcgcggagaagagtagaaattgatcattagtcagtcaacatacctaacactctccgataacttcccccccccccgtctaatcagtgatcagtgtgatcaatgaccgtaataaaagtgccaattttattttgtttaaatgcaccgataaaataattgtagtaaaaaagaggcgtttctggtgaagaataaacaacattgagaatacaaatttgaatgtaggcataaaacaacgagaaaaaatgggaaatgataaaattagaaacaaaaaatgccgcaaactttaaaaaaactttaaaatatgtgaattatgaatttaattgattccccccccccgctctcctcgacgcaaaaaaatgagttttgaaaaaaaattccgaagcattgggtaatattgaccagtgatcagaaaatacaaaagctgccgaagattaatgaccataacaaatgatagaaaatcacaacagaaatccaatccataaaattgctttttgaattattttaaacaaaatgaacaaattgagagataggaagaaaaaagccaaagtttaaaacaataaaatgatatgattacatcgtttgttgttaataagaaatagaaagcgttttaccaattccgtcatattttgttgccctttattaccgtaattatctccattttgtggcattccgtcaactttttttcttgcgcatttgacaccaaacgatggtgtaaaattgtgcagagggacaacgaaaagacaatgcacacgataatggccgaccaaattggcacggggccgtgccattcataaattgcactgaaaatgccaatttgtacataaatgcatgaattgtgccatcgcatttgttaattacccaagtacaattgggaaaaccacggttaacccgtcactgcatacaacgaacagtccctgcattgtgccctgagggaagaatta

SEQ ID NO: 5947 - DNA, 1005 bp, Heterodera glycines
gctccctttgttcgtccgtacgcgaatacgttttgtatgcgtctgggatgattaagtctgtgagtgtgttcggaactggtggcggtgcatcaatttcacgtcgtacacgcctgattatctaaatatacaaatatttgaggaaacataaaaaactatcacttgttttgtcgcctgtttggttgggagttgcgcaaggactggcgtggccacattctgcagtgccaaagagcgaattgtcgctggtggttccatggtttgttccgccctgcgtttgattccagtgatcactcgaaagtgcttccattcgagctgcacttggttcacactggtggttcccaacttcacgtaaaatgcggttgtcgaggtcagtgtgaaggcgtcctttacaactgatgtcttttgcgtgatgatgttcacacgcccaaaagcgagcttcaccgtcagcactcggcttgtgaaaagtgtatgaatagccattgtgctgaagcttggtacggttcctttttgttagaattgcttccattttattatctgtaacattaaacataaaatcaactgacttctaattcatgataagcatccaaccattgaaaatctctcttctattgtcgaaattcttaccaaagatttttcgaaaattttttggtaaggaaatgaaccaaataccttggtaaggaaacggtggtaaggaaacggttggtaaggaaacggtggtaaggaaacggttggtaaagaaacggttggtaaggaaacgattgggaaggacggtaggggtcaactccgtctggccaactccgtctcagcaatgttcaaaaagctataacttttttctttgttggccaaacttcacaatcatggtatcattcgaaagccctaaatgtttagaagatatttataagctatttctcagtgattaatcagctctcaaaaaagttgtcagttgaaaaccgcaaaaattttctgtaatttttagtaggctaatagagactgtgaagagctttcgaa

SEQ ID NO: 5948 - DNA, 2013 bp, Heterodera glycines
atgaaccaaataccttggtaaggaaacggtggtaaggaaacggtggtaaggaaacggtggtaaggaaatgagtcgatccccccaaattcaccacaccctcagttgtcgccacgcaataaaatttttttttacctaccaatttcccattgtttatgaatggcttcaaaattctatagcttagatttttatttgcttaaaattaatccattcgtcgggtattattttttaacttacatacctacctaacaaataagttagaaaattatgctaaatgaaagaaagttgaaaagaaacgtatgttttacatacgctgtcatttctcatttgtataattttctcgcgttccgctgaatagacccatagtgaatctctcacaagtcactgtttatagtttattccgtcaattgtataattcttttttctttccgtcgttattggagcggatttctcgtttccattcacagtagtgaaaattaattgatctgttctctcgtaatgagtcattttcaaaataatacattgaatacaattgttttcattttactttgaaccaactttaattgaacttcacgtccaattaattgaccaactctcggtttttagaccttttttttcttgattgaaaaatttatttggacccgtaaagcgctggaaacatccaacaatgcaccgcttttttgcttgaagcgctcaaaagtgacgacgagtcccaagggcatttgcagactcgtctgctggaaatgaatctgatgtcaaatcctcaagtggccgatgctattctgggcaaccgaatgtttaatcactacgacagagcctcgattggtcaattatgtgaaaaagctggtcttccgcaaagggcgttggaacatttcaccgatttgtatgacatcaagcggaccgttgtgcacacacaacatttcaattcagaggttattaacctattcgttatttttaaacgacaattttttcagtggcttgtcagttattttggccgtttgaatgtgcaagattcgttggaatgtctcaaagccatgttacaagcaaatctgcgtcagaacctccagattgtcgttcaaattgcgtccaaatactgtgaacagcttggcacgcaatcactcattgacatttttgagtcgttcaaaagctacgagggacttttctattttcttggttccattgtcaacttcagtcaagactcggaagttcatttcaaatacattcaggttccttgagtcgtccattttaatttccatgtaaattttcttaaggctgccaccagaacaggacaaatcaaggaagtcgagcgcatttgtcgcgaatcgaattgttatgatccggagcgtgtcaaaaactatttgaaggaggcgaaattggctgaccaagtgcttttttaatctcttctatttgtaaatgtcaaattttgtttagttaccactcatcatcgtttgcgaccgccatgacatggtccaagatttggtgctctatctctaccgcagcaatctcatgaagtcaattgaagtttttgtcagcaaagtgaatcccaaacgactgccaattgttgtgggtgcattgctcaacgttgactgcagcgaagaccaaatcaagcagttgattcaaatcacacgtggcaaatttgacatcgatgaactcgttgaggaagtcgagaagcggaaccggtcgggcttttggattacatcctaccggtttaccttttatttttagtctgaaacttctgaactcgtggttggagagtcgtgtccatgaagggaatcaggaccaggcaacccataacgcactggcgaagatctacattgattccaacaacaatccggaacgctttttgcgtgaaaatcaattctacgactcgcgcgttattggcaaatattgcgagaagcgcgacccgcattacgctcttttggcatacgagcgcggtcggtgcgattctgaactcattgcggtaaagaaacaattacaatttggttgattggtttcctttttaaaggttgcaacgag

SEQ ID NO: 5949 - DNA, 2443 bp, Heterodera glycines
ttcaaaatgtttaaaacgtatttgcggccgaaatagagtggtaataataaaattgtggcttttaaacaattattttagtgctcctaactttactatttgttattttgttagctgttggtggtaaaacggagataattaatgttgatttattagggtcgtacgacccaaatgcaactattggaggagctacggactgtaatagttaattttttttgttcgcaacaataaacaattttggccttcggcttggtagggtgagcaagaagaaattggggattttgtttattgcacagaaaaataatttacaattaatttggtgaagggaactttttgtattgggggaaaaactgttgctgaacggggggaattcgacgagaaatgagaagaatgaattaatgcccgaggaaggtatgatttttgggtgggatttctcgggagttccttaattgctaattagtgtaagggtgggcgccttttttgtttggttaatggaaaggcggtaagcggaaactgcccataactttcgtctaagtaaccaaattaaacattcttgatatcattcgatagccctaagggttctctctattacttcacctaattttcaaaaatttgatcatgtttggacaaagtttggccaacagtactcaggaaaccaggttatcagaatatattgatcataattttttgaaacttagccaaatttttgaaattttgcaggccagaagaaaacacttagagctatcaaatgatatcaagaaaataaaaatttaaacaataaattttttcattagacataaaataatttttttcttcaaaaaataatttgttagaaccacaaaaattttttgaaattgaagtaagctaatagagaatccttaggatttcgagtgatatcaggaatgtttaattttattgcgtcatttttaagaaattgcttaaaatgaccatttttcttgtattttttttcttgatttcggggcggggggggggggggggaggggttagcccccacctccgccgccttggctacgcccttggtacccttttcaagcaaaatcctgggaccatccctgcaccctcccttccgttcctcactcggtacaacccgaaacatttagggaattctatacctttgctaaagaagaggtcgacattgaatctacaactgcaagcgaccaaaatcaaaatcatcctaatccaatattttttataatatttattagtaccatcattttattatgctggttatgctgctggtacattcaatacaaaaaagggggccaaatttggggccagataatgtgcctaacactactcatcgggttccatcaatttcaaaatgtttaaaacgtatttgcggccgaaattgagtggtaattaataaaattgtggctttttaaacaattattttagtgctcctaactttactatttgttattttgttagctgttggtggtaaaacggagataattaatgttgatttattagggtcgtacgacccaaatgcaactattggaggagctacggactggtaatagttaattttttttgttcgcaacaataaacaattttggccttcggcttggtagggtgagcaagaagaaattggggattttgtttattgcacagaaaaataatttacaattaatttggtgaagggaactttttgtattgggtgaaaaactgttgctgaacgggggaaattcgacgagaaatgagaagaatgaattattgcccgaggaaggtatgatttttgggtgggatttctcgggagttccttaattgctaattagtgtaagggtgggcgccttttttgtttggttaatggaaaggcggtaagcggaaactgcccataactttcgtctaagtaaccaaattaaacattcttgatatcattcgatagccctaagggttctctctattacttcacctaattttcaaaaatttgatcatgtttggacaaagtttggccaacagtactcaggaaaccaggttatcagaatatattgatcataattttttgaaacttagccaaatttttgaaattttgcaggccagaagaaaacacttagagctatcaaatgatatcaagaaaataaaaatttaaacaataaattttttcattagacataaaataatttttttcttcaaaaaataatttgttagaaccacaaaaattttttgaaatttaagtaagctaatagagaatccttaggatttcgaatgatatcaagaatgtttaattttattacgtaatttttaagaaattgcttaaaatgaccatttttcttgtatttttttttcttgatttcggggcggggggggggggaggggttagccccacctccgccgccttggctacgcccttggtacccttttcaagcaaaatcctgggaccatccctacaccctcccttccgttcctcactcggtacaacccgaaa

SEQ ID NO: 5950 - DNA, 6156 bp, Heterodera glycines
gaaatttttttaaaaaatggaaaattttttattaagggattaacagtttgggggcaattttcgatgggaaatacctttcaaatacgaaattgggggcagcatggaacgttggatggaatggggagagataatcaatcgagttgggcgtccagtaaaataccgaagaaatatcacgggtaggttccggaaaaaggaggagttcatcagggagcataaagtttcaaatatggttttgtcatggtggcccactagcgcagcaaaggataaaactgtacgagtacaaggagcaggtctacagggaggaagggtctaagctgctgtattgcgatacaggtgggcaggaataaaaagaaaataaaaaccaaaaatttagattctctagcttttgctcatcggaaggggcggtgtccgttgaaggaggggaaatttttggggtagaacattatttttgaaaattttctataaacatttgtttagtgagatgactcgagagtatgctgacagcgaaattttggagtttgtgtccgcgggcccgaaacagtacgccttgaaacatagaagaaagaaggatggtgtgatttggcataaaaccaaaatcagagggatgacattggatagacgaaacgaatttaaatatgaattgttcaaagagatggtgctggactacaaagaaggggtaaagaaagtttttcactacccggagaagatcgggccaacaaacgacttccgggttctctcaaaaaatgtgcaaaaagaatatacgccggtgcagaaaaaaggaattattgacgatcattttaatgttttaccctttggatattattgataatttttttggataattttgtctcatgtttataacatttaatattttaaattaatcaaatttgtttcattttttagaatgtcaaagaaaaatttccaagaaacttcaaaagaaatccgccgctcgaaaaatacaaaaaattatttcaaaaacagtcctaatttggaaaaatgtttcgaagaagtggagagtcacataaaggaaaataaaaaatttgggataaaagagcacgtgacaactttctattttaaatgccccgaaaatgaagatcccgaaaaaatgtttaaaaaaatcctgaaaaaattaatgggggatgcaatgagccgagaagctgagccgggctggaaaattgagaaaatttcagtggacctttattgcagtgccctgtcagacccagtgatcatccctgcccgccccttccaacaatcgaacccagacattgttttcaacgagttcatgcacaggcagcaatcatttggggaagtgaatttgttagaccagagaatttcaataattatgccacttattctttccctgttaaataaaattttttcatttttccctttcattattttttgttcattccattattatttattcgagttttttttctttattaatttttcagttaaaatgtactcgtttcaaaaatattttgaggaggctctcgaaaaagaagattttttctggcagaaaaacagagcagaagtggaggcattgttaattgaggcttcaaattataaaattataatacacagggactacgaaagccgctattctgattatattgccacctatcgccgcaccccactcttctgtttctgcatgattgagagaaatttaagatttttttacgacacaggaaccgggacgcccataggaagggttacaaccgtgctacatgttaccgttgaggcgagctatacaggagagggcttcatttcgcctatgttttccttttggttttattgggagggcaggagtcaaacaacaaacgaatctttcacgagccgtctttatttgtacactgtttcgatgctaagagcaatgggcaaagcctggggcagagaactacttttgaaccctgttgaagttttaattgatatgttctaccaacgtatagataggttggaacatagaaaaaacaatttaaaaaaatattttagagatttggtcggatcgtggtcattgttctatagactcccaccctcactttttgacacttcacgccgggtggttgcggagaataaactggaagaatttttaaaattaccatcattttttcgcatgcttttttataataaatattaaatgttcatgttgtttttaaagtgaaggttttgacccaaatatttaatcaattttaatttattatttttggtagaattccagaaaatgcaaacaatcgctgaaattaaaaatttcgagattattgaaggcggaagagtttttattgtgagagcgagaattgagaacgtagtacatgcggagtacagggtttgtattaaaaatgaaaaaaatatatcagttttttaaggcttgcgttttatgccgtaagggggcgtgttcatgtggcgttgagaaggcactgacaccttatttgaaggtgtctgtggcagatgatactgggattttggaaaatgtggcaattttttggtgtatgtgggaagaaaaacggaatggtaatgttttaaagaaaaaataccattctaatttaaattcaggaggagttgagaggattgtctggggccgtgtgcactatgaaaatcggcgcgagggtgaaagaattcggagggaagaaggggatctattactctttgattgatattgtcagcctttaaatctataaataaacttgttaattttttcaaataaaaatgttttacttaaaattatttctagtttggttcttgttggtcggaacggaaagttgttgcctttcaaaagaagaaaaagagcaatttaccagtgcccgaagaactgtagaaggcgtatttagagacataattaggttagataccgaagcaaaagaattttctttttctgcacataataccatggttgaagcccaaatataaaaaataaaaaccctgataaacctggtgtaaatttttggcatagcaaattattagatggagttttaaaaattcatgccctatttgacaaaataaaaaaagaagaaaaaaatatgaaaaatattaaaaaaggtatggaaaaatgtctagacagaaaagatttaactatgtgtcaagaattagcagaagaggccaaacaatcaatcgaaatagccaaaaattatcggcaagaaattgggcatatttatcggaccgcttactcgcagcccgatttaagcattggagatttggcaaataaactaaaagaaacaatgcgcgaaaaccaaatacggtttgaaaggcaaagacctcttgaagaatttagggatgaatttattgcttataaaatttaagaaaaaaataaaaattcgagaaaaggaaactgcatgagaatcaaaggttgtgggacataaaccaaaaacaggtgaaaagggaaacaggtgaaaatagatgaaaaggaaacaggtaaaaacaggtgaaaataggtgaaatttcacctaaaaatatataggggcgtgtatttaatggggcatattagagaatgtctcaactagtatcaataaaaagtgccaaaggaaaattttgtgatggttatcgctattacaaacataaaacgaccaagttcaaactttggtggaaatgtgaacttaattcacatgggtgccagggctggggttttgaaaaggaagggttttttacaatgacgcgccgacacaatcatcatccagacactatattgattgaaatcgaagaggaaataaaatatcataatttttctgcgggggcaaaatgttttttgggtgacaacaagaaatagttgatgatgctaagaaaaatccgagactccaaactgaatttagagatgaatttattgtttgtaaattataaaagaaaacaaaaaaattaaaataaaaaaagatgaattttgaaaaatcagaaaaactaattccatattattggaagctgcaaaaaaagagacagaaagagcatggcgggatgtagctacgctaacggatgaagtaagcgattttgccaaatcttctcgcgaaacacttaatcgtgcaataaaatctagagaaaaggctccttacgctaatggtattcgagaattatatcttagaatgtccgattcaatttgggaaatcttcacaatcctggacaaaatcaatttggagtcagaaaaagccgaatctacgtggcgtgatttcgagagatgcaaaacatttgaccaggcaacaaagctcgaggaacaatcgcaaaattcattaatggaagcccggagattacatttcgagtcccgaagggtgcagagccaaatgttaaattatgaaaataggctccaaacaattgtttgggaacatatgggtatataagaataaaaaaacgaaaagggaaacactcaaaatggaagaatgtacaattatcgagtctttatgtcatgttaatccaaaatttggctttaaaaaatataaaaataaattttattttaaaaatcctttcctaattaatacggaggaaaattttaaaaatatactcgcatcaataatcgaagaaatttataaaaaggaacaaggaaaattcagaagtattttgaagctttcttttggttttgagtcgttttattgccctcttagatgccctagcgaaaacacagctgaggctttgttccaacatatcttattaaaagaagaaaaatattcgcttttctatactttggatgatgtcataacgctagaagtaaccataatcccagatgtcaacaatagaccaaaaaattaattttataaaaaacaaaattacaggaaattggaaaattgccggaaagattgttaaacgttcacatttgttagcaatttttgcaaataaactttttaaacgggtgaaaattttctacatagcggcatttagcgcgccagacattgaaaatttatatttttcattcttagaaatgctcgataaaattcaaaaattaccaaattttattatgtatgaatatagaaaacagtctttagctatgcaaaaattagaaattggcatcaaagaacgaaatatatttaaatgtcaagaagcagagaatttattggacctttcttattcaaagataaatgaattccgagaacaagtgcaaaattattaatttgacatgaaaatgttatacaataaaatacgattgacagctattaaacatttatttaaacccgaaaagaaattttttagtccgtttcaaatagaaaaaaatagagaaattttttattcattatttcggcatatctaataaaatcgcaactttctttgcaaaaaaaatgaaatattttcgtaacataatataatcgaatgatttttagtgtaatatttgagccttacttgtgcaaaagaccaaaaagtttttgcaagtttgaaggccattcactaatttcgtttgttgaatctgaactaaattagggttacgtcatgtattacaaaccaaaaatttgagtatttaagaagaaaaatacacataactcatctgccgtttttcaacttttcaacgggtatgggttccccatggggggggacttggattaatatcccccgctaacttatatttaatattattttagatgtacgcccaacaaaacgacatgcaaatttcggcgcaaggagatgatgtgttgccactgacagcagcagattttgcggctatggatgaagcgcataggcaatgggagactgaacggcggcaacgagaagaacaacggcaaagagagcaaaaaagcgcccgaaatggaagtggtctgatgaatggatggtgcgccaaagagagtgggaaaaagaaaaagaagaagaagaaaaagaccccaaaaatggaaaatggaaaaggaccagcaatttgaaaaatggaggcggcgaaacgatgaactttggacgaaatcggcaggtgcgggtggcagcagcagcagcaacaacaaaaaatcggacgctgcccaatacgtttgggattaaatttttttgacttgtttgtgtttattgagttttggcgatttctgatttttttggctattttttttggatttttatgatttttttgcgatttctgattttttttggttattttaggaatttttacgaattttctatttttggcattttttttatcaatttatcgtgaattttttgtgataagcaaagtatgtatattctccctactttaatgatactgtggtggaattactaagt

SEQ ID NO: 5951 - DNA, 2893 bp, Heterodera glycines
aggtgccatacactattatcattagatatttggccataattggatattgaacaaacaaaaaaccgcgcaaatagttttccaaaaaaaaagtttttgtccaattatccatggcatttttggatagctaatatttaatatgagcactatttatccaatatgcgtgcttaatcttaattaaactgatttgtttacgtgggagaaacatgaattaaaaaaatgagcttaaaaattttgttaaattaataaataataattatttattgcgtgtctaattgctcaattatataaattaattagaagtcacaagaagagtgcattaaggaaccataaaatatttataatttattgttatcttttcaaatggtggaaaaaatgctaattgttctgtataggtcgcttcataaattatgacaccatgcaatttctaaaaacattaagagaatgttagtagtgtaagaccacgattccctgtacggttcagtaccggacatttcagtcccagattttctgacacgtttcagtaccagagtcctggcactgaaacggcctttctggtactcaaacggccatttgtccccatggttgacctattgtccctttgtcgaccatttgtccgttttggatcatttatcccaggttgaccttttgtcccttttcgaccatttgtccttaaatttaatctgctaactccgcgcggaactgaacccaggttgtgccgaaaaaagcccaacacactatccattatgccactgatatgtatttgtgctgagcattttatttctgattaaataattcatttcaaaatccaatcacatggtgtcgggatcgaactttttaccccctctccgaaagaaccaaacacactaaccattaggccacagatagaccaaattacttcgtgataaatgatgtataaacatcattataaaattcgttcgccatttcttagaagagctatttcaatgatcaatgatcatatttaaattttaaataggtattctaaattggctcaattttttcaatgatcaaacaccaaaagttttaattttaaaattgtgcagacatttggcttttcaatgatcaaacaccaaaaataaatatggatttgctctccgctcacatttcgtaaaatcaaatgcgacacattttccacccgccccaaatctgttcgcccgcccgcctaatttaagtgatcaaagatcaaattctctaaataaggattttccccccctcccttcacagtttgaaaaatcaaatgcgaacattttccacccgccccaaatctgttcgcccgcccgcctaatttaagtgatcaaagatcaaattctctaaataaggattttccccccccccctcccttcacagtttgaaaaatcaaatgcgaacattttccgcccgcccaaatgttcgtccgcccaccaaatttaagcgatcaaagagcaaatttcgcacatttcatttccatttctaaataaggaaagggcaaacgaacgtgctcacccaaatttcggcgtatttaaacgcatgggcacgcaagaaaaaatattcattgtctctttaaaaaatattttttatttaaataaatactccttaatttaataatttatatttaaataatttttaaatttatttgtatctttgatcatcaatattgtgcattatttttaatctcatatttattaaattaaaaatttattaattattcagtatttatcatttatttttattgttcattttattattaaaattaatttaataatttattatcatttaaatttttaattgttgataggatatttttgtgttcattttttattattaaatttaatttataaattttagtatttattatttgattttttattattcattttataatattaaaattaattttataaatatatttatttggcattttatttttattgttctttttattattaataaatttaatttatgtatattatttttatttttattcttccttttattattataaaaatttaccattttattttcaatgttcattatttaattagatatttaattaaatttataatttaattatttagcatttcctattttccaatttatttgtacctatttagacaaaacggcggcagatattccgccaattcatcagcaattgaaaatctgaggtgaaggacaatccaccagtaaatccatcagtatggacaatccatcagtaaaatttttctgtacaaaaaattaaaaaaataattagattttacattttatggaatgatattttccgaactgcttattcaaaatttttaagttaagccctaaatattttttgaaaatatgggtaaattaatgcaagttaattaaaaaatcgccataaaatgtgccaatttgtggatgcagcaccatactgtttaaatttagcaattgaaagccttcatcattataattatttttaaatataaattacactgatggagtgtcaaccggtggattgacgactattactgacagattgtccttcacaacggattatccattgaatgactggggagccatagggccagtctcgataaaaacaacattcctgtttgattaataaatagctcattcctttacaatattttacatttgaatgattttacattctaataataaattttgaaattattaaattaaataatttatattaaatgtctttttaattagccttgcttcggctttctcgtgccctttggtaacttaaagtctatgatgaaattagtggtataaatattttatgtaattttcttcatcaacatgtttgtttggttttatcactacctgatacggattgaaccaatttgcaagcaaaatagctgttgcgtgaaggaattaaactggaatgaattttgtaattttgaaaatt

SEQ ID NO: 5952 - DNA, 4634 bp, Heterodera glycines
  unsure (1)..(4634): unsure at all n locations
aatcccaaataggcaattacaaattagtacgagattggcaaaaaagacatatttcattttcaaattggttggttgggttggcnncgtttttcctccatttccattcgctttctgctgtttattacatgcacacctcagcaaaccaacaacaacggcagttttcggtctcctctgaaagtgcaacagaatttttcggaatttcccagcgttaagagaaacaagagaaattcaaagtccaaatttttgaatttttactgattgaaagagctataaaaattcttagcaaccgccgtttttcaatttgatgtcaccaattgtcatttgcacaattttgagccataaatttgatttttcacggggtctgattattgaatttaccgcgatgatatttgtacggttttagggggatccgtgtcaggttttagctttatttttagggcttttgcttgcttaaacaaggaataccaaatgcaggccctaaaacatggttttcagtctcaattacctattaaatgacatttgttggacgcgtaaaatggcacgggacggttgaaatgtcgtggtgattgaacgcctagctagaaacccaaaaaacaacagtatcacataaattttattgtccgaatacattcatacaacatatttatgtacacataatgattggttgttgcattggagcacatacaaatacaatacaatatataggacatacatacatatatcattacaacaattacaatggtttgatcactgatatggacagcgcatatagcttatcacggacaacagatcagagggtgataaagcacctacaaatgatataatttggggggaggggaacagcgtcatattgtggggatcagcagcagttagaaggggagaagcgtttgttgctcgaagtccatcgttcgttcgttcatccacgggggccatcctcgagtcgatcattgttcaccgctggggctcacgctttctgcttcttgtccttcttggagccgccgcccgccgatgccttggcccctttggcgttgtaaatcatgccacagtactgaaaaggaaatgggaaacaaattagacacaaaacgaacacgaacggaggcaaaagcgggccaactaaaccaaattcatctctgaaaggcttctaaactcaattttcggtttctaaaatttgattccgtctgacatgaattaaaaaacacgctgaaggtaagccaaattcattttccgtgcttttatgagtctcgtattcatcctttttgaaagctcaatcccgagctgattaaaacaacaaattttgaaatggatacaaatttgattgggactcaaaaaatgcagcaacaaaacaaattcccccaccctcaaacccaccgctccaccgccgaacgcaaccgcagccacgaacatgtacaagaggaagcccattgtgttgttggagagcagcagcagcagaagtgatcggattcgacgtgtgcacgggcgatggatgtgctgtgttgaagcgttgcgcaattgtcgtcgttgctgattgtttgttgttgttgttgttgtcgctgtgaagggaatgagtgaccaaccgacattttcgctccttttatacacattttttcagtcgaagttttgcctttaaaatttttagttctttgcgccaatgtctatttaaaggacgcttttctcacccgattgctccattttaatttggtcttacatacttttttggcatttatttgaatgcaaaaccatcctttctgttgagctcttctaatctttgttcggcgtttcgaagtacgtttttcgccaaaatgtgactaggtgtggatttttagttacgaaaatcccaaataggcaattaacaaattagttacgaagattggcaaaaaaagacatttcaattttcaaattggttggttgggttggccccgtttttcctccatttccattcgctttctgctgtttattacatgcacacctcatcgattcaaatgctattttctgttgaaaagtcccaaatttgcactgattttcctcgtggtttcgagaaagagtacgccattcttggccaaataaagatggtattaattaattctaaaataaaaaatcttccattttcattcattttttgaatgctctcaacgccgattccgaaaaaaaaacttttgacagaaatggacaattgctgaaattggctgccaacttaaccccccattgattaatatgaatattgctttttagttaatttagtcatcaactttatttttaaaaataaacgaaaagtgcgtcgcctgaaagttttatgaattttttcgaatagctgtaacggctaaacaaacataaatttgtttagacaatttaattctgatgaaatattcgtgtttaatgaaattacatatttatccatgcttcaagaaattcaatgcatttagctacttaaattttaaaaatatgcatttaattttgtttccaattacttctttttcctttcatttcacttttatgtgcaacaattaaccttagcagctgacacctgcaattaaattatgtcttaattacccaaattagcaacaaaaaaaacttgccgttgctttgctccttgtagtaagcttggatcagttttcctgaggttgtccagtaggaagaggaaccgacctaaataaaattacaaaaatttggaatgtttccatttcgagaaatgcaattggtcgaatacagtctcggccattggtggccatcatttcctttccgttttttggcttcacatttcatttttcctcacattgctcgccgatgcgctggtggtcaatgccgaacacgactcgcccttgttacagacggaccagttacagtaggagattttgtagccgtccaaaaaagaccaccattcgttcatggagctggtcgcaattgtgccgtctcagaaaaatgggcagacctggcaattagtgcaaatattgttttttaaaatattatgaccccaagaaccactttttgtgtaggccgtcttgagttttgccccgaggccagaaactgtgtgagtgccggcgtaaaagtggaaagtgtacctttggggaagtttgtgtcaaacagattagctaaaatgatatcccaaaatatatgacatcatataaattcacattaaatttgagtagccagtaattggatttgcagcggcaacgtccacgtcctttcaaatgttcgttttaacaattaaatttaatggaaattattagggtcgctacttttagtgatttaactaattttttttgctcaattgtttcgaagaaagaagctcaaaaatacatttctgcgttgaaaattttcgattcggatctcactatcgcatattcgtaatcagcgacctcgaaaaccccccataaacatgtttccaagacttttcagaacaaaaaaaaatgtttcttcaaaaaggggggggggggggggtaccatctatagtattacccatacaagtgtcacaattaccatcaaaactacaatttattgttcacattttacatacaatatgaaacggagttacattggaccatacataaatacatgtgtacacatatataacacatcaatacaattagaacaatatgatcgctggtatggaaagcgcaaaatttgcttacagagtgataaaacacaaatgatgggggtaacaacatatattttggggatagcatcggtttgggaggggaactgttgtcggccattccatcgttcgtccgtcctcatctgcggcggcatcattggctcttctcactgctggagctcttcgatcccttgtgtttcgccattttttttacctggcgccatagtgattccgttgtagtacgacgcattctcctccggtggccaacggacttcagcgatgcgaatgctcagtgccgaggctcctccagcaggcgctgctgatttcgattttctgaattggcatggattgttgtttttacggatcagaaataaaatttgtggccattttgcattttctaagggatttaaataatttgtggcacataaccgaacaactttaatttaattaattatccaaaaaatttcaaatttgttagagtttgaatgcgagcagattttggaaatgtttttccttattaacaatttccaaaaattgacaccttcggagaattactcacaatgatatttttgggacaaagagaaaaggaagaaaaaaaatttgttgattaaaaatacaaaatttccaaaaacactgagcctaacaatttttaacaattttcattttagtcgaacaaagaaatagagagaaattaatgatgggatgaaaatggaggaagagaagagggagcaaacagtgcactttccctctcacttctcctctttctttgccgacgaaatactattttcttccttttcattccttctgcttgtgaattggacaaatggttcgcctctctctcatccccctccctctcttctgtctctctctctttcattttttcgcctttatcgctgcatttctgccgctgctgtcaaaataagtcaatctttgcttatgatttcgtatttgaacgaaaatcgattataaaatgtctaaatgaagattcatagttaagaatattttagttatgaatttctgacataattggaaaactttaataaat

SEQ ID NO: 5953 - DNA, 6198 bp, Heterodera glycines
atcaaatgcattcaaaatcaatgtttttaaatgctttttaatttgggttttattttatgcttttaatttttaattttgccggcttataaagaccattccgcccgctttccaaaatttgatttttaaaaatttccacattatttctcaatgaattttgacaggaattaaattggctttgctgaacaaatacaatttcatggaaataataataaaatacgggtggccatctcttttaacaaaaaaccattctcaccttgtgatcaaatttcaaattcgaaattgaataaatgtttaaacaaataaaattcatggccttccaaattgtcaaaagctgctgaatatttattcgataaaaatgatattattagtagaggtgcgccgtgactgaaaaaacccgtgaaccgtgaccgtgaattgagaccgtgaccgtaatccaaaaacccgtgaaattcacggttttcgtgaattttttgagtttaatttttccctgtcggcgaattttttgtttttcactgtctttttttgtggtataattttccaaaaaaaattttttgggaaacgggggtccatagcagggctgcacgaaattgcggattgcggattacggaaattgcggggtttttggaacccgtaattgcggattgcggatttccgtaattgtaaatccacttgcgtgcagccctggtccataggcgccgatagaggccgccgcaaaaattttaattcaatttgtgcacagattttgtcaaaaatggcaaaattttgcgaatctgaaccaattttttatgaaaaatacgcttttggaagcctggcggtgccgataggcgccgccaggagaaaatataaaatttgagttcaatttgtgcacaaatatgtccggtaaaatgagcgaattttgcaacattaatcaatttacaaagacaaaaaacaacgaattttctcatcattttgcgtccaaatcgattccgacctttttaaatgattttataagacatattacccaattttaaaaaaatagggattttagtggaaaatttttgaaaatttgttgggatttgttaactgattttgcccaaaatagctttatttcgtgcgagttttttttaatttaatgagtttttatttaaagggtcatccttgaaactttgctttttatttgtttttcgcacaatataggtagtttggaggggagggggccggcggtgccgataggcgcgccggggaaatttttgaaaattttgctctgtttcttagcaaactttgcccaaaaaagacaaaattcctctatgaaaacaatatttatttcataaatattcaattttatccagtgtaaatttttcacggaataaccgtgaattggtaccgtgaatcgtgaccgtgaccgtgagtgaaaaaactcatgaaattcacggtaaccgtgaccgtggttcagggcgcacctctaattattagggcttctttgttatgtaagaaaaatcgacaaatatgtaaaataataactcaaactaggtttagattcatcttttgcactttaaaaattcatttttgaatatctctttttttgaaaaataccgatttttaagggtacatttccagaaatttttttttaattttttacaagaaatttttataaattctcaaaaatcctcaaaatatgtacgaaaaatttcgaaattttgggttttaaggtgcgtttaataaaaatttcgcgaaaaatcctcaaaaattgcaaattaattatactaacattaagctgaagtgtaatatgttaaaatgaattgagaagcattttcttgtctccaactctctttcgccctgaattaagaaaattaacacaggaattgtaaaaacactttttaaaccaatcagagttcattattattattttttttaattcactgtgatttccgtcttcagtgagtttcttttgtgtacaattcgatgtccggctcaattcgccctaaaaagtttgtttttaaatttaatttttaaaagtcaaatattcctacccaaatttgtatgaatttccatccatttttgcaataccatcggtttgagaagaatctcttaattgcaaaaatatttattgaattagattatatgtattattatgtaccagttgtgtttggccgtcggttttcatcaatttccataacattttcaatgagttcgcgcattcccgacgtaactgtggacgaaattgggccgtgttgaccctggcaattagcaaattaaactgtaatttaaaaataaaaacatattatactcttgcaatcctgagcaaaagaagttggatggagtcgccgtcaaaggctttgtgcaacttaaaggatgaattaattcatttatttttataatgcttgtcatttacctccactaactcgtaaagcacacaaccaacggcccacacatccgattttggcccataagcgcggcctattccatgaaatgataataccattaattaggtgatcagaatttttgcaaattcaccaattacataattgtgcgtgtaattaatgctttttgttttctaaattgaccttcgcatatttccggcgacacataattcattgtgcccacaaatgtcgacgcttgagcacatttcgaattcaattcctaacaaaaacataagccagtgaagttctcaattacttattattatttttttttcttttattttattttaccttactgatgccaaaatcgccaacctgaatcattaggggacaaattaccctttttggcaatctaaaagttaaacatgccttgacaattgtcatttttctgttcaaaaatatgttcgctgttttgatatcgcggtgaagaattttcagcgcgtgcatatggtccaatgccaaaacgatcttaaaataaaagtccaattagtgttggctttaattaaagtaggtcatttatggtataaataggctatcacaaaaatcaattaattaattaattacctgggtaaaataataaagcaccaaatcttggcccattttaatgccttttctctcctggatcatcctcaataagcattttattttaatatacataaataatttttattatttaattattgtttatcacggtgttacgacaattgcggaccgtacaaccgcctttatcacctttccattgtgccaccatccaaatattccattaaaatgcacaactgttccaattcaacaaatgaatcgtagaaacggatgacattcggatgggacaatttcttcaacaaactggcttcatcttaataactcataaataataattatttatttataatttgttacggtaggttataattttatttcaaaaattgataatttattttagcttatttcaattgaataaaagcgtcctacatgaaattgcccgcttgtcattttcgctttggcattcaagtgacactcgtttgatcaccactttcttgtttagccgacttgtttcatccttttttcgaagggaattaaaaatacaaaaatcgccaatattttaattttaatataaattgaaaataatttttaaaaatattcgctttaccttataaagtgcacaaatgccgaatgctccgcgccccaaatcctttaattttttgaaatttttcagcctcttctgtgggctgttgtcctctgctgaggggggcaattccgtcgttttcgccgtctcacggcatttgttaaaattgctaatgtcaaaatccatcaaaaagcagaatctcaaaaacaatattttcaacacttttattagcccacaattatgtattagtaaatttgtttattttgttttgtttcgtaattatttcttcgggcgaatttgggttggttggtccgtcagcagtgcattattagttaatgcgacgattatcattgttttatgtattagggaagggataataatacataatgacaattatctgacgggaagacatttcaatggtggaaatctttttgtcgatcgatcagtccccccccccccccccccgacaaaacctaaccccaatcggcggaggttatcaacgccaaagagtgactgactgactgatgatcacatcaccaaactcaatcaacttagaagaagtcactctgattattatgatgatttcatttaattgtttttatctccactataattaatttttcgaattttctcttttttcaaaaccttttgttgcttcatttaaaactcatactaaaaaaacattatttacacgtttaaaaaaaccagtacaaaagcggcaccaaagaaatgatgaagcaaaaaatataattattaattaattatataattaattgagtactcccttcccaaattgccgaaatgtcccctttcttctttttcttcttcttttgcccgttttgtcacttttgccatctttgctctgccggtctttgacatatttgaaacgcaaatagaagccacttatttgttatcccgttgctgttcgcactcgacgtgttttaaccgtgatgagacacttacacttgcgccgcggatatttgcgccgcccagcaaaaatggacttttgcgccgcgctgtcaaaaatattatattcataaaaattccactattatcaatcgacaaaaataactaattgaaaattcgaaaaaattactagtcacaaagattgacattcaattttttaaccattaaatcttaacattgaataggttcatcaaagatatgaaaaaatgattaagaatacaaactaacaaaaaccgaaaaaaaggaattttctgtagaaaccccaattatttttttgcttcgaaaaaagaatgaaattcaattcctttgtaattaatttgctcaataagttattttcatcgattttaatttaatttcattgaaaaaacgcactgattttcaaattttcgcttctattttaccatttttcgcaatttttatgcccttatttatttacctattttgattttttttcgcttaaaatccgccgcttaatgataaggcaatacgaaggcttgttatcgcatatggtcccaatgaaaaccaaaatgatcaagatttgatcaatcattacgtgcacttcaatatggaattgacatgaaaggcttcgaaaaaggaattaataatgaatatctatcaattcttattctataaagcacataaatttattttaatcagagcgcaaatgtcttttttcgctgtacggcgcaaatgtcgttttttttaggcggcgcaagtgtcgcgcgcaaatggcacggcgcaaatgtccgcggcgcaagagtcttttttgctgagcggcgcaagagtcgcgcgcaaatggcgcggcgcaaaagtcggctaaccgttttaacgtgatggaaaaaacgaaatggcgaccgaatatgaacaaattaataattgttatgacgcattacgcaaactatagaaatgcaagtgataattaattaaattaatcaatttgaagtgagattcttacacttgcattttatgaaaatttttttcgaaaaacattattttgaataaacaaataaacttaaaaaacgaaatttaaaaaaatccggacaagaatagatttttatttaagatttctaaaactcttttttgtgatcttttatgagacttttggcattttaagcatctcatcaaatttaatttaatattaaatgcttaattagaatttggactcagcaaaatcccgcgcgggaaccctccaacgaattatgggaaaattgaagattgatcagtggtgatcactttactcttatttccttactattcttctatttgggttggtttcatttttttttactttttgctattttgatctcaacttttctcatccaaaccgaattggtgacagagccaatgctgtatgagtttgaagtgagactcttttgatcaaatgtttatccttgctttttggcgatgatttttatttaaatttttgatcgcgtctttttttatcattaatcttagttccaatagtttttttcatttttaggttctattcctatcctattttgcagtttaggtcctaaaatgccaaccctacttaaatgccctgctggggaagggttacatgataataaatacacacagaaaggggctaacattttaagccaatctctcacttaattaagcttaggttcacaaattattcaaatgtgactgcttaatggatactgagacgcgtggaacgtcaacaactcattttgtacaccaaagataata

SEQ ID NO: 5954 - DNA, 2511 bp, Heterodera glycines
  unsure (1)..(2511): unsure at all n locations
aggcatcattaaacattatcatttttaacaagcatatgcttaatcacttgtttgtttttaagtgctgctcgttgcccaccgttttccggtttgaagctggtgaagtgtcaatgccgaaactgacagaataagcatttttttgggggaaataaacaaaataattttaatatgtattccttcgattttcctttatttgacgctctctttcaggggtgcgcacgggtgagaagttttttttgctacttttctattaatatttacaaaaaaaaaattcttaaggaattttatctccgtatggtgataatcgttccccggtttgactgaactttttgagaaaaagtttaattgccgaatttttttggattttcagtatccgccttttgttgggcttgattctccaagttctgccaactcagaaccttgctcacccccctgttctttattttaattctgaaattaagcagaaattaatatttttttttattttacttaatttaaaaaattttcctgcccttaattatgttaatgtattgcaattaaagcgtcaaatgaataaatcttaagcattacggtttcatttaattacttttgtcaattttaaaaacatctgtaagatggaacaaaatgttgcataaagcgaagtaaatgttgtttcccaatcaagttttccttcttccatgtaatttatgaattcaattatataattatttccaattctttaattatactctgataattgaggtctaattaaaatataaaaatagatttggaagtcaaaatggcgaatttgtcatctgaattgtgggatgaaatttaggtttttccgttttaataaattctagggttacacgggtacgaaacccgggtcccgggtattgccaggtatagaaaagccggtacaaanccgggtccgggcatccggtaaaaccgggtattaataaaatccaaaaaataattactaatggaggtaattttttctttaaaataaaagctcatacttacaaaggagaggtacccaagtgacggtggaacttccgaatgaaactttgaaggtagaagatagattactccccttttgtcttaatttttttttttttttgctanatgaagcttctggccgagatatgaagcttttcctttttgccatatcaatatcatttaaaaagaatgaaaagccaatatgtctgtcactgtttttaggtttatttttcaatttttctatcttcctaaatttttctcaaaaatgctaacaataaacattggagagggaacagatgagaggaggaccaacgaaaagaattttttaattaggaacagaatccaagagattaaccactaagccaaaggagcaattgatgaagcggcttttaaaattaatattaattaaatttaataaaaaattctttcctccaactttgctcaacgatttgaccaagacccccattcttaccagtgtactcttttggacccggacctaccgggtcgggtaccgggtattggattttcaaaaatctgggtccgtgcccgggtagtaaaaaaccgggtatccgggtctgggacccggttgggtacccggaccgtgcaaccctaataatacgcattaactgcgaacagttcattggaaattttatcatagcaaattatttggcaaaaaattgcagtagggatgcttgagcaacaatatccagatcaatcttggaatccgggtggtccaggaatgaaaactgaatttattcttttcagtttctatggcgaaaaattgacctttttgattgaaaatctgtaaagagtgagtttaatttattttaatttttttgtctgcggcgcagattgaaagaattcaattatattgaaattgttcaagaataattggttaattattaaattatttactataattaaactaaaatgataattttttttcattccgttggccgcaattgtcctgaccgcaaatgtcttaacaattttttatgttattttcaaaattcgacaaattaaaaaaacgcccagaatcgttttccggttcgacaaaaatttaaattctcggatgtatttaaactccaaaattggttaaaaaaattcgtataaagtgttaaatttggcttttgttcactttagagcagaaattttttataaaaaatttcaaaaattaaatttttgaaaaatttttcagctttttgtaaattctttgctttttaaaaccaatttaaaaaatccaggtcaagcctggattcaggccttgaggagcctgggtttttctggacctggattttcggtccaggtctaacatggaacccagtccaggtccatgcttttttcaaaataccaatctctactaataattctttatctgctctttggtttattatacaactttttgttataatttctttcattccataacgcgtccaattggcgaaaataatattaatttaaaaataaaaaactaaatacattttaaattaggaaggtcaatttganttaaattttactatgcttttacttaga

SEQ ID NO: 5955 - DNA, 3591 bp, Heterodera glycines
taactgaattaatttctcaccgtttgttgtccaatggccgttaaatgagttggcttcacagaaggattggctatgacttttcactggaaatgataatttatgatgaattagctatttgtagagagagagaaatccaattcaaatggaatgttttgctgaatcataatgggaaatgaaaagaaaacggacaaaaaagcactgatcacttctctgttaaatcagtaaagcagcagataacttcagcacaacattaataattttgggctgctttttccaaaaaataaatatacaaaaataaatttatttatttatttatttttttgtttgttaggtaatttcaatgccaattcgtttcctctccatgctctgccctcttctcgtgctgctcaccaatgttccttcaacgctgccatggatgttggaacgggatggtgtccttttagcttacgacccaaacaattacaatgcggaaacatgggctgactggggcaagaaagttggcgcgagtgcggtcgcaggaggagtcgctggatccgctgttcctggcattggaacggtggccggcgccatccttggctttttcggaggagccgccgttgctgctggcgaattcgcaattaataaagtgtattgtcaggtaaaagaacgtacctttcgacctttcgcatgttaatttgttttatgctgaagtaatgaaatgaattcagtttttaaagttcaaaaatgtgaccaaactttaggaatttggcatttttaattttgtggcaattttttttttaatttcgactttttgttttttcgttgctttgaaaaatgtcaaaatggctttaacctcttttgtaaaatttaaaaagtatatacaaaaactttaaattatttaaaacaaattatgaatgttgtcaacttataatttaaaatgatttttcatagaaaaattctcgttggtcttcggtaacacttaattttagtgaacgtttaagggccatttccgtccttaacgaaaatttttaaaaattttcaatgcattttttagagatttaaatttttaacaaataacaaaaaatttccaaacttacaaaaacaagaaaatgcttgaaaatattccgctgagaatacaaacttattaataaattaactttttttattttgatgattaattttggattaaatttaaattttattctgtatgtaaggtagatccaagctcaatatcttttattatttataaattaaatttcttatttgtaactgatttgttttattggtttgtaaagactgcgtgtggctcgcagtacgttgtttgcacccaatcgaaaggggcaagcatggcatgctgcgacagcaactttgcacgcaaatgtgttaatgattttaatgaggttaatgaataagatttgtatacatttacaagaaaagctaaaaagctatttaaaatttggttaatttgcatgcgaatatttgaatcacttttatttttgacattttttaatattgataatggtaatttatatcctttattaataaaatttaaacataggtcgaggcaatgtttcccaccacaacgacgacaacaacgactccaacgccggctccaattcacccaacggtcgtagactaaagaaataacatatcattttaatagggtttagatttaggttatattttataacaataccttgctatgttttgtgcatgttttaacatgaaattttgaaaatcttgcgttaatcatgggacggttcagtttcaaattaagcctctgctgatgattagcatttttgccaaaaaaaacacgccgggaaggggggggggactcactcgataagaacgcatatgttatgacaaatcaacagataaatcacaaaatatattctaaattgaaaatgccgtgatgcaagggcaaatccgaatttatttattatttaaaaaatgaatctaatcattattatataaattgaagcaagtataaaaaatattaattaatttataatttattaaataaattataacttttaagcaaaaattaaaatatatttaaaatattctcttcacctgaaaattttaaaatctaatttttggcaaaatttaaaatatcctaaaaatttccaagaaaattttgcagcgacattcaaaaaaccatacacaaaaaatttatttaattttcagcaatttaaaaatctaactgattgtcatacatatatgagttagatttcctctaagaaacctttaaacatatttatttttagcatatggcaaattggcaagagacagcggtcaaggaagcagcaaatttcaccgtaaccctcaaaattaaaaataattttatttaccttaattccttcattttttaaagttaatatttttagaagttttcctcattaaagtgtaaacgaggacgcaaaacgacaaaagattataatattgggggaaatggttgcccctatgagtcattatactgctatttcatgttctgttatgacggtaatgaaaattattaatttaggaaagtgaatgatttaatattactcctcttcgaaatttagtgcgatttgagaagggacattttgctgaatggggctgccacccagcagatgaacgtgtagatcattccaaaaattatcctcaaggcgattgggcatgcgaacagtcctatcgactacacccggattatgataagcagaccctcggctacgacatgtccaacgaacaagatacttttgaggaagcatatgaagatttgcgcaagaagtacagcaagaaaactgggtgataatagtcttataggagatgtgatacttgaggaattatcctcattttctgggttttgtgtcagttttttttgaaattaggatttacgtagaaattttactaatttgtggttttgaccaaaatggcttttttgtcagaccctgaaattaactcataattttttctctggaaattctaagacgaaaacaccaattttttgtttgactcttaaattgggtttggatataaatatgtttaaaaagaaagattgtaccgagagatgatgttttactgatggttttataaaatttgaatcacatctctgtttaaacctattaatgggatatccaaatatgccgacaagcaccctcttaatctattagattgtttgtcatgatgtatttaaccatcctattagttaatatgtaattttttaaatttattattattaatattaatattaattattatttattttattttattctaatattctgtgttaccggtaataattatggacgatatctatagacgcttcaaaaatctagaaaactcacattttcagctagacacgttaataagacaaaaaattagattgagcttgtttaataaatcttattaagtcgtccatagttaattacgatgggtcctgcccatgatgaatttatacatccattttatttttaaaattaatatttattttcatacaatttttctcacattgtactttttatatttcgggataaaatatcttaatcattgagtaacacataatattatataaatattaataagaaaataataaaataaaatttgtttcggcgccggggcagttcagaaaaa

SEQ ID NO: 5956 - DNA, 6373 bp, Heterodera glycines
  unsure (1)..(6373): unsure at all n locations
tctctcttnactatctctcactgctcgctttnttctctctctctctcttcctctccctcttcttcttcttctcttcttcttcttctctctctcttcgctctgtctcctctctctctatatctttctctctctccctctctctttctntctttctccctctntctctctctctctccatgctctctctctctctctcacttcgctctgcggctctttcttcctctctctccctctttctctctctctctctttctccctctccctctctctttctccctctttctctctccatttgctctctctctctctttctctctatccatctttctctctttatttctttctccctctttctctctctctctttactctctctctcactgctcgctttttttctctctctctctctctctcgatctcttcctctccctcttttcttcttcttcttctctctctttctctatcctttggctctctctctctctctcgatctcttcctctccctcttttcttcttcttcttctctctctttctctatcctttggctctctctctgctctctctctgcgctctctctctctccacttttctctctccctctctctttcttgctttctccctctttctctctctctctctctttgctctctctctcactgctcgattttctttctctttctctcactatttctctctccccttagctctctctctctctctcttctctctatatttcattttctctctctcccttagcccgctttctttctctctctctatcccgtcgctctctctttctctctctctctatttctttctctcccttctctctttctctgctctctcttccaccctctcactttttctctctctctctcttcgctctacctctcactgcttctctcttctctttctttctttctttttttttctttatcttttccttctctctttttctctctcttctctcctctcacctctctcttagctctttctcttctctatctctctctttgctttctcattctctctcccttctctctttttctctctccctgctctctctctgtctctctcccatcctctcatctctctctctttctctctctctctctgtcatctctcagtcttcccactctttttctatcgttaccatttccccattctcaatcgctatttatcttccgctttctctttaattgtcctcttgctttttctcttttatcttctctttatccctatctcttcttctctttctctctcagtcctctctctctccccttcctttagaatctcttcattctgtacactctctcgcttcctttttcatctctctctattgttttcctcttcttctctacctccttattcccaagcactcctacacactcatcacacacataaacaaactcgcacgcattcaatcctgcgtgacaaccgcacgcgttacccactctacccctcccatccgcgccgacagagaaacatacactgcactctctcttctacccatcctttctctattaatctccaattatattttttaattttctgtttctttttcctattacaacaaaacagcatttaaccgccaattcaaaaataggggcggggcttcggctgacttagtatatagttaagggatgaaattttttagcctataactttgtcaatactagatcaaataaaaccattttatgctcattttgaagggaaaattctagagaatattgttagttttatttgatttggccttaaatagcgcacttggctaaaaaagaattaaagtattgaaatgtttgccatgggaaaaaattttttcctgtgggtaactttttttgaaattttgtataggcccatattttgtcccccactaaataaataataataaacctatttgcactgagagcccaaaattgggccgctgtgtttataaatagggaacggatttctaagtttttgcttattttttctgcggctttaactcgacgagaaatgcacgaaaaacacattttttgttcgaaaattttgtgttttaacgcacttattcgaacttagaaatgcttattttggcgtttcgtgcttaaaaatgcttattttagaggttcgcccttaaaataagtttttgtacttattttagcgttttatgcttattttcgttcttatttcgcgatttttgggaaatttattaacaaaaatgcaataaaaatgataaatacacccctaagaatcggccaaaaaaatttcggaaatatacacccctgagaattgacctaaaaattttcaaaaaatacactcctaagaatcgacccaaaaaatttcggaaaaatacgcccctgagaatcgacccttaaatcctgaaaatttctaaatgtacttcatttctaactgcaatcagtaaataaaattgtttgacttaattttaactaatttgcatagagaaaacagcaattttaacaaatttcacctctacatttggaattttttcatgcttattttcgcacttatttcgcgcttttttcgcccttatttaagcacttattttggactttttcgcgcttaaaaatccgttccctatttataaatcacaccgatcactgcctttttgtattacctatttaggtatttgatcagccatagccatggctctctttcataaactgtatgtacaagttttatattattcgaagattttaaatgagatagtaatcttttttttaggcaaaagctctgcaatttgaaatagaataaaaattgagttttacaaaattataaataataataaaaagtatttcttttcctctccttttggcgtactattttcatgtctctaacacattaaaaatcatgaaattcgcaaatgctaacaattttctctaaaacggtataaaatcactttcttcttttagaatcaatagagaaaataatggttttagcatttggttgaaatcagcagtttaggacttgagttataacgtaatgaaaatttgaaactcccacaacttttttctgatatgtcaaattgctggtactagttaagtttgggtcccccttttgggtcaaatttttcaaaagcgtagacagacagtcagacagtgcgctatttccttctttatttttctcacttcttcccttttcccacacacagtgctgctgcacagcgagctacttatcttagatatcaaatttgttcggtttggttgggaatgaagcgagttgtctgattaaaataataaacaatacaaaaaagacatttaccagtgtaaattttgaattaacgcgcaaaaatttacgccaaatacgctatttggcgttatgagtaattttgtctaacactgggcttgacccatagtgcatttattgtcttttcgtgtttaatactccaaacaagaaattcacaaattcttcgctagacaaatttttagtgtgactttatattagagtagagcgggaccgggaccaaaacacggacaactgagtacaactgagtaccgaggtcccggtcttgaccgggaccgggaccagtcccgggttttttcccggttttcccagccaaaaattcccggtttttcaacccgaaaaggtcccggtcccggttaagcccaaaattcccggtctcgctctactctactttatattaaaaaataacttttttactggttgtgttaactacatataaagttgtagttgatgtaatttttttcttgtctttttagagaaaatttgatatggactctttccttcaaacaaataatgatctcattatttcaattcacaaggccttagttgaatctactcaggaaatcaccaggaaaatagtaagatgctgatgtatatgggatacacaaatttggctaaatatcatctagaatttatggcacttttccagttgatggcccctaaatttgaagtcgtgaaaacttattcaagaggttttcgtgatcactaaattttgccaaacctccaaggaacaaaccaaaagtgcaaattttcgaatttatagttttacaacaaatgttcacgaccttttatgacaaaaaaatttttagcaaaccaaaaggggtccctccccctttggttttttcagggaccatcaactggaaaaagccgaatttgttaataaaaataaaaatctaggagaatttgcgggatgatgttcgtgacgtgaagttgtcgctggctaagaacgatcgtatcatgcaggaagaggctacaaattggcgtcgtcatacggaggctattgttaaggagttgggggaccgacatcagagtgacatttctggactccacaaattgctattggaactgtgcattcgctcttcacaattaccacaagctcaactcgctgttgtagaaacgaaacagtcgaaagaggacgaagttattttttttgtttaaaaattttaaaaccctaattttaaggatcacacgaagaaggatgttgaagttgtgcagattgctaagaaggatgttgaagttgcgcagattgctaagaccgttgagcctgctgagtttaaaccgactgttgagcctgatgcagaagttctgaagactcttaagaccgttgagcctgttgggtttaagccgactactgagcctgtcggatcacaatttttgcatcattattttgtaattttttctacagactcctgctgttaccaccgctgtttctgttgctccgttgagtggcactttaaccttcaccgcttcgtccatccctattagcggcagtctttttggtggtgcttgtcgacccggaacaaacacgttatcgaacttggcggccaaggtcactgctaagaccactgaacctgttggatttaaaccgacttttgagcctctggtaatccaattttttttcctttaaaaaaacttactttagcttcctgctgttactactactgctgtttcggttgctctatttaatggtgcttcaaccttcaccactccgtctgtccccattggcagcagtctttttggtggtgcttctcgtccgggaacaaacacttttgcgaacttggcagcgaaagtcaaattttgttttttttttactagttttgcttattttttgttatgtaggcagctgagtcgggtggtggttttttgggcggtggaggcgtcactgcaaaaccgatccaatttggtcaatctgcatttggaaccaatgcaaaggatttcaaggtttgctaattgaaaacaacaactgaatctgtacgatattgtgataatacgacttttttatagcttttccaacaaccgccttctcagccttcattcagttcaaatattcataccgttgataaaactaccgatgaatcgtacagaggtgatgaggggtcggacaaagaagacgctgcagaggaattcgttccagacgtggtaatgttaattttggctttcgtcacttgctgattgtgctcaccaatgcttgctgttttggagtcccctaaaaattatgtgaattattaatagccataggggtcacccttttggtttgtaaaattaaattggtcttattgttaaattagtgatcaacaaccccaaaaaactaacgaacattttttataccttattatgataaaaaaaaaacaatagaatccccatttggttcagtgataccccagcaagcattgggtattaccatcagaaagagtcactgattgtctaatccacttttccagcattatgagcctgttgttcctcttccgcccgaagttgaagtttctactggggaagaggaggaagaggtctgtcgcatttttattaagcattttattaaaactgtgaaaaaaaattctaaaggtcattttctctgctcgttgcaaattgtaccgttttgataaggatgctcgggaaaacaaggagcgtggtttgggtgatatcaaagtaatttatccaaatttaactcctttttaattccttttttcagttgctttacaatcctcggagcagtcggtatcgttgtgtgatgcgtcgtgagcaagttttcaaactgtgcgcgaacttcccaatttatccggacctgaaaattcatccgcgtgagcatatgccaaccgtttacacctgggcttgcagggtgagaaatataaatgttcagtctatttctgtttaaaagccacttagtgattttatgcatgctttttgtatttccatctttaggacttcagcgatgaaccgtcccaaggagatgacgtgacgttcagtgcgcgcttcaaggataaggtttgacattgggtgaaaaaggctttaaatggtttttgggttttaggcaatcgccagggaattttatgagaagatgacggaagcggtgaacatatgaaaggttgagtgaactttggttgtttacagactggtggaggtggactctttagag

SEQ ID NO: 5957 - DNA, 201 bp, Heterodera glycines
ggacatctacatttttgaattgaaaaaaaattggtaattactctttctttttctccatattgaccatcatactcatactcttgatagtttaaactgaaggcgggaaacgacaatctgatccccatcaagctagcttctgcaggtcctgctcgagcggccgcccggggatcgatccccgatctagtaacatagatgacaccg

SEQ ID NO: 5958 - DNA, 3174 bp, Heterodera glycines
aaaaagaaaaagaaaaggagaaaatgcatttaccgtatttgctcttcttatcccacatatccattaatcccccaatctccaattatcccccagtctacgaagcgtttgaaaaataatccctctatcttaatcccccagtctcgaattatcccccagtctcttaggaggttgaaaaataatccccccccggggggataaaaagagcaaatactgtatttgtctttatttttagtgaaaaacctgctgaacttgcaataacattttcattaattctcggctgattattctgcattttgatgtgtataaaaaaccataaaaatattcaggcaaaattcagtccattctatttaaaattttttatataatttggtaaatttcttttaaatttttttattacagtgcaaaaagaaaaaataaatttttatttaaaaaaataaataaagatttccaattttataagaagacttgattggaatttaatttcgaaaatttaataaaaattcattgaatgtgtaaataatcgtcccaatattcacgcaacatgccaccctctcaagccaatgaatcgttttattgtgcaatttgccacagtacatacagtaatgggcggaccaagacggtgtcatatggaaaattggaatttaaaataataaaataagtaattgctgtaaaatttaattgcattaaataatcgataaatatttaatttcttttaatttaattttttttcgagaaaaaccctgaacttggcgatacatctgcttttgatctgtatagggctgaaaaaacgaaatattgataatgaaatgaccaatgaaaactcaaaaatcctcaatttttttaattagaattttgtaaaataaatatttcttcaaataatagattaaaaaggttattggatctaataagaaataaaaattattttgtgacacttaagttttattgaccattttatagatatttttaaaatattccgtaaaaaactatattatacctatattgtaaaaagttggcttagagaactaaaaaataaataaaattgctaagaaaatgtttgtttataatccatttaaaaatactttttctaaccattaaaattattatatatagaataaataaattaataaatcattacatataacaaagaaatgcaattatatatgccaaagtgtcttcataggatttacgcgaaaaattgaatttgacaataataagagctatttggcaatatgccaacggacattccgccatcaacaaattaatatgctgagcaaaatgccaacaaaatccactaaattcaaaaaaaacttatagtgaaaaccttaaaaatttctcaccattccaatgtaaattgtgtcaaaaatggttcaattgaaaacaataaataataaattaaaaaatggaataataaaatacttcattggaaagtataaaaattaaagattttaaaatatattatttatacattcaattaattaaaaagaaaattccaaatttttttatatattttaaaatttttaaactttgagtgaatacattttcactgtttcccacaaatagttgaaacattgggaccaaattcgaatcatttgaaaatataaattcactagagaccggcgggatcgggactcccgcgggattttacgggagtcccgctcccgactcccgcttttttcggtgaacgggatttttaacgggagcgggatttttacgggattcccgttcgggactcccgtcccggtaaattttgaactcccaatcccgctcccgctcccggaaattttacccaaaaaataggagtaaaaatgcactggtaagaattgagttttttggtaaaattaataatttttgattgaaaatctgttaaatatatagccaaaatctcaaaaaaaattttcccggcggcgcctatcggcaccgccggaatcttaaaatccttaattttcttaaaaatgcctcaaattttcaaaaattggctatttttggacataatctgacactgtattgtattcaaatatcaatttttttcccggcggcgcctatcggcaccgccggactccctcttcctccctggtcaccaaaaagttttttcaaaaaataagccgcaaaaaattgttaaaattaataaagggagtcaacaaataaattattaaaaaattttatttgaagcaatttgaaaaaatactgattttcgacccataaatatgattttttaatttcaaattctgcttactaaatttttctatctattttttctttaataaaaggattttccttcaaatttgtgcattaaaaatatttttgttagtttttaattaaattttcgaattactcccgctcccgcccgggactctcgtaaaatttctgcgggattttaacgggagcgggattttcacgggattcccgatcccgctcccgctcccggaaaattttgaactcccgatcccgctcccggaaatttttttttaccggactctaattggtacacatctcgttttttgggatggtgtgtacagtaaataatggagaattgagaattatggtagtcgacaaatgagctagcttttttcaaaagtaagtacctacttagaaaatacgccaaaaaaaaattcctttaaaaacatttacccaaaaatttttttcttcctcttccctccctccctcccctcttccgcaattgccttttttgaacactcagagactgacgacacagacggacggacgtacagcgccgtacccattaataaattgtcctgcttttattctcctacgccttcgtctgttctcttacatcccaatccatcattcctttccgttccttttcttttttgtttctctacttattcttatttttcctccttttcatgtgattttacgtttacgacgtgtacgccccaaagcacacacattattcattcattgttcttctcctgctggtccatgaacccatttaaatgtagctattatgcaataattgaaaaataacttagagtttaattaattgttaagccaatcttacataccctttttcttttaaacatagccccacccccctaaaatagagccccctttggaggggggggttgaaaaaacaggtataaactaaaattgcttttgcataaaaattctctcaggaagtgctaatccaatccagccaggctttttctattttcc

SEQ ID NO: 5959 - DNA, 8260 bp, Heterodera glycines
  unsure (1)..(8260): unsure at all n locations
cgtttcgatccatcgcttttggtcctttcgttcagcccatccaagccaaggaccgtccatcaaatccgtttggcatgctcgcgaatgtttggccaattttggcactgaccaattccgcttttttgtccatgacgttgttttgggcggcgaattccgacggcacttngagagggaaaatgcgcaaaaattggagcaaattttacgcattgccgaaatgaaaatcagtgccttttatttgcatggaatcgaactcgatggacaaaaaagctatggacagaatggcacagagcagaacaaagtggcggagaagaacagccaaccgacgctgaagcagtacagccgggtaaaggaaggacgacacttcggtgtcttcaatctctctcacttttcagctcgtctccgatttgctgttcaatgtgccgttgtttcggatggcccgactccgtcgccgctgtgccgtgcccacctttctgtactttaacgactatttcaataagtgccaattcgagccgtggactccgttccgaggcgcaactcatggtgatgccacccggcacacttcccttttcacaatgtcgcctctttgtcaggcaatgagtacccctacctcaacggtctcttccccgtgggcgaattccaattcaccgaggcggaccgacaacaccgtgccactttggtccaaatgttgtcctctttcattcgcaatgggtgcgtcaaaaggggaaacgtttttcatcaatggcaatctttgggggtttttatttaaccgaaactgctaagcatatcaaatcctttatatccattgccattcaacagaatgccgagcctatcactccctggcgactactttttgtggccatcaaacgaacgaagcgatgaaggaaaagagaaagcgctgcaatttgtgcggattggaaatggaacggcggaaattgcctttgcggatgccgtggaacaaagcggcacattttgggaggaattcagtcgcgaatttggtttcgatttaatactgggaattacgtacgaatgtgacgaggaaacaaaggaataacgaaatgaaaagatttccactttgatgcttaaattgtttaaaaagctttaaaattgtaggcaaaagaggtagtgatacaaattcgttctttcaataaaatttaaacatatgatttttatcaaaaattttagttgcgcaaaaagagtagggaatccataatgatgtctggatgcattgcataagacagaattaacgccacaaaatttatttcataataaatcatcatcaaacaatatgtcggattaaaagaagaaaagcgatcaattgaccaatcaaaaggaagcaattataatttatttctgataaaagcaggacaaatattcggaaaacaacgaacattaatagtttacggggaaatgtttgatgatgatcagagtcgacgatggtttgtatttgcagacgacaaactgaaaaagacgggcattcccaacccaaactcaccactcatgttcaaatccttggaaaaaccgaccaacaaaagggcagccagaacaaaccaaaaactgtgaaagtacaatttcaattgggcagttcagcaacggtcacaccttagtccggcccttctgagtctgctcggccattttgttgctgttcggcctgttcctcgccctctttgggccccgtctcttcttccccctcctctccatctttgggctctgcttcatcctccccctctccgtctttctgtcccgtttcttcttcgccctcctcctcgtcccttttctcctcttccgcttcagcaactgtttcgccagtcattccttccattttcaccacaatcgccgacttcagtccgccgcgaacatttgtctcctcctcgtcttggtcgtccgactcatccgccacattattcttagcctgaccaattgtcccgccaaagctggcggtggtgtacgtgtcgagccgacgcaattcgcgagtcatttcatcacgtcgtaactcaatgagtgctaaacagagacagagacaagacaatggaataacagaagaaagtgttcagccaatacaataaatattcaaatccctaaaactcactttcaattttctttgatgactctttgaggagttccaaagttcggagtgtgtgtttggaggggaggaagaacagcgggggcttagtctgagtttggatgaagcactgaaggcgacggaaatgtttcgttttctcttcggccttagagaggcaaaatttggttaattcctcactcaaaaacgatctttccaacccaccgattgctcaatggccttttgacgccggagggattgaatttccatttccttctcgcgcttcttcgccatcagtgcctctctctcccgcatcattcggtttctgttttccttctccgtctcctctaaacgacgctcaacttcgcgttgcttgtcaatctgtgcgttattttctttttgatgcaaatacaactcttcccattaaacctgcacttgtcctttgctcccaaccgtcttttcctcgttttgaaatttacgcaacgtggcaaccaaaagattaccgaaaagacgtcggtttctaaacaataagggcgtttgcgaacacttttaaagcattgtgtcaaaaaatctttggcacatttccagcaactcaccgcacttggtcttctttgttctcgttcttcttcatctcgttgattaccgccgtacgcgatttggtctcaatggtgggcatcacgacactagattgcaaagtgcggtgagtacgcgctgaagagggcggggaataatcaccaggcggaccctcgtccgcggcgtaacgcccacgcttcgcattgcgatcgctgaaagtcgatattatgcacataaaagcatgatttcttaagaaaattgccacttcgctacaccgtaattgttttcgcttaactagtcatccaaaaatttntactgtntaattaaacctgcttccggccgataaaatatttttcggcccaccctcctgcacacgcctgaaaatatcaatactaggtaagtgtcttttgatgtcccttcttaccgatcaaagggagtagagaaagaatcatttgttggtgcgcttcttttccggttaaatcttaaaagccataatatgaaaaaaactagcgaagtgttttttacctttctgaaactccggaaagcattgatatgttcatgtcaatgctccttaactcgtcgtaagccttggtcagagccgaatttacgtcaacagccatttctctttggaagtgttatcgatgcggaaaaagacagacaaacagctacaaaatttcacaaatgtgagcaatttttttgaaattgaaaggacagaagactaaaatacaaaattaaaatggtgtttgcttcaattgcattaggtaaataggtttttttgtaaaacgaacagcacaaaaatgaagaaagataaaaaaaattttggtttttcaataaacataatgccaaattactgtgcttttatctttgacaaatttaaaaacacaaaacaagtgaaggaaagtggggaacattatcatcaaatttagattatgttctgttgcgtaaaaccgagttttaataaaataaatatttttttaagcttttatctttgcttttttgaatttctttcactcaaaaatgtccagcgatattgtcgagaaaaaggagacaaaccccaatgagacggatgacaaaaccaaagaaataaaatgtgttttttgtgcttaacccaagtaaaacccatcatatttggtgtttctttctgtttcagcgcttgacgaggatgaaattgccgcacttagtaattacaacatgggaccgtacgcggatcagttgaagcaggcggagaaggacattgatgaaattcagaagcgcataaacactctttgcggagtgaaagagagcgacacggggctggcgccgcccattctttgggacattgcggccgacaaaatggccatgtcccatgagcagccgctgcaggtgaattttattttgattttggtcaataagacttgtttaaaatcttaaagatgagtgaaaatgaaaatagtttaaggaaaaactgaaaatgctaaattttaatgttagggattaggaaatggtcaaattcttggtgggtcaaaaatatcgaaaatttacaataataattcgcgacgctccaccttaggcaaatgttgcattcaatacaaattaaaatatctttttaaaaaggtggctcgctgcacaaaaatcatcaaagaagagggcaaagaaacgcgttacatgatcaatgtgaagcagttcgccaagttcgtcgtggacctgcacgaaaatgtggcgcccactgacattgaggagggaatgcgagtgggggtggaccgcaacaaataccaggcaatgtgcacattaatttatttcagaatttgcgtttcacagttacttaaacttttctgtgggttggaccatttttaagggatttgacaaaatacgccatgaattgattttaaaaattaaaaaagtgggcatttgactaattgtaagtaaaggcacaacaaaatcttcctttaaataagagagcagcatcttgatctcccctcccccgaaaattttccacaaaattttctgatgtattctaagtttttcaaaaaacgatttctcaccatccatcggcttacaaaacatttcatttttaagattcatttgcctttgccggcaaagattgacgcgtccgttacgatgatgcaagtggaggacaagccggacgttacctacgcggacattggcgggtgcgaagaacagatcaaaaagttgcgtgaagtggtcgagtttccgttgcttcaggtcggcaattcaatctctgtttttgtttttgttccattttgcctctttatttttagcctgagcgtttcacgagtttgggcattgagcctccggtgcgttttgccacaccttgggattgtctaacgttttccatttcagaagggcgttttgttttttggtccgccgggcaccggcaaaactttgtgtgcccgcgcggtcgccaatcggacggacgcgtgtttcatccgcgtcatcggttccgaattagtcaaaaaatacgttggcgaaggcgcgcgcatggtgcgcgagctgttttcgctggctaaaacgaaaaaggcgtgcattctcttcttcgacgaagtcgacgccatcggcggagcgcgatttgacgacggaaaagggggcgacaacgaagtgcaacggacgatgctcgagttggtcaaccaactggacggattcgactcacgcggggccatcaaggtgggtggggggatgtgtcttccattttggcttgaaggggaaggcaaagggggaggtcaaccgaaatttttgcgaacgggtccggtcttttaaatcgacgacttttagctttttttgcggcgccctttttgtcaaaaaaacttagggaacgggcaggggacccggcggtaccaataggcgcagccgtggaataattattgaatttttgatgaattgttaagaaaatttgttcaggatttctaatttcaggttttgatggccaccaacagaccggacacactcgacccggcgctcattcgtcccggtcgcattgaccgacgcattgaattttccttggtaaccaatgaaaataaatgccgatctgacaatgagtacacacactgctcattatgaatcttttcagcctgacctcaaggcacgaggaaacattctccaaattcacaccaaacggatgagcgtcgaccggaacattcggtcggtcattgtttttgacatacatttaaaatggagtacaacatgttcggtgtttcaggtacgaattgattgctcgactctgtccaaacacgacgggtgaacgaacgcccattaaaatgaaccctcttacaaatagcgattgcttaattaaccagaaaaagtacgttttgctttttgaggtgccgacttgcgcagcgtttgcactgaggcgggaatgttcgctttgcgtgcacgtcgaaaggtcataacggagcaagactttctcaaggctgttcagaaagtggtacgttttccttttgattgtgccaagtggattcttttatttggcttatccaaagtccttcgtttgttcgttctctttcgccctttgtattttacgttttaatttaaggtgaaaagctacgccaagttcagttcaacgccggcgtatatgacgcacaactgacaatacagttcttacaaaacggacttttttatatttgtgcacttttgtttcattacaatataaatgaggaaaccaattccgcagaatgtcttgttaacaaggactacttttacggcttttggaaattcaagcgtaaaaattgagtggcggtttcgtaaatgccgtgttaataatgcagtcccccccccatgtgtatgcggaaaaaagtggtttgtgcccagggatggcacggaattccgtcttcctaaattttattaagtagtaaagctaaagcaccacccaaaacaattgaccgataagtgtttaaaatttaccaataaataaataatattcaaagggaagtaactgtcgtctttggtgccgtttcttcatctttcgctccgtcttcgaacatttgacccattgcgttcagccgagcgtagcattccgcaacgccgaagaattcaatcagttctttgattggaggaccccgcacattgtcaatcattgacagacggaatatttttgccagcagctgataagggatagccaaatctgtggccaacaatttgaaattgtcaaaagtgtgcgcagtgtccgacgaaaggaaccattggcaaagtgccgtaatctaaataatcacgcaaaaaacaaaatgaaaactaatttggtaaatagtgaaaatcatatactcctccaatataaatacgaaccaatctgacgcattgttcacgatccgcctcccctttcacgacgacttcgagcagtttttgagcacttcgaggccgataaaagaagaaacgaaaatcgccggttgataattcgcccaaatgacaaaatgcttcttctttcaacttgagaaaggtgagaacacgacaaagataagactcggaaagcaaagaatggtcgatggagcaacgaagttcctggtaaatgtttaataataaaaataatggtcaaaaatcaagttgaatacacacatttggcaaattgtcgaataccgacttgatcaccggcaaaaggtccttgtcattggtctgttaaacgctgaaaacattttccatttctctcgtttggtttcttttactataaaaacatgcccagctttccgtaattgttcagttcgtttgtgtccatctgaaaaaccgaataaattacgacaaataaatacaattctcaaaccgtgaaactccctcgagtgatcaatcgctcatcgaatcgttcgatcaattcttccactgtaataaattaatttcaattccaaaaattaaaatgctatcttcacacatgagtaaactgtttgtggctgatggtctctgattccgcttccgttgcgcaagagaaagttcaaaacagcaatgggtaaatgcccatttttcaggtaaaaatcctgagaccgaaactgtttgaactattttctttaaaggaccaaccgcgtaaccagcttcaaagcgtttggacaatttgcgtttgccgtccaaagtgatcagaggcaaatgggcaaagtgtggcggagaccaaccgaaggcactaaaggaaaatggaaagattttattttttcaaattatactaaaatataaaattaattttctgatttttttcttaaatttttgaatttttattaaagttacccagcagagtgtgcgtaaaaattatggggttaatcgaacgggaaaaggtgagacccccgtccaaccttttttgttttctcgttccgaaaattttttaaccgtgttcattgtcaagatacttcatgaaaatttatggtttatttccgagcacctgtaaatttgcaagtgttttgttgttgaacatatccattccgctcctcttattacatctgtgaaaatgcgatttctcaaagggattataaattcattccccttaacattcattgacaaaacgattattccccagtcaaattacggctgattttcatccgtcggtcgtccacgacattggcaaagtgataagtgggaaatccatcccttttgaggatcacaaaatcgccctcctccgaataatgttcataatcgccgaatacgatgtccttcaaaaatataagcgaaagg

SEQ ID NO: 5960 - DNA, 2491 bp, Heterodera glycines
aattcatttcaaaatccgattaaaattctctcaagtacatcgaaaacccatttaatctgtactaacttctttaaagtcgaacctgcggatatattctgataaaattatgatggttaacaaaatctcaatttaaacccaagcgtattcacttactgacatcatccggtgtataatagctgctcattttctaatatttatagaaacctcatcatttatttctgaaaatgccatatattcgtgcatttttaaaaatgaatccccatcaaaaccaaataaaatttcactcaagtacccccaaaacgaatataatcttaatcgagagctttgaactgtaaccgtggttattatcctctgtcatataaaatctcataaaagttttctcaacagtactgtaaggaaaaatataataaactcaccggatctgatatcgaaaataatcaaaatgaaattgtttctccattttgagaaagcatattgttctgctgatgtgtttatcgtagattatgatgacacactaaacactttcttcaaacccgagcatgacttaccaacaataatcggcgaattattagctattcattttgtgaatttttttagaaatctccagttccattcaagaaaaagcctactatattcgtgcattgttcaaactgaattcatttcaaaatccgaataaaattctctcaagtacatcgaaaacccatttaatctgtactaacttctttaaagtcgaacctgcggatatattctgataaaattatgatggttaacaaaacctcaatttaaacccaagcgtattcacttactgacatcatccggtgtataatagctgctcattttctaatatttatagaaacctcatcatttatttctgaaaatgccatatattcgtgcatttttaaaaatgaatccccatcaaaacccaataaaatttcactcaagtacccccaaaacgaatttaatcttaatcgagagctttgaactgtaaccgtggttattatcctctgtcatataaaatctcataaaagttttctcaacagtactgtaaggaaaaatataataaactcaccggatctgatatcgaaaataatcaaaatgaaattgtttctccattttgagaaagcatattgttctgctgatgtgtttatcgtagattatgatgacacactctttaagtcgaacctgcggatatattctgataaaatccttttggttaacaaaacctcaatttaaacccaagcgtattcacttactgacatcatccggtgtattttgttaggtgctgattattattacgagttagaacccacccccgttcaaagaatttcaagcggctatcacctcgtacaaactcttttgggtccaattgtggccggcaaaccccatcctaatactcaattaccccaaaatcatctgatcaatttttgtacccagtctgaaataattccctctgatttctttacactcgaaagtattggaattaaagaaaatcctgaacctttaaaatgtgatgaccttattcttactcaatttgaagaaaaaatagagttttttaatgaccgttaccaagttcagttgccgttcaggtcggatcccaaaacaattgccctcccatcgaatttcggcctatgtatgggccggcttcgttctgtttttaataccctttcaaaaaatccaacacttcttaaaaaatataatgacattattcaagaacaaaagacattgggaatcattgaacccgtccctatttcttcaaaattttcacctcctcttcattatctagcccaccatcctgtaattaatgaaataaaaggaaaagtcagaattgtatatgacggttcggcccatgttggtaaagagccttcactcaatgactgtctgtacccaggccccattcttattcccgacctcgtgggcctcttattgcgttttcgaattcctaaatttgtaattacatgcgacatagaaaaagcttttcttcaagttttagtacaccctaatcatcgtgattgtacccgttttctatggctcaaaaatatccaattacctccctcttcaattaatcttcaaatgttccgatttactcgtgtgtcctttggccttacttgctcaccctttcttttggctgcaactattcggttccatttgcacattaacccatcaccattatccgacgaaatcatttctaatatttatgtcgataatattcttctttcctccgaaaccgaaaccgaaggtgtagacaaagccgtagcggcaatttctctttttgaaaaggcaggaatgccactgcgtgaatttgtttcaaattctaatgaaataatttccaaaatccccgaaaattttgtccttcacggccccgatcaaaagtttttaggcattaattggaaccccctttccgatcgtttagtttttaagctggcaaatctcccaaattcgccactttcaaagcgatcaattctttcctttgttgcctcaaattatgacccat

SEQ ID NO: 5961 - DNA, 2090 bp, Heterodera glycines
  unsure (1)..(2090): unsure at all n locations
ctaatttcacaaccatttttaattttttctaaaacaaaggtttaagcccttatataaaggaaatcgattaacaattccgaaattagaacttatagcggtagaaatcggtaccaaattattaaaatttaccaaatcccatctcacaaatatagaattagactcaattgttcatttatggagtgattctgcaattgtaatctcttggttaaataatccatcctcaattcgcgaaatttttgtaactaaccgtcttaaaacaataaattctctccccaatttaattgtacaccatgtaccgggacaacaaaatcccgccgacattggttcccgaggttgcccatccatatcctgtttaaaaaattccaaaatttggtggtctggtccggaatggctatctaaaacacaggaagaatgggcaacaaatccagaaattaatccgtttatttctaataaaatccttaacgaaaacccatcgcttccaaatggtacggtaatgttcacgtttcacgtaaatgaaatgcaaccctcaactctattatttgatttaaatcgtttctctcgtttacccaaagccattcgctcaatttcatattttttacgatttatttcactaattaatcccaaatcagaccataacaaattacggtatccctcacttaccataaaaatttcagaaatgcgttccgcgtttaaattcataattaaacaggaacaaaaggcatttccccccgctcaacccgaaaacgaggccttaggcatatttcaagataaaaatcaattactccgttctaatggccgaattaataatagtcaaatcagtcctttgtcaacaaatccaatttatttacccccaaaatctccgctcgctcgcttaattgtctatgaaatacatcgaacaaatttgcattctagtccactttcaactttgtcctttttaaggacacaattttggcttcctaaaggacgtcgtactgtagaacaaataatttccaagacttgtaccgtatgcagacgtttttcagccaaaccctttgacctccctccagttccacaactcccaaaagagcgtgtaattttaaatcgtccattcttttccactggcctcgacttttgcgggccattacacgtaaaaagcatttcacccatttcatcaaggaaaaatgcccgggtcgaaagtgaaaaatattggattgtattatgggtttgcctttgtacccgaaatatttcccttgatattgtccccgatcaatcagccccaactttttcccttgcatttcgtcgattcattgccaaatttggcaccccacaaacaattcattgtgacaatgctcccacctttttggcgattcataaatttactcagccaatgtaccaaacaaattgggtatttaggactccatatgccgcatggaaaggcgaacattatgaacgatttgttgcccatgttaaataccatctccgtcgcgtattgtcaggacccaaacccaaaatcttcccaagggatcacattcaaacattcctaacagaaatagaaaatattgtcaattcccgaccaatcactttcgattcaaccaacccattagacccacgacctttacgtccaattgattttgttcaccccttaggccataaccacccgtctatgttatctgttttggaaaacccacaagacatacttaataccgaaataccgaccagtacccattttaatctcaatgaattatggttgaccatttcaaaatatttatcaaattttaaagaaaaatggcacaaagactatttaacttcgctcagagaacgctatcaaaaaatcacccagtcccaaaaccgttggccaaaaattggcgaatttgttcttgtataccaggaaaatgcgccccgttcaatttggctaacagccactattttaaacgtattttataatgaactcaatttccccaattccgccaaagtaaaaactattaatggccatacaacaattcgctccgttcatcatttgtatccacttgaaactcaagaagaattagcttcaaaaaccccanaaaatttcatgggccccttatcctccccaattaccaacctcccgttat

SEQ ID NO: 5962 - DNA, 1638 bp, Heterodera glycines
aaaaaatataaaatttcaataacctcgcggccaatttgtggcttatacctcattttttaataataattttttttagaaaatcacacatcccaaaggagaatgttttattatgactaaacccaatgctctttgttacaacctttggaaatagatgactacacatagcttaagaccaaagaggcaaacaaatttaaaaatgaacaagcaaatatttttttaaaaaaaaacttcatattttataaatcaataaaccaaatcaataaataaaatcaaatttaaataaaatcaataatgtaaatcaatcaataataatatggtactacttataaaatattctgtatattagagacacagacagtaacctgccaaaatcttttggttcaaattaatcgataaaaatatgttaagtgcaaaaaaaattaataatgtactattgtaagcgcacaaaaaaaaatcaataatatcaaaaaaaatgtgttccaataccttttggctagagacagagaaattactgccaataccttttggttaaaatcaatcgataaaaaatgtgtgtattcaatgtagtccaaaaccgttggccaaaaattggcgaatttgttcttgtataccaggaaaatgcgccccgttcaatttggctaacagccactattttaaacgtattttataatgaactcaatttccccaattccgccaaagtaaaaactattaatggccatacaacaattcgctccgttcatcatttgtatccacttgaaactcaagaagaattagcttcaaaaaccccaaaaatttcatgggccccttatcctcccaattaccaacctcccgttattgaaaggaattttcccagtaaggtacacattaagcagaaccgtagatggaattgggccgataaaccaccaacaaacacagccctttcccagctctaactacaagacaaatcccacataacattacagtaataattttttcccgtcgcgcccggaggtgctgcgctattcggttttcccatccccatcgtactctcccctcctgtgcattgcgctgtttcgttgtgctgcgctattcggttttcccatccccatcgtactctcccctcctgtgcattgcgctgtttcgttttcccatccccactagccatcgtagccttccttcctgtgcattgttttaaacggatatcagccaatttaatctaacatttatattaaagcgtctccgcaaaattcaatttttgctagagagccccgcccttacccaactgcttatatatccaggcatcattgtatttttcactcaattatctgctcatttacttaagaaataaatgggaaatattgtttcattcgattttgcctttaaccataatcccactccaaaaccagagcccagcaacctcaaactctccatttttctgtccttaattctgattgttttaattctgattctgattatctactttggacacatccgtcgttggtgggcaaaaatcttcaaacagcaatccatctcggtcactccacccaccctgccttccatttctgatcgtccaacccaatcacaaagtggcccaattgaagaacgccctctttccccctcaaaatcccaacggtggttttgttctattctggtaattat

SEQ ID NO: 5963 - DNA, 2542 bp, Heterodera glycines
cttgatgcgttggaaaagcgtgtgaagcgcattgacgtggtcttccagggtctttgaggcgattaggcaatcatccaaataagagaagacccctggaattcctgcgcagatttggtccatcaggtgctgaaaaatggacggtgccgatttaacgccaaatgggagacgttggcactgaaataggccgcggtgggtgttgattgtgcagagcggtttcgatttttcgtccaattccatttggaggtacgcatctctcaggtcgagattcgagaaaaattctgctccattcaaagctgcataaatgacgtcgggcctcggaagaggatggcgattcaattcgatcgaatcgtttaatccggtcgaaaagtcgatgcacacccgggtctttccatttttctttttgacggccaaaatcggggcggcccaatggctgaattctaccggtttgatggcgccgatctgcaagaggcggtccagttcggtgtcgactgcttcgatagcaccatgggggactggtcgagctttacagaaaatgggtcgggcgtccggtttcagaatcagatgcgccttgattgcgcagtggccaagtccgctcttaaaaacttcctcaaaatcgttttgcaacacagcggtgagcgaggattcgtccgtgatgccaatcgccgggtttggtgcctttacgacattggcgttgattgacgcgttggtctttcctttggtgctctgtggatacaaaatttcttttgagatgagctcaaattcctcaatccacggaaggccgaacaaatcatgctttaagtcactgctgacataagcgatcagtgtcttggatggccgatcgaaacaactgacggtgcaatgaaattttccttcggttgaaaatgcggtgtcattgcagttgcgggtctcgatgtccgttggagagagttcgggttggcccaatttgatccacgttttgaagctgatgactgttgcttgggctccactgtctccattcatcttcaaatttatgccattgatcatgaccgggatcttccaccatcggccttgggttgtgccaatcaccatacaatgtgacttgaccacgaccgtgtgaaatgatcggttctgagatttgtgtgccgtgttcgacgagcgctgacggcagacaatcgcaatgtggccttgccggttgcatttgttgcaaaatgcgttggcaaatttgcagtccgatcgccagtgatcgttgcttccgcatgatgcgcatggatgcgatggatggcctcggtttgctttgtcgtccgatttttgcttaggcgaaggcgcatgatgtggcgatttgggtgccggttcatgatgtggccatttgggtgccggttttgccttgtgtttgcctttgctggtctctcgccattgctgaggtcgcaattggatggcgctggttgagaccggttgagtaagcagagaaagggcactttccttgacgatttgaatcgccttcaattcctcttccaccttttggagagtgatgtctgtgccggtcttttctgcgtcctccagcattttgagacacttttgcctcaggtcgtgatgctcgtcgttaagtgcaatcaccaaaattatgcacttaagctgttccttggtcgggctcaaattggcgttttcacaggacgcgttgatgtgtgcgaccagcgatgagatgtcctggcttggctgctgacgaattttgaaacattcgtagcgccggacgaataatgatcgcgtttcggcatataatcctttgagcttggtgatcgagtccacccaattgactttgtcgggctgggtcggactgatgctgtcgcggtatttgccgtactcctcgtcgccgagtttgccaaggaggagtctgactttggtcgactcggggaggtccttaccatcctcttcaatcagaactccaaaccttttgaaccactgttcgaaagtgttcccggtttcggcgtcataattgaattttgaaattcggccgtcgatggaactcgccaaatttgcgtggttaagactcgtggcgttttgtggtgcttggcccattagctgttgaattgcatccgattgcacacgcatggcctcgaggagttgcttaatttggtccgcgctcatgccgaagtgtttgccggtgccgaatttgagtgtccaaaatcgaaaaaccgcgtattgcggaaccgcaacctttctcaggtcttttggtttttcggcgaattaactgcaatatgtgcagacctcacccgcctagggactattggttttgttgatgacgaaaaactgcagaatttgcagacctcacccgcctagggtctattggttttgttgctgtgcagtccggggtcttctgtttggttgaagacgactgctgactgcgccaaatttgttgtgtcttttgtccgagtgagaaagaccaacaaataaaataatttatttacgaagagtcaaataacaataaaataataaaaaatggcgaatggttggtggagagaataatgaataaaaataataaattgaagacaggagaagaagtgaacat

SEQ ID NO: 5964 - DNA, 2110 bp, Heterodera glycines
cgatgagatgtcctggcttggctgctgaggatttttgaaacattcgtagccccggacgaataatgattcgcgtttcggcatataaatcctttgagcttgttgatcgagtccaccccaattgactttgtcgggctgggtcggactgatgctgtcgcggtatttgccgtactcctcgtcgccgagtttgccaagggaggagtctgactttggtcgactcggggaggtccttaccatcctcttcaatcagaactccaaaccttttgaaccactgttcgaaagtgttcccggtttcggcgtcataattgaattttgaaattcggccgtcgatggaactcgccaaatttgcatggttcagactcgctgacgcggcgttttgcggtgcttggcccattagttgttggatggcatccgattgcactcgcatggcctcaaggagttgcttaatttggtccgcgctcatgccgaattgtttgccggtgccgaatttgagagtccaaagttgaaaaaccgcttattgcggaaccgcaacctttcttaggtctgttggtttttcggcgaattaactgcaatatatgcagacctcacccgcctagggactattggttttgttgatggcgaaaaactgcagtatttgcagacctcacccgtctagggactattggttttgttggtgtgcagtccgggtgtcttcttgttggttgaagacgactgctgactgcgccaaatttgttgtgtcttttgtccgagtgagaaagaccaacaaataaaataatttatttacgaagagtcaaataacaataaaataataaaatggcgaatggatggatggagaatgaataaaataataaaagtgaagacaggagaagaagtgaacgaggggggaagagtccacgcctttaaataacaaatgtgatgtgggaggaacggaggagggaatggacaaatgtcaatcgataagtgaccatgagaaaatgtactttgctcttctccaacacaattcttacgcaatatttcttaaacatattgccgaatgaatatttcttttagaatgtggcaacatttcctttagaatgtggccacaatttttctatgcaaattcagatgggcataactcttcagcaaattgagataaaaaataattaaatactccaatcgaatgctgctcttgtgctctacatgatgcaataaaaaaatcgctcagattccttctaggaacaatttctagcattctaaactttttctaaaatatttatacaattcttacgcaatatttcttaaacatattgccgaatgaatatttcttttagaatgtggccacaatttttctatggaaattcagatgggcataactcttcagcaaattgagataaaaaatatttaaatactccaatcgaatgctgctcttgtgctctacatgatgtaataaaaaaatcgctcagattccttctaggaacaatttctagcattctaaactttttctaaaatatttatacaattcttacgcaatatttcttaaacatattgccgaatgaatatttcttttagaatgtggcaacatttcctttagtggccacaatttttctatgcaaattcagtgggcataactcttcagcaaattgagataaaaaataattaaatactccaatcgaaattgtgaatatttcttttaatgtggccacaatttttctatgcaaattcagatgggcataactcttcagcaaattgagataaaaaataattaaatactccaatcgaatgctgctcttgtgctctacatgatgtaataaaaaaatcgctcggattccttctaggaacaatttctagcattctaaactttttctaaaatatttatacaattcttacgcaatatttcttaaacatattgccgaatgaatatttcttttacatttcctttagaatgtggccacaatttttatatgcaaattcagatgggcataactcttcagcaaattgagataaaaaatatttaaatactccaatcgaatgctgctcttgtgctctacatgatgtaataaaaaaatcgctcagattccttataggaaacatttctagcattctaaactttttctaaaatatttatacaattctt

SEQ ID NO: 5965 - DNA, 1509 bp, Heterodera glycines
  unsure (1)..(1509): unsure at all n locations
tattttttataatgcaaaaatatctattttgattcgaatagagaccggacaggattcgggatcccgcgggattaatttcagatcctcccgaacgnattttttaaattcaccggcattgatcgggatttcatcgggatcccaaatcagggatccctcccganccatttacccaatcccgcggggatcccgcggggattgaagtcacgagaatttttcgaaaaatctcgattttttaaataaagatcttgatttttaaattataaattatttgcctttgtttatttttctttaaaaatcacttaaaattcatgggtctccaaaattttacaaaaattttcaaaatttgacgcaaaacttggccattttgtgatttttatttatctcaataaacaattatcaaaaattatttttttttaattcctaaaacattattctaaatcttattaggtaaatttatggcacaacgattttaaaaattttgtcaaaaaaatcttgtctacgtatttttccttcggtgccaatcggcaccgccagacccaaaaccccacttttttcttataaattagttcataatcataaaatatggacagttttaggataaattctgttatcaaattaccttacaaattttcaaaattttcccggcggcgcctattggcacagccggcttcttctccataaagtttttgaaaaaatttgctgcaaaaaaaaatcctaaaaatctgattttttgattccgattctcaaaattattaaaaataatcatctgaggcgaaaataaaaaaaaattgatattaattaattaaattgtaaaaagttatttaaagctatgttgttaaatgtactaatttttgatcctaaaatatgatttatgggcatgatattttaattttgaaaaattttctataaaaacctgatataatttccatccctatttttctcgatcgaattgatcaattatatgtaaatattagataagcatttaaacaaaacctagcacaaaacgtaaaaaaaaatttgaattttttgcaaatcccgataatcccgcgggatcacgaaaaattcttcgggattgatctggaccgggattcggtcgtgatcccgactcgggatccgtccgatcgtttttccaaaaagttcgggttgatcgggatcgggattcagtcgggatccatccgaccccagttgttcggtctctaatttagaatgaagataaaatagtatgaaatttttgctgttatttgaaattatggttattaatagggcaccgatttccagtgaaaaaacttttttttgctcaattgatttgaagaaaagagctcaaaaaacgcatttttgcgttaaaattttttcatttggacgccatttttcatcactagaaatcactattttggcgttttgtcacttaaaatagtgaaaattcacttttttggctttttgtcactatttttcattattttgagattttttgtaaaatttattaataaaaatgtcaaaaaaccaaaaaat

SEQ ID NO: 5966 - DNA, 2435 bp, Heterodera glycines
tttcaagagttccaccattgtaaaccgttacagcaccgttttttccgggactttccgaaatccaattcacggcacttttctcgttcccgaccaaaatctctatttatttttttctcatcactggaacatcactgtaagaaactgaaacttggaattttctgacaattactctggccaagaaaagtgaacatttttgatcctgaaccaaatacttgcccccatatacaaatcattattatgatcaaaaagttttaaaactttcaatttcgacaaactaaccatcccattttgtattggccaaccccgccgggcgatgttctggccaaattcgggtcggccaaaagtgcaattggcttcggacaatgggcagcttccccaatgttgccagttggtccagtgactatgaacagtttggaaccggttgaccatccttcgatcaatgtcggatcagtgccgatcattgtaggtcgaatgtacagcgatgcttcgtccgaacttggcacccaatcctgatcagtccgcaccaattcgtcaatgattttcagcaattcatttccgtcaaaatcctgcaattttttatattatgttgaagaaaattaattaatcacttaaagcaaaaatttatactatataccacactgacaaagggccgacggacagaggactcacaaagacaaacgactaaaatttctttaaaatcagcgttgcttataatttttttaaaagttttttttttataaattgaagcattttatcttttaatttttttttgtgggtcatttgtccgtggtattttgtctttgtgtgtacgtttccgtgggccttttgtcactacaccctttagagggcaccgaaattgtgtgttcttttttaaatggcacgaaatgaaattttttttgggataattcggtggtcaaagtaagttttaaactatttttactttgtaccaactaattttttcgacttggatgatacacaaaaacagcggacaatggtttttcccattaataatgtcccagttttcaaaaaaaaaaaaaattatgttcccgatgttgcactgatttgcgagatttctagcagtacaacattaccaattcagattaacggcaattttaccggtagcattaggcgtgccgctgttcgtctcatccgtgcaatattcttttcgggacgaaatagtcgaatatggttgtcctgaccgcggtaagccttcatgccttcaaacagttcgatggcataatgtaaagcctaattaaaatttaaaaattatttttaaaatttatttgccccacctttgccccggggtgcaattggagcggatgtaatggagaaattaacggttttccccatcctttggcatcggaccagtccacctccatcatatggtccgaaaaattttggccaaatttcaattggccattgacaaacggttttggctttaattcttggcctgtcgcttgaacaatgctcaattcgtcgtgctaattaaagcgtttttaaaaaataataataaaccgaccaaaaatgtatttctaatatttgaaactgtggagaatttagcaagcacaaatgaatttaattgttttgcagaagagaatacattttttgtagtgtttttaatgatcattttttattaaatatatttaatcttaaacgtattaggtcaaaaaatttaattataattttaatttggaaaaataaatattattttcgaaagagatcattttggtaggtgcaatcacttcactttacatgtagtggcaaggtttttttccttttttgtaatatttattaatcaatttgtagttttgtgattaatgtgaattaattatttgaattggttggatgaatgagaaaatgtgcaagaaattgcgttttgtaatttgttgcgttaatttttttaaatgatttggacaaattaattttggcctttaattttaatgctgttaaataatataaattcgaataataataataataataataagcaatcgccagttatccgattgtaaatttcttcttatttcccccctaaaaatcgaatttttgattttaaattcgaattccaagagattttaagaaattttgagaaattttccttttttatggaaatttacgatatgtccatatttttgcgatgtagatctatattttatggccatatttcgcgatttttttatatcaatcaatatatttgcgtcctaattaaagaaaaattttgaaaaatggaaaaaaaagtatttttatttttttcgaaggtctttaaaaatatcaaattttattatatattaatcttatttttttaattaaaatcttattaaaattgttttcactatacaattttactaatgacaaagatttattaaagagcggaaatacaaataataaaatgaaaatgaatattaaaaaggcaataaaacactaaaacaaattca

SEQ ID NO: 5967 - DNA, 2180 bp, Heterodera glycines
  unsure (1)..(2180): unsure at all n locations
ttattcatgtcctttgcattgtccctttttctgtttttgaactaatttaaagattaaaaatttattaagccaaatttagttcaaatttttcatttatttataagtttttgtgaacagaaaaacgcgaattctcatattttacgaataaaaattacccattttgagcaaaaatgcgtttaaaatttcaaccgaaatgcagcaataaaaatattttttgctctctcccgatgatcattacttcagatattgcacaaacacaataaaaaaaaacaaggaaaaaatgaaataactaattaaataattatattgctatttgtatagggccgtgagtgtctcacactcatttggatgccaagctggtgataattgaattaatcgcgactggatgcaaaaaacatggatggatttagtaatctttcaaacagaaattagccaataggaattggtggatttgaaagatctcaggcataattattcttgctgatcaatgttctagattttagtaaaataagcacagtaattcccgattttcactttcttgacgctgaaattcgggttcagatttcaattataatcttcgccctatattaatttttatttaatttaataaattattaaacattaaatcaaaggaaaattgatagaagacttctcggaatgtgttggcatcaccacactaacatcgtttggtgaagaaaaattgctcggcactttttaggattacacttgcgctagtttaagcacaactgtacttcgccaaatgcttgttggttcaaatgccgcgctgtggaccacggggcacgccatggctgttctgtttgctgtgcaggtcgagcgcggaacggacggcacttggcgtggccatgaatggcattgaaacgagcgaggaatattagcatttatgcgttaattttttattgattgaaaatttaccagattttcccctgccctgtttcgggtcctgtatttttaaactgcaataggacccgcagacctattaaaacaggaattttcatccgtaatcctgttcgggttcaacttggaaaaccagttcctggtccggggtttttcaaaattcgagggctctaatattttgccatttcaaagattcgtatgcacttttaggggcacttttgcaagaataaatttattaattcacggttgctccctggggtttcatttttgagagtttctggttttgaaaaattttcaaacatttttttttattttatccccgttgatttgttttgtctcttattttcaaaagaaaaaaataggtaaacaattcgacatagacaaattagaaaatcctcaaaaaaagaaataaaaatcagttaaaataattttgttttttaattgcatcttaagaaaatatgttttttccacttcagcttcaaccaatgtttgacgcaacatatggtatttcaataaaatttagcggcaactaagcaaatttttccacagtcttcgaaattttattaaatacattatttccgaacaaaaaatattcttttttataattttaaaagtgaaataaatattatacaaattcatttaaaaaaaaaaaaacttttggtttcccaaatatctttagccgattaacaccctcaaatccaatggtcaaaattgaggaaatttctttttccactttttcaaggttgtttttccaattcccaatttctttgcaatttttctgtcgttaattttcggatttctttctttaattttgaaatattgcttcatcttttgtaatttgtcctcattggaatatttactttgttcttaaaaaaataatttaaatatcaaaataaatttttattttacttttattatattttggcaacaattcgnttttccatcttcggaatgtctctttaaaaatgcccaattccttcacaaattctttttgtttgccttggccatataaacttttaaattcatcaattttttctataaattctttctttttctgctcataaaaactatttttcattattttatttgctttatattaaaattaattcttttttcctttatatattttggccgcggtttgccccaaaaaattttccaattttaagcccaattttgaaacttttttttcccttggaattttccctttttggtttccgtttttttttttaattgcttccaaatttttgggatattttccctttttt

SEQ ID NO: 5968 - DNA, 2648 bp, Heterodera glycines
ttttccactttttcaggttgtttttccaattcccaatttctttgcaatttttctgtcgttaattttcggatttctttctttaattttgaaatattgcttcatcttttgtaatttgtcctcattggaatatttactttgttcttaaaaaaataatttaaatatcaaaataaatttttattttacttttattatattttggcaacaattcgtttttccatcttcggaatgtctctttagaaatgcccaattccttcacaaattctttctgtttgccttggccatataaacttttaaattcatcaattttttctataaattctttctttttctgctcataaaaactatttttcattattttaatttgctttatatttaaatttaattcttttttccatttatatattttgtcgcggtttgcgcctaataattttccaattttagcctcaattttgacactttttttcccttgatattttcctttttgcttcagtttttctttaattgcttcaaatttttggataatttcgcttttttgttggtcatttggttccattttgctattttgatcacttttgataacattttgattggaatattcactcattttatcaattgattcggttcccatttcttctctgttttcttcattttcatttttgtcccattctttgccgaatatttcatcaaaatttggtcgaattttgcaggactcaattttataaataaagcaaaatattaaaaatattatatgccataaattcatcttttcttttgagaaatcgaatttattgcattaaatgaatttatttaattttttattcagctttttaatattattatttcacttggtatttatattctcttttttaacaaatctttgtcaataataaaattgccacgttattctaagcagtgaatttaatttttcacttacaaattagataaataaataataattttcctattccattcattaatttcgaaatatttttttatctttattaggtaatttgttctcattggaaatttttctgatcgaaatcggatattctttactaatctttattaagcttgtttcaatttcgataatccaccagaaacctaaaatttattttattttaatttaatttatttttcttatttatttatttaccttaaaattgcaaccagttgccttcttaatgtcttcaatgctgtaattctcgtgtatttcaattaatgttaagccttcttttcggcacacatcgaaaactgcctaaaaattaaaaaataattctaattaaaagttaattaatcttttattaggttgggtcattcataattaactgtacagtttttacattaatattttttgaccaaaaaaaaatataatagtttgaagaaaaatttatgaggcactgaatttttattcattttaatgccaaatttatgcatttcatttatttaaatattttttatgattttaaaatgattaataatgacccgacctaattaataattgatataccatttcagtgattattcttgacaccacttctttcccggtcaacggtaatgtgcaattttccaaaattttgtgtttaccatctttggcgctgtgctaaaataatggattatattaatccaatcccagactataaatccttgacatttaggccccattcaataattcttactctgtttactaaccccctaaaaagaattttcttatgcgataaattgataaattgttggcattttttaaaatttatacctccatcaaaacgacaactcttgagcctggtgcactcactaaatccattgctcctcccattcctttcaacatttttcccttaaaaattatatattttacattctttttatttttaatttatttaaaaaaaattcgaagatgactttgatgaaaataaataaaatttatgaaacaaatttcttgaaacaaattttttttttagaatttattttttaattgcttagtttttgattaattattaaattttcatcaaaatcgaaaatgtaactttttcaacaattttcaaaaggccgaactatttacaatataattttgtcattctgtgtttatttgtctttcccaccggaatcatccaatttgccaggtcccctctcattgacacctgcagcccaccaagcattgtcaaatcgatatggccgctaaatttacaaacgttttttatggaaatttttgtttttttgaccccctaatcatggcaaaagattcatccgagctaaacacagaagcaccaggattatatctgaactattaattaatttacataaaaaattaatataaatcatccgaacgtgatggactcttttccagcattcacataatctgggtcctgctcgcccgcaatcggatattgaccctgaaacaaatttgaaaattgcatttaaatttttacatttttatttaaataaatgattttcatcttttttttcgtgttttttaccacgccaagcatcccattttctgcgtgtatgcacacttttattgacttgtcactgatatacgaagggcaaagggttggaatgccaatgccgagattaactgttcaaaaaaaaattttttaaatcataaaaacctctcaacgagctgcagcccccctccccccccccccactaagtaa

SEQ ID NO: 5969 - DNA, 2203 bp, Heterodera glycines
ggggggggtttattaagggggagggcgggaattttttatgggttataggggggggatgcgagaattttgggggtgtataggggagaatgcgaggagtggctaaatagaagaggtgggagggggagttcttattttttatcttttgtggggagagggggggggggattattaatatgttttaaagggggggggggggggaatatggtcagtggcggatggtgttgtgctccgtggacagaagatgagagagatagtgtggaatggagagaggagattgagaagagagagagagaaagagggcaaagaaactgagagagaacacttaatttagtaagtgcccgtggggggataaaaaaatggtcagcggtgggggggggggtggtgtgctgagtagacagaagatgagatagtgtggaatggagagagagagagaaaagaacgcgaaataaaataaattttgcaaactcaaaaaggggattttcttttgtttaacacatacacatacaatttttgagaaatctaataatttcaatttccattcatttttttacaactattttgaaaattaaacaaaaaaaacaatggcaaaaattaaaattttaaaaatattaataatttttcaaataaaagaataatcatttttatttttattccacaacttttgacagatgttttgacgtggcttggtggtttgatcagcaacaggcaacaaccgaaacaggtgttacgcaacaaacaattgaaatgataaaataaaatttaaattttaaaaagggatataaattgaaaggtctgttgcttctttcaatgaaaataaattataagcgatgtaaataacatattctgcatttataattagtagttaccctaccactctcatcgtggggtgtgaaaatgattaatgggttttcgggggagggggtccctttgatcttgccgccctaattaatcatggggggcagctggtaattaataggtttcggggaaggggtggtaattaattatagggggggggttaattaagagggagtgcgcgaatttttcatgggtattagggggtgagtgcgcgaatttagggggtgattagggacgaatgcgcgaagtgactgaatcgagaaggtgtgagagggagtgatcattattgatctctgttgggatgagcgggagggggataattagaatgtgtcaaaggggcgaggggggggggaatatggtcagtggcggatggtgttgtgctccgtggacagaagatgagagagatagtgtggaatggagagaggagattgagaagagagagagagaaagagggcaaagaaactgagagagaacacttaatttagtaagtgcccgtggggggataaaaaaatggtcagcggtggggggggggtggtgtgctgagtagacagaagatgagatagtgtggaatggagagagagagagaaaagaacgcgaaataaaataaattttgcaaactcaaaaaggggattttcttttgtttaacacatacacatacaatttttgagaaatctaataatttcaatttccattcatttttttacaactattttgaaaattaaacaaaaaaaacaatggcaaaaattaaaattttaaaaatattaataatttttcaaataaaaaaataatcatttttatttttattccacaacttttgacagatgttttgacgtggcttggtggtttgatcagcaacaggcaacaaccgaaacaggtgttacgcaacaaacaattgaaatgataaaataaaatttaaattttaaaaagggatataaattgaaaggtctgttgcttctttcaatgaaaataaattataagcgatgtaaataacatattctgcatttataattagtagttaccctaccactctcatcgtggggtgtgaaaatgattaatgggttttcgggggagggggtccctttgatcttgccgccctaattaatcatggggggcagctggtaattaataggtttcggggaaggggtggtaattaattataggggggggggttaattaagagggagtgcgcgaatttttcatgggtattagggggtgagtgcgcgaatttagggggtgattagggacgaatgcgcgaagtgactgaatcgagaaggtgtgagagggagtgatcattattgatctctgttgggatgagcgggagggggataattagaatgtgtcaaagggg

SEQ ID NO: 5970 - DNA, 3179 bp, Heterodera glycines
gaagaggtccgtcggtggagctgcccgcgcgctcggcggtgggagtccgcagctgcgtttggaggggtccgtcgaaggtttttgtttggagggaagaggtccgtcggtggagctgcccgcgcgctcggcggtgggagtccgcagctgcgtttggagggagtcgtcgaaggttttcgctcaacgggaggggtccatcgaagagggcggtactcacctggccgcattacattaagatggcgtacgcatcggtcatttgggtggtcgattgggatggcgtacgcatgtaatacggtacccttgaggtggtgtgcgtgtggtgatacggtaccattgggtggcgtgcgttctgcgtacgatgcatctgccgtaggcattgtacgcatgtatgataccgtaatgggattctgcgtaagattcatctgccgtaggcattgtacgcatgtatgataccgtaatgggattctgcgtacaatacatctgccgtaggaattgtaggcatgtatgataccataatgggattctgcgtaagattcatctgccgtagtcatcgtacgcatgtatgataccgtaatgggattctgcgtacgatgcatctgccgtacgcatgtatgataccgtaatgggtttctgcgtaggatgcatctgccgtaggcatcgtactcatgtatgataccgtaatgggattctgcgtaagattcatctgccgtaggcattgtaggcatgtatgataccgtagtgggattctgcgtaagattcatctgccgtaggcatcgtacgcatgtatgataccgtaatgggattctgcgtaggatgcatctgccgtaggcatcgtactcatgtatgataccgtaatgggattctgcgtacgatgcatctgccgtaggcatcgtacgcatgtacgatttctggaccgttgaatatcgtgagtaagttgatgcgtacgcacgcatctaccgtaaaaccttaatctaccatagtcatgtagacaacgtaggcatcaagaataaatatgtgttgatggacgtacgcatttctggagcattgaatatcgtgagtatgtggatgcgtacgcacgcatctaccgtaaaaccttaatctaccatagtcatgtagacaacgtaggcatcaagaataaatatgtgttgatggacgtacgcatttctggagcattgaatatcgtgagtatgtggatgcgtacgcacgcatctaccgtataaaattaatctaccatagtcatgtagacaacgtacgcatcaagaatactacgtgttgatggacgtcgccatttctggagcgctgcgtacgcatacatctaccgtgcgtatcgtacgcatgtagattcttttaaacaccatacgtatatagaaatgtttgatagtcgtagcatctggagtgctgcgtgcacatgtatctaccgtataatacgtactatttttctaccgtacgcattcctggagtgtacgaattcttctaccgtacataacgtacttatctttctaccgtagactattattgtgcgtacacatgagtctactgtacgtaatcacgtttgcatttattgggatgttacgcatatagattaatcaattagtctctctctttctttgttgcgcaagaatgtttacaaggcattgtcgactgacagattgtttataagaaggtgggagttcacatttcttctcattcgttcattttttaatacaaaaatttcgtctccttgtcctcaatcaatattttaatttaaaaaattaagcattaaaaatcattaaatcaatgtcaactcaacccactagctttttcaacgtcgccatgccgccccttggacaggtagaacaacttgttcaacccatgttcatcaattcggcacatcagcaaatgccggtattttgatttgtttttaatcggaaacccattctgttttagtcaccattttgtgccgatggcactcacaccattcaatttttgaatgggagtgtctccattgtgggccgcccgctgccgtctgttattcattgcaacgtttcttcaattcaattgattttttcaggccgctttgtctcaccgttgtagcattggaccaccgtccgcaccaacaaacgccagctggctcactcccggtgaccaatgttgtgctgcgcaatggcgacggtcagcgtgtagaagcctcgggttggaagcaacaggccagtgttctggcgtctttgaacatcgggagcacctactggttcaccaactgcactgcgcgggcccgataccagcaactggactgttggtaccgattggcgtcgatggcaaaaatgccattgtcgtccctcacactgccgctccacaggtaagtttttttatacgtttcttataatagaattttgtgttaagccgacggctccgcaaagtggtggactccgccattcaattgcctccattttgggagaacaggtgattttcattgattcaaaaaaaaaaaattaaatatggaaatatttaaggcgccacatgttcagacgggtggaggccgcacggtcaatgatgcgcgtgcccctcccgcagccgacccaattgaggaggacgagaataacaatgtgagaaaatgatttttttttttgtattgtgtttttttttttttttttttgaataaaatttgctcagacaattgatcatcgttttgggatcccggtgcgtcatcagagacgggcagctcaagtggttggttattatgatttgctttttcttgaataatttaaccatgaataaataatttaaaggtgactcgaccaattgaggactgtttcgtcattgagaggacgacgccaatgcgcaacacactccgaaacacgaggggcgaactctgcgaaatccgctttctgcctctggaggatgccgagcgacctgatctccttctggagacgctcatccagcatctgctcgaccgtgtcctggaaggtcaccccccaccgatgctcgttggacttcagcttcacccgccaggcttcgaccgaccgtatgtcatccgactccgcccaccggagcaaaacaacgcagcagcattggcggcggccattgaacgactgaacgaacagtcggcagctggaatcgatcttctcgccggaactactgttgcgaaagtgcttgctgtgtggcccctggagccaattcgtgcggatgcgcagcgcggaggttgt

SEQ ID NO: 5971 - DNA, 2115 bp, Heterodera glycines
ataattcactataaaaatttcttaaaaaaatttatttttataattttcttataagaaaaaactatctaagattaggttaaagcccccggtggctctcttttctaaaaaccggtaatttatttatttaaagttagacatttttgtgaaggtagaaccatttgctaaattcaaaaattatacttatttctaagaaaacgtacttgaatttgccagcttttctctgacgcatttcctattttttaaagaatatcaccgatgagacggtggccgatgttgcaaaaaattgtcatcaattggaattcatatcactctccaattgtaaggagatcactgatctggcaattgtttcaatttctcaaggatgcccaaaaatacggtaaaaggaacgggaaattactgtagaatggctactgtaataaatatatacaaaattattcattcattgagattacggtaccataaaacttcgcgtatttttgaatcgtgaaaatttcaatatattttaaaatcatatggttaattaggtatgtagctcaaaaattttctaggaatcactgtaccattgcaattacggtacccataagtcatctgttttttaacaataattagccaatcaattaactaattaatcgtgtttttcagctatttttaatttaaaaaaacgccctaaaattttttgacgatattttacaatattttaacattttttctgttgtattcaagtgcatacatataattgttatttttctcagaccctcctataataattgcgacttttttaaaatttttattaattttaatactattttattatttaaattacattattttaattttaatttttatgcttagtgatcttgaattggctggctgtacaaacttaacagatgcgggctttgttcaattgtcaaaaagttgtcatgagcttgaaagaattgatcttgaagaatgtcttctaatcaccggtcaatttttttttttataaatttaattaaatttaattatttttttatatttatttgtttttttcagattcaactctgacaaatttcaacgggtgcccaaatttgtacagtctttccctatcacactgtgagaatttgacggacaccggtttagccgaattgtgtggtaaatttaaacattttttaattattttaaataaattttcaaatatatataattttttttattaatttgtaagttaagaataaaatttttttttattttctcataaatttaaaggaaatgataaatttaatttgcagatttaactcgacgactcgagaaattttttaaaaaattgttttcagatgagaatttaaaaagcttgaaaatttctgcaaccgaatttcgtacacagctttatgtatttatagaaatagaattttagaaaacattttcaatagaaagttttgggaaaaaacctaaaaataattttcagcactttttttttagaattttttttttgaaaaacttaataatttatcgaaaaattttgaaaaaatagctagaaatttaaaaaaaaaaaaatttttctttacttttttttttaaatttcgggtggcgggggaggacagcggggaggaagaacaatgtgcatccttatttaaattgatttaaatttataataaaaataataatttaaatttaaatttcagtggcccatcgagaaagattgcaggtgctcgagttggacaactgcccaaacatcactgatcatacgttggaatccatgaagcatttgaaggtgttggagcgcgttgatctgtacgattgtcaattggtcaccaaagatggcatcaaaaaatttaaagtaattttttgtaggtaaaaataacatatttttacatactattaaaattatattctacaaaaaaaaatatataattatttattaatagagttcgacattttgtaaaaagcctggtcctggacctgaattccatgtttggatatggcctggatttctggaaaaaattccaggaaaattcaggcccaggaaaaatccaggcttgtttgcctggatccagccaggcctggacatggatttttttttataaatttgttttgaaaatcaattaattgcttaggaatatctaaaagtatctaatt

SEQ ID NO: 5972 - DNA, 1521 bp, Heterodera glycines
tttatgaatatatacagtagcttgccgagattccaacattcaccccatgcccactggatttctcaattactatttgtctcaaaatccaaattatcattagggacagggcttttaagcataaaatggctaatttaatttagcaatttaattacgcgtcaaaaaattcatcaattaaacacgaaataagcatatgcatattagcacaaaaaatcgaaaaataatgataaaattttaaatttcactgtccgaatcacagagaaagttgaatttttctttaaataaataccaaaaatgcattttttcgaaactgtaagaaatattaatttaaataaaattaaaaaaaatcaaattcttaggggggtacccatttttgatatgaatttttatgtgctacattttttttgtttcgaaccccttggcgcaatttaggaaatgcccttccactcctaaacactacactggcacactgtacagcccagttcggtattttttttttaaattataagcacctcaacctgtcatactgtacctgccaatgcggtattggctcatggtagtaaatcatttcatcaaagtggttctcatctaatgtctccattaatatttcacggtcccacctgtcaatagttgtcgtggcaatgccaatgtcttcaatcatggcattggcatttaccatgggcttcaaaggcatcttaaaaaggtgtgcatggagtcagaattaaccttttttaaaggggtgtcgaccgccccgtgacatgggaaatgcgtcagtggaaaatgcgtcagtaaaaaatgcgtcagtgatacaaatattttaaaataaagttctgtagcattaagtattataaaaaaaatataagtaaaatcatataagattgtcgtacttaattccaaacccctgacccaaattcgaacaaaaagtcgaaagtccaaattttcgaaattgcgtaaaaatttagggccaaaatgaaatgaaatgaaaaacaaaaacaaattgtcattaaacgggaaaaatggaagaatactaaaatataaattcaatctttttttattgggataattattaaaagagagttttaattgcttaaattttttaaaatataattattttaataattttcgagtttctttatatgtaaatgtttaaaaaacctcaattaaattgataaagaattgttttttaatttcaaaatttgccacgtaaactattcttttggcaaattgtcttccatttttgagcaatttgctgaatttattcaattggttttcgttttcttcaatgtgcaagaacagtttattaccacgttgtctgtaattattaaaaaaattgtgttaggccgtcggttcttaaaaagtgccaattttacagatttttcgagaaaaattcggtcataaatttgctaaacgcaacacaaattagcataaaaaattccagaaaatttcattcttcaaaaatttgttaccaaaaatattgaaaaaggcaatactatgccaaatttttctcgcaaaaatttgtaaaat

SEQ ID NO: 5973 - DNA, 1968 bp, Heterodera glycines
gcataaaaattccagaaaattcattcttcaaaaattgttaccaaaaatattgaaaaaggcaatactatgccaaatttttctcgaaaaatttgtaaaatgcacttttacgaacacccataatgacacttttttgcgaaacgacccagcacaattaaaaataatattatattacaaactattttcataaaaagcataattatggatttacattgggtttattttgaaattaaaaaaattgctaatatcattttacatcaaattataattaatttcataaaaagcataattatagtatttacattgggtttatttttaaatttataaacatttaaattcaatttatatcaataatattataatacaattaatttaattaaaaaatatgcttataaatttacataagagtttattttgacattaaataaaaattaaatatcattttacagttttcgaagggtcattaatagggtcgcgacttttagtgacgaaaaatctcgaaatagttaactaaaatagtggcgaaaaagtgccgaaatagttacaaaatagtgacgaatagtgacataattctcagccaaaaattgagcaaaaataatttttattcactagttgcaggtgcaaatgagtaggactgggatttttaagaccaaaaaacccaaaatagttacctatttttgccaagaaagtaaatttttgagaaaattttttttcatttcatatgtaggagtatattttgaaaaattttagctcgattcttaggggtgtatttttttgaaaaattttagctcgattcttaggggtgtatttttttgaaatttttttaggtcgattcttaggggtgtattttttggttttattgcatttttgttaaggaattttccaaaaaatgtcgaaatagtgacaaaacgccaaaaaagtgaattttcactattttaagtgaccaaatgcaaaaatagtgatttctagttccaaaaaatgacgtccaaatgaaaaaattttaatgcaggaatgcgttttttgagctcctttcttcaaatcaatcgagtaaaaaaaaaagtgttttcactagaaatcgtgtccctagtcattaaactaattgtttaataagaaatgacaaaaatttctcaaaaaaaaaaaactcaaaaatctccaatttggcattgcttttttttacctagcatgttggaccaaaccgtgcacacatttttgcaatatttgatactttttgttatagttgatctgtccgaccttctctttattaaaaaattttatggctaaaagtgccgctttgttgggcgatgaaaatggcaattgttggctgttgttgaacgggttaacatgacgtgcaatggcctggtcttgtgcgtcctgttgtaataagggtaataagcagggttgccatggtgaaaatttttcaaaaatcatcattttgccaacaaaaatcagcagtttgaaaaattttatcccaaatgaaaaaaagcaataaaaatgttgtttttttgcggcgctttttccaaaaaacttttggaaatatgttggtgggttggcggaaaaattttcaaactttgagtgcaatttttgttaatagatttttttaccaaaaaaaatgaccaaatttttgcaattttgagccgattttttaaggaaaacataagtttttgggatcccgacagtgccgaaagacccctccgggtaaaaaaatcagaaattttgaccaatttttaacagattttcactaaaattggcaatttttaggtcattttagcgttatgaaaatcatcattgacccccttgaaatcagcaaaatgatgataaatcatcacatctggtagacctagctgataactaaggaacaaatttctagcgggtgaaaaaatgtaccaaaatattggcgaaaaaatggcggaatgtggacacaatgccaacaaacgccaaaatgtttttcttacttttctcaccgaaacaaag

SEQ ID NO: 5974 - DNA, 1335 bp, Heterodera glycines
aaataaatttgaaatttaggcagctttttttagaacttttagaaaatgaaattttaaaaattacgcattccggcaattttttttggcttgcgaaaaactatggtatttgctccctaacgctttcgaagactttgatttcgaaatccatcatcgagtttttttttccaattttttttataaaaaaattttctccccgacgagattattactttttcacatttaaaaaaaaatttctacaatcatctggacaaattttgtcgggaattctctcccagaccaccgacatttctctccccaaaggtcagggagcatttcaaacgaaaaaccattctaggtttggtatattgtattaccatattgctttaaaaatttgtacaaatcgatgaagaattaggcaaaaattgaaatggagtggagggagtccgataaaatccctaatttcaaatttaaatttaaaactgtgcctcaatcgctgtgccaagtgtaatgacagccaaattttccagtatcccttccggtgccaagcgttccgttatgaattcgcacgtttcgatcatggtcttgagttctcgatcatcaccagcggcagcccaattcgggtgctgttgttgtaaaattaattgcaccaagaaaattgtggcacaaagcattgccaatgccatatctcttcaaatttttttctagaaaaaaagccacaaatttcgtcatttttaaaattaaattagtattttcagaaaaaaattcaacaactccctaattcataaatttaatatgaaaagaattttccagcatattataaccagggataagattttttggtgcaaaaaaatgccaaaataatagttactttttaggttctaaaaaaaaacccaaattaggtgctaaaaataggttttaaaaactcgtaaatagcttaacaaccataaaaaacatgtttttcatgcttttctggctacggggagcagggctgggcgaagctcggcttagcactcgaagccgaattaatttttttcgaagcacgaaattcgaagttcgaagcccaaaaaccgcgaaaatatttgacgaaaaatggcaaaatatgcaaaagaatctgaaaatatgcacaaaaaatggcaaaatatgcatgaaatatgcagaaaaagccaaaatatgcataaatatgcaaataaaagtcccgatttttatacgcaaacacaaaaaagaaagtgtttttcctgctatttagagcattgagaagccaggaaaaaaaatatgcatttacatgttttttgcatccctgataattaatgttttaacgaataaatttttccttttttgattttgaaccagtgcaac

SEQ ID NO: 5975 - DNA, 2903 bp, Heterodera glycines
  unsure (1)..(2903): unsure at all n locations
atattctcactattttcaatatttttacttgttttaattgtttatttttctgagattctattaatattttatttttatttatctttttaatttaatcataccgtaattttaactttaatttggttttaattttttaaattatttttaatttaattttaatcctactttatttttaattttttttatgtttattttaactctattataataatataacaattttaattttactcttaccttattttaattttatttattttaaccataattaattttaattttattttgaattatttgaattttatttcaactttaattataataattcatttaactaaaattttaaaattatcacaagcgagctctcatatatcccctgcgtgcactcatttggcatacgcgagagctcaggtggcctggtgttccttcccctccccaaaggacacgaagtctgacgtcctttcccttctctaataggatttggctttggattttcttaattagtttatatttaatatttaattaatattttaatttagttttcatttatttaatttacctaattttaatttattttattttatttttaattaatttaatttaattttaaatttaattttcatttatttaatttacctaattttaatttattttatttttaatttatttaattataatttatttaattttatttaattttaatttatttaattaattttatttaaatttgactctcctgataaagatttcggttatgttgattaaagatgaataatgtactataatttgagaaagtgatcaattttcatttttcctgagtaatcaaatgtaagtaataatggtaaatgcaaaaactgcagccaatgaggatccttttttggataattattattttcatttccaatctgatcattcatcattgttctccatacaatcagttctttttgaataatttcaatgttgtgcagccaattccctggagttcgcatccattgggtccattcattgcactgaagttggactgttcaagcgggaaggtgtaggagcccacgtcgttgtcggagaagttcggaatggtcattgtcccagtgacaaagtccaattcagcacaaccgaatcgatttacctttttttttttttttattcattattttttatttattatattttcattatgtttttatctatctcatctctctaaacctcatttgcatttctcaatatttctctctcagaatttgcctctctttctctctctctctctttctctctctctttctctctctctctctttctctctttgtctccttattcccttttacctctctatacacattttttctctctctctctctctctctgattctctctctctctctttctctctttgtctccttattcccttttacctctctatacacattttctctctctctctctctctctctgattctctctctctctctctctatctctcttcacaaccacacaaacacaattaatttgatcactccatttgtggtccatgctgtttggcctgcaaacaaatactgcggctcattgctggttgcagtttggcgtttgaccataaattttccaggtacagtttcatatttgaaaaatgtacccaatttgagatggagtacggtctaaaacggataaaaaatttagttttttaaaatttattccaatatataattttaaatttatttaatttttatttatttaaattttatcatttaattattaatttcattatgtttattagaccttttttctagcatgttcaaaatcggctaacatttgaacagcatcttgtccaataaaattttggcatggctcccaagttgtttgattataaccgctccagcaaacgtgccactcatcgttgccatacgcattgattcggtggtcaattattcgttccagctaaaaaattatgaaaaagcacataattactaaatatataattacatttttatttgaaatttgaaaggatattaattttaattttttaatttataattaaaacttatattattgacctcataaatatcatctgcagaacactcttgatgaagctgagcatgaaattcttgctcatgaggaaaaatgagttgttgttgttgttgttgcgtaggaggaaaagcgttcagttgcggtaaaacataagcctccatgtgttccgcgggatttgtttccatttgttgcggcacgggtggtggcaaaggagggtgaattagtgattgaatttgttcaatttggttttggcaattgtgcaattgctgttcgatcaaatgaatgcggtcattgtttggacattctccctaatttttcatctcatttaaattaatttacattttttatgattttaaaatctcacatcattttccatttcatccacaaaattgtctacaaaattgtctaaataatataatataattcatttaactaaattaaattcagtacttaaatccataaagtcaagaagcggggaaactgacatttgaagtaatatttgaacggctaaatttagaatgagaatgaaaccgagcatttcggggcttaaatatcatcgagaattaattttcttaattgtttatctattaaaaatgtaggaaaatgcaaaaatattgttgaaattgctattgttgaaattgctattgggaaaacaagcatcaatggcaatattgtgaagccaaatgttattgtcattgacctgtcatatctctattgttacttactgcgcggcatttggggagagcgaatcctaatattaatgttccagtgatttggtttggggaataggtgaatttttgttggtgaattaataattatttacctccanatgatttattacatttgatatatttgcaaattaataaattttattttatttattt

SEQ ID NO: 5976 - DNA, 1896 bp, Heterodera glycines
aaattaatttccattttttatgaattttaaattttcccattgttttccatttcatccacaaaattttcttaccaaattgtttaaattaatataatataattcatttaataaaattaaattcagtacttaaatccataaagtcaagaagcggggaaactgacatttgaagtaatatttgaacggctaaatttagaatgagaatgaaaccgagcatttcggggcttaaatatcatcaagaattaattttcttaattgtttatctattaaaaatgtaggaaaatgcaaaaatattgctgaaattgctattgggaaaacaaacatcaatggcaatattgtgaagccaaatgttattgtcattgacctgtcatatctctattgttacttactgcgcggcatttggggagagcgaagtctaatattaatggtccagtgatttggtttggggaataggtgaatttttgttggtgaattaataattatttacctccaatgatttattacatttgatatatttgcaaattaataaattttattttatttattttattttttaattttttacctcctcagggattttttacctcatggattttttcactttttattggatttttttttcacctcctcaggtattttttcacccttcagtgatttatataaattattattaggtgttttttaaagtttaaatttggtactgaaaagtccctttccattgggactgaaatggcggggctgaaaattaacccccaaaatctgcatgggtaactactgttttgatcgtctaaataattttatttattaaagaatcaagaagtgatttaatcttctgaattttatattaatgttttactatgtttgaaataagtgaaggcagtttgatttatttttatgtgaattcacagaaatttcagaacacttgccgttggagcactcaaaaatatcttttttgatcattttttctttaaagttttctaatgaaattggaataatatttttgcatgtattttttaatatattattttaattttattttatagtaatgataatttatttgtttcatggtttaaaaataaataaattatttatttgtattaatttcttatattggtatagatgtttgacccattagttaagttgggaactaatcgtgtttaatattttttatttgttttttgtatattgaagttgtcttaaaatttataatgggacagataaattattcatgtccccctattatttttattttgaatttttttatttttatatatttttaacaatgaataaatgaatctttcaaaatagagtttttataaaataatgatttagccttgccaaatgaaaatattgttatcctcaaaatgctaggtttattcttcttttataaatttaaaatcgagctatattaattattttaatttgttttttatcaaagatgtttctagttaggcatcgtccattaatttatttttcaagttgaaaattgtctttctttgaaaaatctttctttttaccaaagttccttaagaatggtttaccaccaattaatattcaataatttctttactaaatttttaattaatttttttctatttctaacttttttaaaaattttaatgctttcatttttactcattaaattatcattaacttgctagcaatcaattcattaaaatttgtggtaaagatgaggggaaagtttcttaaataaaattttaaaaattattcagtggaaaaatatctatggccatatgctttttacattaaaaaaataaataaaatttatattgaaataatgttatataatctatttgagaataaatagaaaactggatttttgcgaatgcgaaaaatgcaaaagattgtgaaaatggcaaagcaggataggacggaatg

SEQ ID NO: 5977 - DNA, 2884 bp, Heterodera glycines
agaaatggggagaaccagcgcgaaaaacgacaatacgacccataccaaaaatggaccgaatccccgatcaaaatcgcattcaacaaaacagctcgtaataatcttgccacatcatacagtatttgaacaaatgttttaagtgcctgaaaattatgacctctggggcaatgccatcagagctggagcaaaattaattatgtatgaaatgatgggttgaattttttgtatttgagaatgatctttttaagtttggttgatttcggagcgtttgtcggggtttcagcagagttttttatacaaaaaatggggggggggaatggaaagccgggagttatgaggaccagtgatgccgcgggttgagaaaaatttcaggttcgggtttcgggtcgggcactcgaaaaatttcgagttcgggtttcgggttgagaaaaacttcgggtctcgggtttcgggttcgggttggcatcactgatgaggacgcaaacccgaaagctcaattaagcaaaagcgacaaaaagtgccagaataaagtggacagacagtgaatgctgcgaatttttaaaattttcattttccaaaaaagcaaaaaatgcatatttttaaaattcatttctctttctataaacagggaagtcacctgtgttcggtttgaaattgttgatgaaatggtgaagggacagaatggcattgcgattgcagatgatgagcttggcggtattatcgtattattcatatatttttcacttgtcccaattttcattcataaaatttggcacattttattttttcaaatttttattaattttacccatttttgtagcctgcggcgtgtccccagtgggccgtggcggaggatggcaattccttcacctggcaatgactaaccgacggtgcacggatgtaattttggcagcacttaaaatatttgcattcattttttgcctctgttctcccattttgtcaatgtttattttcaatttcactcccatcgggattgaaaagccgggatttaatttgaatttaatttgaaactgcttaaggtattcaatatgtccgtcgttgctggccatgaattgatgcacgcgcttggctttgtgcatgagcaaagccgaagtgatgcccggaattacgtcattttacggaaaaatgatggagtaattaacaaacatttcaatataatttttcatttgctcattataaagtattccaaaattgaccaatacacgcaaaactttggcttcgcttacgatttcgggtcggtgatgcattatgaatctgggggcaatcataaaaagtatgaacggttggattttaattacctaaaattggaattaaagaggcttatacgacctgatcactttgccacgcttttaccaacaaacgattggccaacgcgaacaaatctctttcaaagacgcggccataattaaccaaatttattgcaaaggcaaaccaattaaacataattaagtaaattttccatttgttcagactcatgcaaaggccatgaggacaagtgccaaaacgggggctatttgaatccgaatgattgcacaaaatgccattgcccggacggaaacggtggccaatactgtgccgcactcgaagagagtgagcaattaatcaattcaacaattaaagcaattataaataaatttgaagatttgaattgcgaggatttgagtggaattccgagagaattggtggccaatcagtcagcagtgttattgaaaacgaaggccaaatatgtggggaataagccgtgccgatgccattggcgaattaaggcaataaataatatttttgaaaattttaattattttgagtgttattaatgcaaattttaattgcttttagcctgaagcagggaaaaaggtgcgaattcagttcaaaagtttgagcaatttgtttgaatgcacacacaactgctcatcggcgtatgtcgaggtcaaataccgagccgacaaaagagcccaaggcaaaaagacaaacaattaactaattaatcattaattagcaaaatgatggctcattaaggtgccaaactttgttgtgccgcatcactcactgatctgaacgcaaatgaatacaaaaattggattgaggcggaaaacccggacatggacattgtcatttccgcgcacctttcaacaaaatggaccgtatcatctaccagggatcacacggaattacgacgatttccgatcgccattcttggggttggaattccgatttccgaattttttgataaaaattcagaaatttttggaatttttttttaattagcaatttttatacaatttctgtatataaaatgcactgaaattttgaaaaaattttcccggcggcgcctttcggccttgaaataaccttttatttggttaagaacgtattcaaactgacgtatgaatcaggcaaggaaaattgaaaaataaatatttattataccttttaaattttttaaaaattaacttattttaacttgctttcgttttaaatgctttactaatcagaaccattacaaaatggaaaattaattgttcaaaaatctgttaaggcaacgccaaactcataaattcgagcaaatgcatgaaagccgataatttgtttgccgagaaaaggaaccccggccacagaggtttcacgtgttatgacgaggtcaaacaccaattttatgactgctcctgtcacggtgataagaaatgcctcgctgaagaaaaatgggcacacgacgcatttctttgccaaataataaaggcaattaattaattaattattaattaatgccaaaagacaccgccacataaacatttcatttgatacataggcaatttaatattttggcattaaaaattaccattttttgtataaaaaaagcggaaat

SEQ ID NO: 5978 - DNA, 6979 bp, Heterodera glycines
aaataaaaaataataaagaaaggtaaaggatcccattttttaacccttggttgtaaaattggactaacaaatttggcaacgggcgggttgtacaaatttttgcaaatcgttttcagaataaattgaaataatttttaaaaaataaaattaataaaataatacatttaaatatttaattaattgccttttatgcttgacaaaaatgccaaaagtgtgttctcgccactgatcactccgccatgttgggccgcaaattctcgacgtgttcttgtccggaagccattctcgccaccaatttcacactcaataatgtgccaattgtgaagccttaattaatcaatttattattaaaatttaaaacaataaatcttaattatggcaatacattggatcgacaatcagtttgacccgtgtgttatcaaagcccaaattatgcgctgcaattgcggcgcatgccatcgcattgctaaacaaataaataaaattctaaaatgatcaaagtccaataaatacaaacttttccaaaaataagtgaaaaaataacaaaataattattttattggaaatttttttgtgtggcaaataaactgaaaaagccgtaataaatgttgtgtctccggatttaaggcaaaataggaaattttaattccactgatatacaaaagtaaaataaatattttggtaaatcatacacattatcaggcgccaattgacagatttgacgaactggtcctgttaagaattaattacatataattaaaatattaatttttcgggaaaatacatgggaccagagcgtttgggcccccgtttttgggccccggggtcgtttgggcccccgtttttgggccccggggtcgtttgggccccaacccaaaaatagaaaaatgtgcttttttaaaaattaagattctaaaaactaagcctgagggatccctcgccacttggcataagttaggtttaattaacattcgctcattttttacaattttacttattccaaatcctattattttttaatagttaaccaatttgatgtgcattctgatttggacatttttcagaaatggctaacccaattgcaaccaaaaaacaaaaagtaaaattgtcttacgaaggccgcctttacaccttcgctaaaatgagttctgatgggatgacaaaattttggagatgcgagttcaaaaaatcaatttcacattattttggagtttctccggggaatttctcgcaactatcgaatgaacccgtgaatttctgttaatttttacattttttattgttaaaattattgttgaatttatttttaaactgtttattttacatttttatgctgaaatttaaaaagttgtttttactgtgatttttcatttttctgtacttggggcccaaacgaccctggggcccaaaaacgagggcccaaaaacgggggcccaaacgaccctggggcccaaaaacgagggcccaaaaacgggggcccaaacgcgggggcccaaaaacgggggcccaaacgcgggggcccaaaaacgggggcccaaacgcgggggcccaaaaacgggggcccaaacgcccccgactcatatatcggaacctctcgtgcggttccgagtgtcgagacaaaaaatcataagttattaatgagtaaaaaatcaaatcccctatagcatatttttacattttgcttttcctcgttaccagtaccgccaaatcctcctattaaatttttgaaaataatggtgaaaataggttgggctagatcatcgttcaaaaaatttttcctgctcaaaatgtataaaatatttctgaaatgccgatgcccgaattcttgcaaaagttcaaaactcttacgccgaccttcctaacaacgatgatcacaattattaaccgacatccccgtaacattgagtatatgaaaggtatttcccgaaattatcagatgaacccttgatcattctttgtattttttattttaatattgatattatttgaaaaatttgttactttcaataaagtttttttgaaatttgaaaaattatttgatttatttggggccgaaccgtgggggccgaatcgtaagggccgaactgagttagaccggtatatataattattaaaataattttttgtttatgtaaaagcaagagatttatgggaaattggcttctttttctcaaaatccttcaaaattccaatttttccccgttgcacgatgaccaaaaaactttaatttctttaaaaaaattgttcgaaatcacaaaatttcgttttttagaattcttctagcaaattgcacttaaattttcaaaaattttcccggcggaagcgcctaacggcaccgcccgctaggaccccccccccctccccctctcccccttgtttcccatttttagaatgagagcgccaaaaaaaacgtttgaaaaagcgcgtcacaaaaagatgttaaagcagggttacccttaaaaatttcccgaaataagaacatcgttggtcacaaataagattttagggtcaaaaataaggacattttttaaaacacgctgcgaaaactttgaatcgcatttttattcaacaaaatcaagcattactcagctaaggatagggtagcggctgcctagccacagctaaaattccttatcctcatcgaggtgaggatagttgagtatagttcacaaaaaaaataataattattaatataaaaaaaaaataattattaatataaaaacaatttataaattttctataaattttttaatgattttttccttcttataataaggattaaaaaactatgaaaaatagttttgtgtaacactagctcgggctgcaaaaccatcaccggcattttcttctaacataatttctgtttctggttgttcatcaaccagatcttcctcatcaaattcaggaacaccccgcatgattgcaatattatgaagaacagcggctgccacaataaacatgccaatattttcaaatttaattcttattggagtttgaagagcatggaatcttttcttccatcgcccaaatgtctgttctataaggactcgtgttttagtatgagcattgttataatgttgctgcacattagtactggggtttgcaaatggcgttaaaagccatttacgacatggataaccgctgtctcctggaaatatttccttaaaattttactcacccaataaaacacctcgtattcgcctgttttcaaaatcttcccatacagatgaatgacgcaatataaaactgtcatgagtcgacccaggccatttacaattaatgtttaggaagcggcctttttggtcaacaattgcttaaattattatttaattttttttatttattttgcgtgccttgcacatttatgctggcccagccttttcggttatagtaatctcttccatgttgggcctcggatggcattaaaataggaatgtgagtgcaatcaattaggccaacaacaatttgaaatggaaaattcaaggcgatgtcttaaggttcaattattccatgatagacggacataattactttttgtctttttgtgcgtcctctttaccagtttggcggatatttttccaacgagtttgcacctgctgaacctttaggcccccggaggggacatcgagagggaattcggagtttaaaatctgagtaaccgccgaccatgcttccttttgcattcggcctgcgtcagcatggcgtgagcccgggaaaagttggtcttttcgagcttggataagctcaagcaaacgggcattcatttcggaagaaaacaccatttgggaatatatttaatggatcgaaaaattatgatgaatagctatcacaatttaaggttgttttgatcaacaattacttttttatttttccggaaaacagccaacggccaacatgttctatcttattcatctttgatgtctctttatttcaaaattctctttaattacataaatagtggaaaatgtgtgcgaagggcagctacggataggtgtatctgctagtgctgttcgagaccaaaaatttcccgagactcgagaccgagactcgaccccgagaccgagactcgaccccgagaccgagaccgaaaaccccgagacccaaaaaacccgagactcgagacttttttcaaaaaattttcctattcgcttaaaaatcgttaaaaacattttttgactctattcttaactaatttttggtttttttttaaattttgattcagttggtacaatatttatcattccaaaaacgcacaaaacaaaaattcattaaaatttaagtgcaatttgttaactgatttagtccaaaaaatgaaaatattttacgaatttaattgttaaaattatgattgaattcccaccgaaaaatgaataattttgaaaaattagaagaaaaacaactacttggaggggaattactttttttaaaaattttcttatttcttaaaaattatgaaaaattactactacgtttgaaataattgcatttattcaactgaaaaattatgaatcaaaattaaaatgcaaaaaaaacagggctcccagattaaaagtttcaaaagcctcatttggtatgcaaaaaaagcctcattttgagtcaaaaagcctcatttttacaactttattcaaaacacgcttattccaaaaaacttttggggaacaaggggggccggcggtgccgataggcgccgccggggaaaaaattaagaattttgaccatatttttagcagattttcattgaaaaaattcttaattttgtgaactttggaaaaaattggttattttctggtttttatgaaaaattaaacaaatttttttggaaaatttgggtgagattttcgttttttccccaaaagcctcaaaaatcctcaaaatttctcaaaaaaccacaaaaagcctcaaagcctcatttttaaaatttagcctcattgacctatcaaaaaacaacaaaatgaggctaaagcctcagatctgggagccctgcaataaacacactaattaatgcttaattactgccacctcaaggggacggacacaaggcattgtcggattgggaactgtttgagcttctcccgacggcgccatggctccgaaaaacggacaaaggcccctgggggaaaaaaccgccggaattgggcacaaaaaggaatagagcggccgcacttttgatctgctaatatactataattacagttggaaaagccaccaaacttattatttgactcactttggccatatcattttacaattaaatttcaaaaattaaaaaaggaatttactaattggcacttccatttataaacaaaaagcacatttcatcaaagtttaaagcaattaatatgtctttttgtcatttcattggccgtgcctttcgagtttcactttgtttctctttcttttcggcttttcatccttccgccgtggcttatggcgttgtctgttcgtggacaaatttggtcgcttcatccgtcaattcttttgcgcccggaaggacacgctaaattaaaatgctttgaaaaaataaaattgatatttcctttctgtttctacccctctctctctctcccctcccctcactctcattcccacacgctctctctctctctctctctttctatccactcctctctcctccccctcccatctccctcttctcctcactctctcaccatacctcttcaacaaatttgccagcgccggtgtcttcgttgatttggctggctttggcaccaacatcgttcgcaacttcctttacagcttcaaccctctctttgatggagtcgatgattacgccgccgtttgagttgcgcatggcgcagaaaaagaaaaaacaaaatgccaagaaaaacggacgcattgtcattttggcaaatttaaaattcgtttgggtctgaactcaaaaagttcggcattttatgtacaaaaataaataattaagcaatggcataacaaatcagagaaagacattgctaaaaagagagaaggaagggaaaagatgagaatgaaacattaatagacactgcacacgacagacagtgagagaaaagagagaaataaaataaaaaataaaataatatttaattattaagcattgctttatataaaataacataaatgcttcttctacagccttaaataaaagaaaatgaacaaaggtaacaaaataaatgtatgaatgattcatacaaaaaacaatgaatttgccattttttgtaaatgtttcttcacatttttataataaaaatgcattctccgaggaaaagccatcggaatttgaatgagtgagatgaaaaagcatcgcagaagaagcgtttttagcgaaacattattcactcattcattcattggtgagtcaatgggcaaaaagcgaaggaatcggaaaacgaagaaaaacgatgaagaaataaatctgtgaattttaaataaatatttaatttaaatttcaaattaattctcttcgtaagcttttcatttacaaagggagcagtgaaacaaaagccaaaaaagtgccaaaggtaaagagaaaaggcaaaagcagcagcacacgctttagcccgacttcgccgtcggcattaatccgtgaaaatatttttttgctgaatttcaattttatttttaaataatttccaattttccctctcttctgtccctaagttttgagcatttattccaaatggataataataatcgcgatttttcgattgttttcctatttttcgtccaattcgatcactttgtacttctctttctcctgcggtccctcaacagaaactgtcgtcgttttctcatggacccattccttcacttcttcaaatttctgtttgatcgttgggagcactgactgaaaaaaacaaaacaaaaatttaattaaaaaaataaacaaatttaagccctaaataattaattttaaagtttcttcactaagaatgccgaacttttataccggcagcagagcctatcttttccaaaaagcagtcat

SEQ ID NO: 5979 - DNA, 2038 bp, Heterodera glycines
gcattgacttgagcccctcactaaatttgtcgcttattccctccagcaaatcctcaaacattccgccggcatttgaacggtcgacagcgcaaaggaaaaaaaggcaaaacgccaaaatgacaaagggacgaaacatttagcgcaattgaaatgatttaaaatataaaagattcaaatataaactaaaatatacaaaaaattgccaaaaatggataaacccacaaaaaatgaaaaaacatatacgaaatacaaaaacaaaaccaacaaatggctaagtaattttcggaaatgtaaaattgtcggggagtaattctatttgaatttttttacgtgattttaaattgttaggacacttaacgcaattaaaataatttagggaaatgataattaatgctaattagagaattggacacttttgcattgtttcttttctttgtttgttgtgagttattattctccactgttgtgttctttgcttattcttttttttgctaatgagtgtttttgcattcttattttgctaatgacggagtgctcaaacaaaacaacacattactgcgccggaagggcacttaatgatcggctaattgcaacagaaaaacgggacagacatttttacaatgtccaacagaagagaagaaagaagaagggcaattagaatttgtaatgaaaggtcggcaatcacttatttgtataataaaagtgaaggactttgaactggcaaaagtgaagcattttggacccattagccggcgggaaatggccatcattagagggaaaaggccggcggattatggccgagatcgattggatcgacgaatatttggggaagaaagtaagcgggggggggggaagttagaggacgcgaatttgtggccaagagggaatgatttggcaagtctttcggaaccaaacaatttcaaaacaattgacctttgatgtgggccgccatatttgctgtgccatttaattggccgtccgttcagccgcgatggcccgccggtccatccttcgtccaattagaggcctaattgatcaatcgcttggctttcctccttcacaatgttttctgatcgcccatatttcaattaaaaaagtgataaatttattcgaagaatgttcaccattttatacgaacaaatctgctcaaaatgggctgtttctcggcaatttctaccatatgatttggattattttattatgataaaggggagaaaaacaaagacaaaattttgtcctaaggaatttcttatcattttgccctattcttcttttgtctgatcgccattgaagaatgaatatccgcgccaaaattggcaatttttctggccaataatctgatcaaaaaaacggattaaaaatgaaaacggaaaaaagaaatcacaaaatgataatgaaaatgatgataggagaaaagaaagcttcttagaagtgtttaatttattgtaattttcaaataaacataaaaatgcacagagaaatggcctaaaaatttcattgaaataaatttaaaatattttaatttcattttgttacattattttattaattgatctcacggcacatttactcgcattttcagctttctattcgaaatgccctctcttaatttgaattacacatcttaattattcacatcctaacaaaaatagaaacgacgaatttgtgtttgttggtcaaggacagctcaattgaattcaattttcagcttttcggatcacggcatgcagcagcagctacggcacgagacttaactaaatgtgcagcattggcattgttgtgtagcatccacaagcagtacaaaaagcaatccaacagcaacggctaatggaacaagcagtggcacccgtgcaaaatgccatagcaacacgcgtggcacccacagaaattggtcagttgcatatggaataagttgaaattttacaggaaaatactttgacataagagctatcagaagagtgcaaaatttcataaaatctcatgcattaagaattttaggttcaaaaaaaactagaaaataggtgctaataacacgaaa

SEQ ID NO: 5980 - DNA, 2434 bp, Heterodera glycines
  unsure (1)..(2434): unsure at all n locations
taaaatcatacaaaaataaaaatgaatccaaatttnaattaaattaaaaaacaccttcaaatccctgtgcacatgttcaattgtgcagatatccacgnccgaaataattgccaaaacttttgctttgccatttcctcgctgagttttttttgttttgaaattaaatctgaaaagaaaatgcaaatgcttttttaaatttaaatctctgaccataaatttcgccgtttggtgcgtattcagtgaccaaataaagcatgttgttcgtctccatcaccttcaattgaattacaaaattaagcaattaattaattatcaatcaattagtaataattgtcctcaatttgtcacctgataaagtcgaacaatgttcggatgtctgaatttcttcagcacatcaatttcgcgataaatttttgaattacctaatttggcatttcgtttgaactgcttgaatttgaatattgtgcacaacaaatggcattgaaagtgttaatcgaactcctcgctgacaaaattttcactaaaaatttttacgcattcccaaaaattcaatcaattaaaaaaaacaataatttaattaaagtagcctggtgtaaacagacatatcacttatttcttttctgtcttcatctctgcaggcttttctcccaccaatatatcgattttttatggtgacaattttagttgtgagcagatagaaagaaaatggagaaatagtgtgggctagagaaatcaaaaatatttggaaaaaaggaaggaatcaactgaaatatgaaataaatactaattttcgcttctcttaaaaggaggccaactgcctttttgttctacggttaaagtggccttaaatggctttaatctggcagaatttttcgtgttaagaagagcaagggaattaaaatcgcccaattttatcagattccctcagccaaaattgaaatccctgaatttcaagaatccggaaaaaactttgcaattgttgagaagaatccgagaattgaaacaatcgcctaactttgtcggatctttcaggcaaaaatgctgctttaaaatttcccccatttcatttcccattttaaatcatttttctatgacaaatttggaaatttaccttttagaaattgttacaaaattaatttttttataaattgattgacgtacgattgaattttgcattttgtgacttttttgtgaattaggtaaattcccagccctacttataaaatgtattaaagtcaattaatttaagatattgccgactaattcattttccattattaaattcatcattttttcataaaatccggcataagtatgtgttaatgtgaagtgtacaccacataataaatattaaataatctttatagagcatctcatcaaaaaaccatcgactttgaaaagtgctaattaagtggtctaaattttctcacttttgatgattttcaaagtttgaagaaagtaattgagttagttttgagcaaaacattttcaattggcaaggtaatttaaaaagaaaataggtcgagtggtttgatgaaaagcggcaattctttccaacgccaatttcgaatttgtttttacaagtttatgaatttaatacataaaaataatgatgcaataaatttatgacaagtaaatgatttttacatggaatttggaagaaatggactagggaaatgaagataaatgtgaaatgaaaagtgaccaattagcagaatgatggaaggaggggagaataaaattatatcaaatttattagtatcaaaatgccaaatggcatcaaattgtcgtttattggcaagattccgtgttcctccgctcattttccccattttcatttgctgtccgtcgtcgtcggtccttgcggggcgggcgagccgttcaaacgcaatgaatcgtccgacactttggcgcttcgttccaacaaatcgtcgccgctttccatgcccgagtcgtcttcctccttcttctttgcttctctttgctcctgctcgttttccttttcctcctttttctcttcctcctcctcctcctccgcttcgttccatcgcatttccgttctccaccaattctctgccactgtgccggccaacttttgtctgaacgcgcggcccatccgatcactttgctccttgctcatgtaattcttccagtctctgctggtgcccttccgaacgaatgactcgccgtttctgaaccaatggatgtggtaagaattttaaaacccccaatttaattcaaaaagagtcattagtgatgggcatgactcttacaattagcattagcaccagccaaaagtccccaattttattttattttatgttttagcccctaaatgatgatttctcattcccataaatttctgattcccctcccccccccccctttttttcagttggacttttttctaccagggccctgccgggaaaccatc

SEQ ID NO: 5981 - DNA, 3925 bp, Heterodera glycines
  unsure (1)..(3925): unsure at all n locations
ttctggcattttttgaaatattntggaggactttgacccgcccgaattggattgctgaatttgttaaaaaaatttatattttgtaaaatatatgtagtttttcgggtgtaaattcttagaatatatgtgcatttgattggtcctcccgtccaattaatctatgactgatcggacactttagccaatgagcaaaattcccatgaaattttgttcattgctatgctcaaagctgctgaaatggcattttcccaacacgtgttgtacataggtgagagagagaggcgggagagggaaggcggaggatggcacggcgaaagtggcaccctttccactgccaaaggccatttatataggggtatccgcccgaggcaatgtgccaacgtcagccaaagaggagatggcacagaaggggcgggaacattccattttgtccatatgcaaaattaaacatttgaagagggaggggagaggggtttaaagcaacgcgggcaaatccccaaagaaaatatagcacataaaatagattcaatcaaagaaaagcgcatatgttattttaacttatccatagctaatcttgttgatatccaccagtggtaactgaataataagagcattttttaaacagacacaaaagaaaataccaatattttaattgaaatttgaaattaaagatgtctatttacaaatccaggttagcaattaattaactaaagtaaggccgtaatagcatttcatttactaatttatttcgctgctcctatttacaaatatttactcggtgtccttttgtacttacttagccaatgggttgcctgccatttgttcaatggccttgggttgaccaacgattgactctgctcctgatgctgtagtagtttgcgtttcttcgacaacttcatcatcatctacaattacggcatttgccttgtccgattttctgcccccccggcattggaatggtacaaaaattgccaccatcaatcacttcagcacttcgccacataacaataataaatgtttttgttgatgtttttatggatattattcagttggtccttgcatgaataacttttaaaaggaatttgtatttggaccaaatagtcttacacagcgtaataataactgccgaatcggtaacaaaacacttcacatggaatttatggaatttgtttatccaagaaatgtgtaacaaattaataataatgatcaggctgccataattttcatgtttttttgtgcatattttgcgatttttgtgcatatttttgacagccctgataatgatgacaataataataattatcgtaattatcagtcagtctttttggccgtgaattcatctgctctcgcttttgcttcttctgctgttgtttctgtggttagccaacatttgcggaccgacatttgtgactaaattatcaaaaaaaaagagaaaaaaaaattaaaatgaattttcaaataaattttcgtaattaccaaattgaaataatgactgaaggtgataattaaatagtgcttcttgctaaattgattaataaaatgctttatacaaaaatcatatcacaaaatatatagcacgcaaaatttttcgtgtttcacctactagccttagtctaaagagcttagattttgatcaagcatacctaacaattaatatcaagaacaaataaaagatataaaaatatatttttaaaatgaattactcacattatcaatgacaacataattcttgtaaatcaggaatttataaactaatgcattgcacaagttgatcagatcactacttaaggatgatatgaagtgataaaaatttttagcaccaagaggaattgaaaaaagaactttttggaaaaactttataaatttttcatattttcattcgcattaacttgcttaactccgaaaaatcacatataaaattcaataatattcagatgatcatccaatttaagaaaaaaaaatttttttgaaaattaaatccagaaattatgacccgcaaaagacggtccgcaaatgtcagtccgcaaatgtcagtccgcaaatgtcgcactacggtttctgtccaattttaattttcatttccgcctcttccggctttttcattgcttttcatcccctcccccgctttgtcccccattccaatgaaatgagggatgtggattaaagtcattaaaccactcatatacaacattctaaagggattaaaatgatgaatttttgtggaggtggtgagttttggcggggactaaaagcttatccgttcatccaggatcaaaaacaacggctgtcggtgcggcacgagcacacggaaagcaaatgaaaagtgcagttggaccggagagaaaatgtgggacctattttgaaagaaatctattgtatattgaaaattttatatgaaaggaaaattgattgatttaagaaaggagtttccattttcacttgtccttattcggagggaccggaccttaaagttcaaaaatatcattttttgatgaaaaaaggcattttgaatgtttgaagcatatttcatattttaaacccaaaattttattcttgcaatttttctataggaactttgattttatcccattcaaaaactcattatattaaagtaaaatgaagcaataaaactatgtctcattttttcaaaaaatacatcatattaagaattattatattgtagaaatccgaaagatttgtctttatccaagagcaattaattcctttgtgtgtttttttgaaattttcttgcctatgtatttcccattaattggggtgtccctaaaaattaaaaatgagctgaaaagaagagaatcgtgtacgatgctaaaatgtccgaaaataacttaacagaaaattatatcaaaatggcaacttttcatgttaaaatttggataggcttaaaatgtacgcccatagtcgagagatcctatgattggggaacaaacattatgtgaattgatggagtggacaaaattggaaatgcacacaaatggaaaaaagaaaaagagacgtaaaaaggcgcattaagcaactttgtcaaaaaaacgaacaatttgtaaagcagatgttgtttggtttttgatgtaatattggagccgaccaaagatggtaaaaatttgtgagttcatgctatttttataactttgttctgaaattttgtaaaatacattaccgtctcgacccatgttttttttgaaaagttaatatcacaggaccaaaactaaaaactgcttaaagttttcaaaaaagcacttaaaacaaaggaaatgcaaatcccactgtaccggctgcacatcgcatgagctttttgtgaccgggtcccggcttttgtcatttcatgtttatgtttttgtttgttttttaaatgccctattaaaattttggcattgtacggctttccttattgaatttgacacttcagtagcaaattttttcatttaaatgaaaagcgccaccctaattagcattttaattttaaaaatatttgtattttcaaattcctttctatttatttgcagattttggaggattaattccgtgggggataggcatctcggatgatgggttgccaatgccttcgacttaagctgttagccattttcagtgttttcaaaaatatgccgtggtttattgacaacaaaacatgcccctttgagtggagtgatttttgaaagcaaaagcattctctgctttttgtatatcgcgagggatttggcaaggataaacgcaaaagggatgagcatatgagcaaatggcacaaaatatttatttacaaaaaataaaataaaggaatgacattttaaaatagcaaaatggaaaatagaaaactgcggattttcaattggatgtttttcattttatgtcttaagaaatgtcagaagaatgacttggaaatacctaaatttttagcaaaagaaaatga

SEQ ID NO: 5982 - DNA, 1677 bp, Heterodera glycines
cgagatatggcctgtcaaagcagaacggggtcaatgaatttgaattttcgttaatcttcggcagttgcctttatttcgagcctactatactagtgcatcttttcgcaatatggctctgcttcgcgaattattgaactgtttcacgcctgattgctgagataatttttttttgcgattcctttatctccaagcatgagcgttataagtgattgttcatatccttgtcttgaaaaaaattgtcagtaaaaaatcacgttttctgaatattaacaacaagaatttttagacagtttctaaagagtaaggaaaaaaatttttcatttgcgtaatatttatttattctgttgtcctgttggaaatgcagctgatgctgtcggaaaatctcagatttgtaggggaagtttttttcgttcagtttcgacattgattgttgaggcaatttttttcgacaatttcttttgtctacaaacattagttattgcggttcatcctgtagtgggtagagacttttcagtaaaaaaaaacttgttatccgaatatgtgcaagcaaaattcaagaccatttccaaagaggaaggaacaaaaatttttgcctaaattttatattatattgttgaattgtttgaaatgcatctgttgtctgccgtttcgaaatttttcaacttgtcacgaaaagatttagcagaaaatgcatggatcaaataaaaattaaacttctattatgatcacgccggaccccgcacccaatgttccaaaaaagtttttttgaaaaaactcgccaactgaacgtctcgccaactaagccaaattcggacgtttcgccaactcacccaaaaaatgacatttcgccaactaatttcgccaactggactaaaacctatttttaattgtggaaacaataataaaaattcaattaaaagtgcataaatgaatgaaaatctttatattataaaaagtaacaaaaaacgtaaaataaaaaatttcaaaagaaatttcattatataaaaaacgtttaataaaaattttaaaatcaatttccatcgccatcatctgtttcttcgccactatcttcatttccacggacgtgaagcccctccacaaagccttgcatgacgagtccgagcagatttaatgtatttgccaatccttcttctgattcaaagtcggcctcgtcaagaatccgcaccacattctgttcctttatgatgtaccgttgcggacgttttctgcttttctgaagatgttctgcgcgtccgatgtccagctgtttgtcgatgtcccttgtgaatgcagtaatgaagtcactcaatgaacgatgatattatggatgcctgggacactgaacgctaaaattgaaaaaaattcatgacagaataggtgcatttacgagttgtgcttagagtgcgacgcagaagaaagtgtccgacatcagcatgcggttcaaatgcctccgccccgcgatcaatctcaaattgagtggtgccaatgtaggttttggcaaaatacgccagccatccttgaactccaagcggtgccgcgctgacaatagttgaaaaagcgcgccgaacgtaaagtggcggaatgagtgccaaagagagaactgatctgattttgaaaaaacaaataaatacacataagctaataaaagacacctgaatgttttgtgaacggatttcc

SEQ ID NO: 5983 - DNA, 4841 bp, Heterodera glycines
cggagtgaatttgttgcccttgcgctgattcagagacatttcatttgattaatcgtgcaaaatgataagataattgataatccatcagtcaatcggtcgatttccattttttatgttcgcaatttattcatatataaataattaactgatttaattttattttcactcaatttttgggtttttttctgttaaagtcaaagtcatttgccaattgtacgactattaaatttaatgtctatcattttggctcaccttttgtttttgcgagggattggccgaaggaatttggcgttaattaccccaaatattttcgatgaatttgtgcaattaatcaaatcatctgacaatgagagaatgaatattcgatgagtttaaagatgaaaaacaaatcttgcgcatttatttcccaaccaaaaaaaagtttttttttaacgagaaatggccgtacaaaaagacgcggcaattaaagggaaccgattttaatattatctttattttattagcaaatatttaaaataatttaatatatatttttttaaaagatggaaaagtcagtgatttcattgtgttttttggttgggttggcatttcttttgccgtccgaagcagcattcagcaggtggcagaataatgaagcaaaaacaattaaaattcacaatttttgttagcatgcgaacgaagcgaggcggcggaatgggcggagggatgggcagcggaatgggaatgggcagtggcatgggaatgagtggcatgccaggcggtggcatgggaggaatgagtggtggcagttacggaagcagtgggtacggtggaaacagtggttacggtggaagcagtggttacggtggaaccagtgggggaagttacggtggaaatagtggatatggtggaagcagtggaggaagttacggtggaaatagtggatatggtggaagcagtggaggaagttacggtggaaatagtggatatggtggaagcagtggaggaagttacggtggataaggtggctaacaaaaacaaatgcctattgatcaggggagatgatttctatttttgtggtttattattgtatttgcttagtgcgtaaaatgtagatataataaatttgaactgctattttgaatggattacctaatttaaatcgagaaaagtctatgcaatctatcgaataaaatccctattttattttaaaaaatgttttttggaaaggctaatttgttttgctttagctttagccggtacgatatttaaatagctattttttcgtgtttttccgcttattatgataaaacattcattccgttttatttattaactggtttttaaattacccccccccccacccctcccatttgtgaactaatttttgtttttgttctttttcttttaaatgatttgaatttggttatttgggttctgtctgatgaacctacgcatttttcaatgaattaattgcccaaataaacccattcttttcactaatagtttttctcatttttctccatttactcgtcacaattttcaatgtttttaaataaaccaaaagatcaaaaaaaaaatagacgcaataaaaaaataaaaatattaagccatggaaaaactgatgctaattttttacttcttatttgtttcacaattttttgtgccaatggacggagccgaagaaaaagcggacgaatttgggtaagcaatataaagccgaacatcaatcaactcgaccttttttttgaaattttacgaattcagctttttcaaaatcaacttattcattaaccccatttcacaataatcgctcaaacacattccttaagtaaatcaaaacgctctggcggatacggtggtggaagttacggtagcggaagctatggtagtggggtttatggtgcaacgaatttcggcagcggctttggtagtaatggcggagtgtacggcactagcgggagttacggtgggaaaagctacgggagtgggtcatacggtagcagcggttacggcggccgaaattatggaagtggcggttacggcagtagcagttacggtgggagaagctacgggagtgggtcatacggtagcagcggttacggcggccgaaattatggaagtggcggttacggcagtagcagttacggtgggagaagctacggtagtgggtcatacggtagcggcggttacggcggccgaaattatggaagtggcggttacggcagtagcagttacggtgggagaagctacgggagtgggtcatacggtagcagcggttacggtggtcgaagctatggctagcggaggctatggaggcaggaattttgggaacgttggtttcactgctggcagaggaaccatggccatggtagcggttacggtagtggcggatatggctaattctttgtgcaagatgaaacaaggctttcttagttttaaataaaaagttaataaagtggttttctcatttaatttcattgctaaatgtcacaatcggaagaataaatcattaatttcaccgtttaattttacaattctttgtgattagtattcattttttatatgtataaacagaaagaacttatttatcaaaattaagaaaaaataatttttagatttattaggagcattaattcggttgttttacattgttggccaaattaggctctgatttccaagtgtaagataaagccgtacaaatggaaacaccgaataaaatcagaacaattagaaaatggaaatttggttgcatttttctaaattctaattaaaaaatgatattttgcttgcgtttttttttctaaattcttttattaataatctacatatgttggacaagatttttaagcaccaaaaaggtgaattaagcacttaattatctatatcaaaaattccaaaattaagcactaaacaaaaaaagaaaaaaattttacacaaaatatagccaaaaccctaaaaatatgcgctaaaaatcttcaaaacatcaaaaaaaaatttgtttttgtgtgaaaaatctgcaaaaaaatttaaaacctttaaagacttctcctgattacatttgaaacttttagctgcacctcttaaaaaatttctaagttattagcttgattttgaataggttctatgctacatacattttaagaattgcttaagaaatgtatttggctttatgcaaataattttttagaatgatggcttctgcttgtgccatggcccatattaatgccgtccatcagtcattgtttggcattgtgtgcacgtgcgttattatgccatagaaagaagcccttggcaaacgaatgatgaatgaatactacacattaatgcttaaaaataaaatcactctttttcttttcctgccttatatttcgcatattaaaattctctttttcttttcctgccttatatttcgcatattaaaattctctttttcttttcctgccttatatttcgcatattaaaattttctgtttcttttcctgccttatatttcgcatattaaaattttctgtttcttttgccttatatttcgaaccttaaaatactctttttcttttcttgccttatatttcccatcctttgtgtgccattctttttttttgtcacatcatttctttattaattctttccatgccatgtgcaatacaattatatgcactttcataataatttattatatgcaattgacataatattttttattattattgattaatttaatttttatttaaatttaattaatttattacaaaaaaaaaatacaaagtcagtgattgtctataaaacgtaataattgcttttattattttaaaaatatttttttaatttttcataatttttgtaatttctttttgtcaaaattttaattaatttcaaattaattttaaagattaaattgagttgcaattacgcattgtcagcttatattgatcagaagcgaaaaaaggcaatttggtaaaaatgaactccaagaaaagatttggtacttaaattccaatacttttccaaatgcctatgcatttttaatttttaaaagtatgaaaatattcttccaaaggttttcggggttgctgggcacgaatccggcacccattgcgaccaattccaaatcccggacctgaattcgaaacaagtatgtattcgttcatttttcttttattatttctcgcaattttttttcattaattaaaaattgaaatcactggtaaaattattaattgtacatttttttaaataaaattatttcctggtcattcttttctttttttgattaaaaaatagaaatttatggaaaagactaaacaattaattattatattattcatccatactttcattgtatttgattttggttttaaaagtgcttttctttattattcttttcattttttaattaaaaatttgaaatttctgtctgctggcacatataaaaacgagaaaaattttcaaataaaacatttaatcaaaaccaaccattggcttactacaaatgaaaactcaattcatttttcttttggcacttctgccatttctgttggtcccaatttgttgtgaacaatgcagttgggacgacgtgaataacatttgcgtgggagattgttcatcactgtgtgtgctgaaagattttgacaattgcaactgcaaccgcttaccaaaagtcactattttattgtattttttcaaaaaatattttttaaatttcaaaaaatattttatttatgtaacaataggcacttgattagtatactgtaggatattagctagaaaccaccaaaaagggtggacgaaaatattgacataaattgcaaaaatatgggcataaatttctaaattaatgttgaaattctctattttgttca

SEQ ID NO: 5984 - DNA, 1918 bp, Heterodera glycines
gatccgcggtcgcggccgcggcaatttgaatgcgcgaccgcgtttctttttttgtgcgatccgcggtcgcggccgcggcaatttgaatgcgcgactgcggtttttttttctgtgcacgctccacccctggttaataacaacccgattttctacccattttcgctactgttgcctctattttctgacaattttttaaaggcactcaaaagggtttttagctgccatccgccgatgtcacgaaacatttgaaagtattcgtcattactaaattttattttttattaaaaagtaaatataattttttatttctaaaatgaaaaaataataatttagttcttttccgttatgccacacttcaccaaaaatgtcattaccgcaaaaaaaaacattttttatatagaatataaataaagaattcaaaatccaaaaaaaaaacaaaaattttttttattatttggataatttaaattaattcaaggggctatcagggattgaaaaaacttaagctgaatccgagtttggacataggcgcaaatgtccgaggcgcaaatttcatgtaaccaataaatcttagagtttaaaaaaaatgaatccgactttttcttccaattcgggttcgagttcctgaatgggtcgaaagggatatcagaatcggtctgtccctgaaaaccccctaaatttaattcgtcccgaaaaattaagattttcgaaaaaggatgcccaccatcttaacgattaccaagatgacgttttagcggatactcgatctatcccaaaaacgcaaaaacaatagaatactactagcaaattttgaatacaatttcagagtattctttgattaaaaaaggaatcaaattttgtcataagtagggatgcgatttttagatttttacatatttttttcctgagatccccgtggcctgaaacgcacgaaaaacatgtttttttgggctgttgttaagctacttttcgagttattagcacctattttctaggtttttatttttagcacctaaaaaacctaaaaaaaattttaaaaacttattttcacctattttggcattttgcccaaaatttgttaacaaaaatacaataaaaggaaaaatagacccctaagaatcgacccaattttttttcaaaaaatataccccgaagaatcgacccaattttttttcaaaaaatataccccgaagaatcgaattgaaaattttcaaaaatataccctgagaaatgaaaatttctcaaaaattcatctacaaaatttatttgtttaattttttgacgagaattgttgattttgaaaattatgtatctcattaatgatttggcgtaatatttttgccttttgaagaaaattttcgattttacacccctaaattcgaaactttttggcacctattttcccatttttagcacctattttggggtttttttataacttaaaacctacctattttggcagtttttagcacctaaaaatcgcatccctattcatgactttgttatgaattttttttcaagttaaagtaacaattaaatatgcaaaatttgtgaacgttttaattttaaatctttttatttatctgcaaaattaaaaaaaataatttcacctaaataattttttttgagcaatttcaacctctaatcctcggcatttatttataattgtttgtcttctctaaagattaaatttattattatttttactattttaatggctaaacggaaggcgagttcgatgctgctgttgtcatcgtcaagtgaaagtgccggcgtttccgaacaaaacgaaagcgggttggatttatgaacttttgaaaatatttattttgctaatttatttgtatatatatttggcagttaggcttaagattcatttcggcctggatctggacataggcctggttttttcaccccc

SEQ ID NO: 5985 - DNA, 7785 bp, Heterodera glycines
acaacaggggtggagcgcgcacagaaaaatcccgcggtcgcggatcgcgcatcgcggattgaatttgccgcggtcgcggatcgcgcatcgcggattccatttgccgcggtcgcggatcgcgcatcgcggatttaaaatcccgcggtcgcggatcgcgcatcgcgggttcaatttgccgcggtcgcggatcgcgcaaaaaaaatgccgcgaatcgcgtatcgcggatcgcggtcgcgcatttttcaattttttaaaccatttttaaaattttttaaaaattttcttatataaactagggtgaagcgggaccggaattttgggcaaaaccgggacttgccgggacctgagaagtcgggaccggaacctcgatttttgttcgggaccgagaaccgggaccaaccaggaaattttaaaaattcaaacaaaaattttaaaaatatttaatttttaattcatttcatctgaaaataaaattgatttttatttgtttttatttaaaaaaaaataaaaagttaaaagctaaattaaattaatataattttcaaatcaaattttcttcaattagttcaaataatttatcaattttggactaaatcatcgaatattaatagaagttcagatttacttttcatatcacttttttcggcgcgctttttccaaaaaacttttccggagcaagggcggtccggcggtgccgatacccgccgacggggaaaatttgaaagtttgagtgtaatttgttaacagatttccaacaaaaaaggcaggtttttgggggagaggtccggcggagccgataggagccgccggggaaatttttgtaatttttaattcgatttgttaacaattttgtccaaaaatggacaaatttttaaataatttatatttaaaacaatcgcttcaataaaaattttctttttaaaatcttataaaaattgccgcggattcacaaatcccgcggatcgcgcatcgcgtatttaaaatcccgcagtcgcggatcgcggaaaaaaatgccgcgaatcgcggatcgcggtcgcgctccacccctgcttgcatacttttcataatattttttggtttttccttttccttatctttttttcaaatttcgaatttgccttttttcgcaataataccacaaaattataccgactttttccgcttttgtaattttttttggcaatttttatgatttttgaatccactttttgatgattctcgtctgtttttacatttggattttgagttcaactttctcttccactactccgacgagtacttcgaccaccaccaataaattgtcctctacgcctcccgcggaaatcaaaaataaattgcaatgtttggcatggaatatttgcaatttgttagtttatttctaatttgaaagttaaaatttatcattttcaaggagcacgaaattgaagcagtcaaaggtttcgcgacgatttgcaattagtcaaaactgcgaggaaatggccaaagactggggacagattgaagaagatgaaaaaatcggagatgaatacgaccaaagtgccgacgaagatggccaagtgtttttggcggattttttcgttgggcgaattaatgcaaagatttaattgattttcaacaaaaaatccaattgatttggtttaattgaaagaaatgggaaattaattcaataatttaaaaaattcaattgcccggggcaatggcaaaaaaaataataaaacaaacagtttcattataaatattttctatttcactttgaaaactcagcacaattcgtcctaaaagatagattctgtccacaaaatgaaccgaaattatgaaaatatttatttttgttatttagcttattttaccattttaaaattaataatttttgagatttgcgtggtttttaaagtgttgtgcctatttttaaaaatattgtcaattatttatgttacagatttttaatctttggcgataaatttctctaaaattgaattttaaaatattttaattaaaacccaaataatcttcgttcagtttttatatacgtttaatgggattgcgtgtgttcgggatcccgaccgggtttcgttcttgaataccgattttggaatcccgcttcggttctcggttttcaaaaagctttacctctctgaatcccgaattttcaatcttggcgggaccaggacagaaaataagcactggtaagagagtgttgctttcgttctaatgtctaaacctcgctggtttttactacacaattagttgaaattcgaataaaactttttcacacttttgatgcaacacttttttccggcactgaatgttaaatgatctaaaataatatattttgtaggtttttgatttaaaatcgaaaattcgaatggacaaaacgtggaaaaatttggtaatccttaaaaatgtgggcaattcgctttgcacactctaatcgttataattaggaccggcaattttagtgtcgagaatgtcatccataatcaaaaaagctggttgttttttaattttgctcttgctgtcagaatgcccgatttccatttttaagaattttttgcggcgtgttttttccaaaaaatctcgaggaatgggcgaggggagagagtccggcggtgccgataagcgcttccggaaaatttttgtaattctttctgatttattagcatattttcatcaaaaaaatgatcaatttttagctctacctctctgaatcccgaattttcaatcccggcgggaccgggacagaaaataagcactggtaagaatggtgactactccaattaattgatagtttattacaaaatgtttaaatgtatttttgtaaaattatgcggtggcagaaacagaaagaaatggttaagaaagaggcggagaagacaaaatatgttgtggaccataacgttttatgcaatgcgcaaaggcaatttacaaacttaattatcatgaaaatctataaaagttttagtttatttacaaaaataaatgccaaaatactcaaaaaagctgtgtttttcctaccaatttggccatagatgtttttagcaacggacaatgaatgaaataaatgttaatttggtgtatagaaaattcacactttcggagtgccgaacaaaattctgcgtgtttcgatgttgtgtgagtccggtgattactggcatcctagtagcctcttaaagtgatgaaaaaaaattgattgaaaaacagcagaaatccgatgaaatcccggctcaagaaagtacggattaccccaataccgcagcgggatccgcaaatttttttttgttatgacaccccgaactttcttaaccctcagagccattcgaaaaatcttggtcaacccatcaccccctttttatgcattccgccagcccctaaaaatttctttcccaaattaggctcagttattgttaaaataatttaatttaattatgcgattcgctaaattcatataaatattatacccataaattataagaagtaattttaaataataatattgctaaaatttttaaaaaatgaaaaaaatttttctttgaggtaattcttgaccaggaaattagagaatttcggcttgcttaaggcctattcattgacacccatttatataatcaattaattattttatgaaaagtaagacatgtgataaatgcggcactttctctccttgtgcctatgtggcagtggagacaaaaggaagtaatttcgccccaaagataaggggaattgagagtaagagagtggattagagcacggcacggattgatggggttcaagtcccaccgcgggttgatcttttactcttccgcacaaagaacaggacggaccaaaattaatttttttaggattttttgcattttttcgtgcttttttgacatatttttttgactttttattcaactttttggaaatttttcgtgacttaaattcccagcccagtcataagagactgattgaaatattatttcgattttttacaatctaataaactgactgagatgaaaacacttaccagctaggaatacttcccaggtggttccaaacaatggtatccccccaggcgtttttggtgtttttgctttattcggatattgttgttgcagccattctttgttgcacgaaaacacgcaatttgactttgaaggcattttatacggtttgcagcccgtgttcatcgtatggttggttccggatactgtcagattacggtaatatttccacgcataaaaaggatttcctccaccgcaccttaaagtgaaagaaatacggtggactatttttaaaaaggccactaggcaacgagagatttaaaatggtggaaaaacaattttaaaaatgatcttaagctttctcagcttttttgaaagttttcagtcaaacgaaagtgttgttttaataaagggggcggttctaatagagttttttaatgccaaaatatgaaataccagtgttgccagatgtgctgatttatcagcatttacctacttttaaaggtgtcaaagctgattttctttgtaaagttttctttcatgaaaataattatttttgtggaaaaattgttaaaaccgaaaaaaatttcaaaaacttctcccggcgccgtctcactgtaaattcctttaaaattccttaaatttcagcctaaaatccagaaaattgtgtttttttggattagaaaacattgaaatccctaacaattcattatttgtaatttacccttttgtgtctggggtgcattccatggtgaattgtgccgaaacatatgccctcgggtcactgctgttcgttttctttccctttttcagacgggcaatgcaaattcggtcggtcagcgttcgggcagctgtcacagcccaacaggaaccacagtcgccttgaaattttttgtaaatgaaaaaactttcaagaaataacggttcctttaaaagttttaggggcgtattttttgaaaattttaggtcaattcttaggagtgtattttccgtttttattgcatttttgttaacatattttggcaaaacgtcacaatagttgaaaaaattcggaacaggacggttcggtgctcgcagtttcggtaccagcctaagttttataatgctgttcgggaccgaaaatttcccacgactcttcgagactcgagagtctcgaacagcactacaaatcatcctccaatccaccttgtgcatagccactttggatgatttcggcacaatctttccatgcttcgcgtgcgtcaaattctgttggaagatcatttttgtcttcctctccatcggctgccttcagctcagatcgcaaatggatgttgttgttctcatttttgtcctcctcaacagtctcatcgacaggagtgccaaaaaaattcaagaaatcctcatctttcatcagtgcaaatctttcattgacaacggcctgaaaaatgagtgtttaatctgaaagtaaaataaattggcaaaacaaattttctttgtgattttaatacatactatgtatacaatacatatttttcaatattatgcttcttttgcgggctttagaccctaaaaattacgggtgcaaaaaaattttcaaattttctggaatttttataaaaaatatttcttcacaaaattaaaaaacggttgaaattttccaatttttctttgtaagctttttttgtttgaaattttattttaaattttcgggggaggggggaagaagctgccccaaatcccggccattatgacgccaaatttcatacccatgatgtgttcatcatatcaacttccttctgtgcggctgttagcctctctgctctgtactccgacttaaaaaacatgaaaattaatttcgttatttaaatttttttttaattatttacaaaattatttggaaattcatttggctcctcctcaattttttgttccaagcagtagacagtagtagtatcagtgctcaacgccaattcgtccgaataggtgactaataggtccagcacagtgccaattgtccagccaaaattgaactgggttattaaattaacagatattttttcaaaatgcaatcagtcgaattaatttggatgaagtgagctaagttatgcatttatatatataattttttgttttcggacacattggcggatttaagaaacgcgccagcacaccctcccttcacatggatattgtctaattacagtagtaattttcactttctccctctcacttggacattgggtaatactgtgctttgtccctcctcttttttcgaaaaattttttatgtttccaaaagtcatgaaaacatgtttcgaagtcgggtctagaattcggaattgtcccaaaagaatgccggattcatgatcagcaactccgaaaaccttgaaaacatgttttcatgacttttggaaaaattttttcaaaaaaagggggataaagcacagtattaccggacattgaactacagtagtaattttcaccccctcctcctcacttgaacattgtattctccgcctctgcccggcgtggctgcatccgctgaaatcttttcccacattttcttcccacaatttttgttgttctggtaaagtttgtaattggcggacacccacttttgagccaattcaaatgcttttcctttcattctaaatttttgtagttgttttttaaattaaattcatttccaaatattttttaaaacaataaaaaacttgctttttagtgcctgaccggcgcagaccctcaataagcatgtgttgtaaaggctgaagaaaattttgagattttttaaattcatgactaacactcatttggcatgaatactgtccaactttgtataaaaaaaatgtttaatatttttttattttcatgtttccccaggtcgtctcgagagatttctccggtttcgaaattttttttttaaatccataatttggataaatgagaaaatttcctgtgaaatcctcaaaaagtttttaccggaaaaatgtttgggaagtcccattgttgtgacgagtcattgattaagctgaaaaattggtcatttattaaatacaaatccaaaaaatggcgtgaccaaccggaaaatactttaatttggacattcgactttttgtccaagtttgaaatatatttttaaattttaatttaaaaatttaagaaaactacgaaaaattaaaaaaatcctaataaacttctctcgtgcccaaacggctgcgcccaaatggccctgtcccgtcaaaaattctattttagaggtgtaaatttttaaacctttaaaaatcagttggaaggagttcaacacttccaaaacccctcaccaccttgccggcacaccaaacgggtggctgatcaatttcctgttcgtcgccgtgtccaatcgctccatccgcgcgaacattcgctcggccgtgcccaaatcgctgacatcgtaacagcgcgtgaacaatggcatcgccgcactaccgtagtacgcctcattcgatgtgccgctttccaagttgaagtcgtaccaaatgccgtgttctttgttgtagaacagatgcttgaaatcctccaaaaacagttggtgttttgcgtggtattccctggactttgctttgttgccttgaattattttttttttcagtcaattggaaataattagagttattttgatttccgcatcaccaatttgaaggtacatatgtgccatcatttcgaaattgccacaaatcaacgcattcaaatccaccggcacaatttttgttgtcatcaaattggtcagtttccacggcctttctttatcctgctcatcttttcttatccatcgggctaaa

SEQ ID NO: 5986 - DNA, 2217 bp, Heterodera glycines
aagtgctaacaaaaaaataaagccgaaattttaaaaaaatgccaaaagaattcgaaggcattggcataaaataaatggcaagacgcgaaaattaaattaattaagcaaaaaacaattattgtatagttttattaagtgaaaaaaagaatgtcaatggcaaagggaatttaatgaactgttggcttaagttttaattaacggaacccaacgaattgtgaataaaaatcagaggattgcgtattgaaaaggggaaagaaaatgccaactcaaagagggacagctaattggttgaaaatgggggaaacaattgggggggggggggggaaagagaatttgtgaacttcggcggtaagggatatccggtggaaaatgaaaattaattcataaaagtcagaagtcaggacagctgctagcgagtgaagtgaatgaacattcatgccgaactcacctgctgctgactgatgactgctgatggtcggtcggcattttcattctgtcaattaccatagtaaatgagcgaaaatttgttggtattggcccatcgccgtgccattaattgttattttgagcgttcgttggattggtccaaaaatggccattccgtgcgattttttgtgcctttgtttgaacggcacgcaacattcattctgtcattccttcatattgtttaagcagtttttgtgtttgttttgttggatttattatgcacaaaacaattactgggagaaaaataaggcaattagcagaattacgaacgataataggcatttatatgcaaaacaaaagaaaaagctgaatggcgcgagggaacggcacgaaggaaagtttgtgccaaagcttggtggattactacggtgaatttaatttaagaaatgatgacttctcatcaacagaattctgctcatatattttaattttaattagttcattaacataattttaaatgtattcccaaatattttcttaactgaaattgtcaaattacaaaatgataaattatcagccaattgttggttgatctgttttgtcaatcaatcgtccctgttgtcctcacttttccctcttttcttctgtcattttcatttgctttgaagaacaaaaagtgctataggaacaaattaattttataattaatttaatttttatgaggctatttttgcccaatcgctgacaatttccaaatcactaattggccaacaattaattaatgcttgattaattgaccgatgaaaatggccaaaagtgtcgctgcgaaagtgccgcccaaaaagcggtggtttgcccccgctccgttgcacagttcgcccgtgcaattggtgcatgccaattggccgctcgcccggcaaagcatcgccacgggccccgactcgcacgcgtccattcccccgcagcccaaagagtaataagccgacccattccctgcacaaaataacacccgccatggcacggtattcattacggtaagttaccgtatttgcagtactttcggtggcaatttgtcacttctaccgcgcattgctcctcctcaactttggtgcttacgttgaacagactcaccgtcatattggagccggaccagcatttgagagctgaaaatgaagcagaacaaaattaacaatttaatcagtctttgcgggcgatgatcgctaatcaatcgctaattggtcaaacacttaaaaatattaaaaagggtaattaaaggggaagagatttgacttgccattggtcgtcaaaaatgagcagatcaaaagaaaaaacagcaaaatgaaatatttggaaaaagttgaaagaaaacgatacatttctgtaaaaaaggtaattaataaaaaagaaaagaaaattttaaaattataaataaataaacaaaatgtgaaagaaaaacgacggaaggaataaatgcgggaaaattatgctgagattgtaaaatttcagccgtttttaatgggcaaataacacaaccaataaataaataaataaacggaaaattggaaaatgaaattggaaattttggggaattgcttagagaataataagcaaaaataaaattaaaagaaaagaaataaataggagaaacttcaattaaagtgatatgaagagaaatatcagcaaaataatttattaagaaagtaattatcaaaaacgaacagtgattatggaaagggtcgaagattattaattagaagggcccctatttttggcaattaatctcattccaaa

SEQ ID NO: 5987 - DNA, 4554 bp, Heterodera glycines
tgctattgttggctcaattttctcgaagcccggagagatttggaatagagaaaccaaagaaatagcgaatatttataaaaaccaaagaatgtttatttttctttattcattatcataaaatggtaacaagtctaaaaatatataatatataaaatgcatacaatttcaaaattttgttcgtggaatttgattttatgatcatttttttgaaactaaagtgcgctcattttatttgcaattaggtaggttttttttattaattttcttcgtgttttgaacggttgaaaaacctcacaaatggcgtcggttcgatttcgcctctgcttttcggcataacttatcaagagcgctcgaataatgccaaattcgtccgggttggacagttttaaaaggttagattgagttttctttgttttcagcgcctaaaaaaatctaaaaaaatgtgatttttgagtgtttttgtatatgcgcaatatgatgcacatttacaacaaattaattaattatatcaataattatgctttttccaacaattctctttaagttttctatttctaaaatttcccatttattattttttaaattcgttttccttttttcctttttccattcttttgattttggtttgtttcacttcctttttaattatttttgaattcctttcgcatttattcatttttttgttttaacttttcaatttaaccgccgtttctttccctccgccgttcattcgaagcgaaatttgcgcccaaagagacgccgacggatgaatcatttttcaattcaaaaaaagcattttccttcctccgataaatatttagttttgtttggttatttatttatttattttatttaattacccgcgcacggaaagaaagaaagggccattccttcgcttctttaaaaggtgtgaccgatcagacgacgacgaacagccgaagaagaagaagagagagagataagggtaaatcaaagaagcaaaaagaagaaagaagagtaagaggaaagcgcgagagagagagagagagagagagagagagagaaagtaggaaagagaaaagggaaagagaaaggaacagagagagagagaaaaaggggaagggaaaactgaaaggaagaggaagaggagcagagaaaagggaaagaggaaaaggaaaagagagagagaaaaaggggaagggaaaactgaaaggaagaggaagaggagcagagaaaagggaaagaggaaaaggaaaagctacaaaagggaaaggccaaatgaaaggggaggggagaaaagagaaaaggaagcgaaaattagagcaagaggaagcccgttttggttggagcaaaaacagcaaaaggcggggagggaaagaaagtggtcgcgcaaaaacaaacacttttgctcacgctttcagcagcaattaacaattaatgggaatttaattttgaaatgcaaatattttaattgtttaattactaaagtttcacttcaagatcatgaattgcataattaggaatcaaattctaaaccatttctttttcagttcctcaattagtaattctaattagttaattaattcgttaattgccttccgtccctttcgatgtccgttaataattcttcgtccgttctttcgccttcctccgctgttccttttccttcccattttgccaccgtttcccctcacttttctcttttcttcggctctttgatcgcttttgtcacttttgtcggcgttttggccaatgcttttgttgtggtggccgtcgctggcgataagaaaatgcgtcgttctccgatgaatttgctgctgctaaatttggtcagttttgttccgttaccgtatctttttacggtattttctgttttggatcgtactgtacatcaaaatttaaaaatcgacaaaaatgctcataaattcactaatttcgcacccatcaacgggaggggcactcactaccaattttcctccctaccaaactgtcccataccgtaacgtgccatttcactttcgcttctttctttgccccgcccccttttttcgtcaaatgccttcccaccgcagtttctttaggctgttgccgatttgctttatctgctggcatttacgcccttttgggcttcgatgtccgtccacggggacggcggatggcatttccccgagagtttttgcccaattggacgctatctgagcaattgtctgctgattgtgtccatcttcacttatgtggccatttgtgtggaaaggtgaaaaatcttttatatgaaaatcaaatactaatttgcttatttggccaatattaattgtaaattgtgcctaattaagccaataattcttataattacgcatttgatttccaaagattcgtcgccattgtccacccaatgcatgcccaagtgtggtgcactcgtagtcgtgcactgctcgctgttctcggcctttggacctttgtgatggcctatcaattaccttatttggcactctttcagactcaaccggcgccatggaatggttttgaattattaataaaatatgtttatcaatcccatccctatttaattttaaagttgaaatgcgcatttgtcgcagtcgtttggctggtaagagttcgttgtggcgtgcctacaaatggtccgaatttgtgctcacttacgctcttccggtgctcctttcggcatcactttatgcgcgaatttgtcgggttttgtgggcaaaaagtgccattttgcaaaacaacggtaatttgggcatactgtattgggaaattgccaaaaattatatgtttgtaatttaccattctttcttttgttctcgctaacttaattggcattttgagtgcccaagcgcagtgccatcattggcactgcctcgatgacggcggtgccctccgcgacttatcggccgaatggcacaattcgccgcgttttggagacaaaattagtgaacggaataagcaaagtggcaccgattaagccaacgacggcggcagcacaaaagccacaaaaaggttcacaaaagtcatcatcatcatcagcaggtggccaaatggaattttgaattggcatttcgtttaattaatattttaaaagtatagcaaatgataaagcaaggcgcaacgtggtcaaaatgttgatggtttgtgtcacactgttctttctctgctacacgccgatggtcgtttactttttgtgggggtaagcaaacgcaaaattcacaaatacgccaattaagcatctgtatcggatatcgctactccacccctccctctctttttctcttactcattctatccttcctttcctcccttcactctctctctcttgccccctctctctctctctcatcatttgctattcatcccttctttcatccctttccctccctcccctctcccttttcagtgcgttgttcggccgtccccttccgttgcccttcgaatttgttttcctcaccagcactttcgtccaattccaaagcgcatttaacccttttctttacacactttttgcaacaaaattccgagaaaagttggcaaaattagtgaaaaggaagcaaaaacaacggaaggacaatttgagggacaaaaatgaacaaaaggcggagggaagagaagagaaaggggaaaagatggaacaaaatgggcacaaagccagcgcaaagtcgagtatatcatcattgggaggaggagtatgaaggaagaggaggaagaagagaggaagagaaaaggaagaggaggaaaaagagagaaccaagaggaagaggagaaaaaagaaatggagaggaggggagaggaggaaaaagagagaaccaagaggaagaggaggaaaaaagaatgagaggaggggagatgaggaaaaagagagaaccaagaggaagaggaggaaaaagaatggagaggaggggagatgaggaaaaagagagaaccaagaggaagaggaggaaaaagaatggagaggaggggagaggaggaaaaagagattacggaggaagaagatggataataaaaggaaaaagaggaggaagggcatgagaaaacagaagacgatctccgcaaatgaaagtttcgtttgcacagtctttgtgaaagaagctaaagctgcaattttagttttcaaatttaaaatttgtattttattgagcaaaccacaggcacattagtgctcttatgtggcgcataaaaaatcaaaatcaaaataaaaaatgtcaaatagtacaacaatataaaaaagtataaaatttttacataaaaaacgtagaataattgtaaattaaaaattataccgtattacaaaatgctaattgtcgaattaaattgcattcgattcggcacaccaaaatcaaaaagaaataaaaaaaaggcttacttggaaaaccccaatggaccaatggaaaatgaaaataactttcgaattcatcggcacggcattcatttgaagggaaaagggcaattgagcggaatgaaagaaaaaatggggtttttattgggagaatgagcaaaaaaagggaaagaaaccttcactttttaactaaacaaactcaaaaggaaagcagcagcaaaatcaaacaa

SEQ ID NO: 5988 - DNA, 2409 bp, Heterodera glycines
  unsure (1)..(2409): unsure at all n locations
aggaagaggagaaaaaacctctaagcaagaggaagaggaggaaaaagaatagagaggagggtagaggaggaaaaagagaggagagaaaaggaagaggaggaaaaagagattacggaggaagaagatggagaataaaaggaaaaagaggaggaagggcatgagaaaacagaagacgatctccgcaaatgaaagtttcgtttgcacagtctttgtgaaagaagctaaagctgcaattttagttttcaaatttaaaatttgtattttattgagcaaaccacaggcacattaatgctcttatgtggcgcataaaaaatcaaaatcaaaataaaaaatgtcaaatagtacaacaatataaaaaagtataaaatttttacataaaaaacgtagaataattgtaaattaaaaaatataccgtattacaaaatgctaattgtcgaattaaattgcattcgattcggcacaccaaaatcaaaaagaaataaaaaaggcttacttggaaaaccccaatggaccaatggaaaatgaaaataactttcgaattcatcggcacggcattcatttgaagggaaaagggcaattgagcggaatgaaagaaaaaatggggtttttattgggagaatgagcaaaaaaagggaaagaaaccttcactttttaactaaacaaactcaaaaggaaagcagcagcaaaatcaaacaacaattaattgattaattaggccttattaattagtacattaattactcactctttgtttcataattccaccaattaaccaatgaattaattactcgctacaccaattaattaatgcattaatcaccaattagtagattaattacccactaaccaaaacacgtattaattacccaattagtttaaataattatttatttttcattttttttcctttttcgattatgtttaatcggattaatgaatgaatgaatatcatcagatgcatcagttgctctttttttcttctgtttatgtttttcattctattttcattcttttcttttgttttgatcactttttgtgatgactcatcgacggaaaactcacaaattcaatcgattaaagtgaaaatgaattcacaattaaatttatataatatcaattaaagtaaaattcatttatttttttacttattgtaaattcaataaaaaaggtacaattttttgacattttttctgtgtgatttgttggtaaaagtaaaccaacctttattttgtatattgaccattaaaaatcgattgatcacttttctttctgatcaattccccttttattacgtatttatttgtttatttctccgtttgtttttgttcccttcgtacaaaacaacacatttctttctttcttatttcccatttccataacatatgcctcctctcaatttgttatttctgaattatttactgggctaaaaaattcccacaaaaataatccctctcttttctctttccttttatctctttctcttttttctctcttttctctctctccccttcttttcttttctctccttcccctctctttctctccactctttcctttttctctctctctcnccttcttttcttttctctccttcccctctctttctctccactctttcctttttctctctctctccccttcttttcttttctctccttcccctctctttctctccactctttcctttttctctttttctcccctttctttttctattggtaaatttttgcattttccttttccaatgtctttggcgcttctctctttattaattatttattcttttctgttattttctcgcctattttttcctcttatttttctattttctttttcttttttttctccaaagattcattatatactggtatgtttttcttctactgttgtgcataattcatcaaaatgcgttaaacggggaggaggtaaaagaaatttgaaatagttcacaaaagtgagaggaaaaaagagaagggaggaagagcgaggaagaaagaggggagagaagaagaagagagagagggagagggagggagagagaggagaaaggacagagagggagggaaagaaggaagagaaagagagagagagagagagagacggttattcattcattaggttggaagaaaccgtgggaagaagcatcagaatgatgcggagggaggaaagaaataatgctggctggcttaatgttggggtttgaatggatatgggcagattaagcgggacaaatccatccaaaaacgacggcagcagcggaggagggggggggcaactgaaagcgaaggaaaaacatcaaagtaccaccgcaaaagcattagcggcaaattgaggacggacggactgcccggggggagggggaggggtcagctgttggtttggggtgatttgcttttcatttgaaaacat

SEQ ID NO: 5989 - DNA, 6455 bp, Heterodera glycines
aacgataagtctttcccttcggaccgccgggtccccctcacattaaccttaaaattgctcaaaatcgaaattatcatttttggatagtgaaataattagtagaaatcggattgtatggtttcatattttttgcacagttatacctgcctaaaaatcagtaaatatagatcccggtgcgggacggctcccgcgcggggctttgcgggatcccagtcgacaatgcgggattttgccgggttaatcccgccgggtcccgcccaaaatgtcgagtcctaatccacagcgttatgctcaaatttgaaatttgcgggttccaattttccatattttccacaatcctatttttttggaactcgctttttaaaaaggaaacggccgatttcacataattttttgatctttgctaagccaattgaagtccgacgaaaactgtcctaattatttgcctcaatatggaacttttgttgagcaccggcaatggcgcggatgtgcactttttggttggggaagacgaagaaaaggaggcgagtgactgacaatttaatagaaatcgagggcatttaaaaactttaaaatattgatcagttaattttgacatatcctgtagtaatttaaagcaaatatatgtggtgtatttgtctactaagaccaagaaatccatttagccataaaagaaaattatggcacgtgacaaaggaaagaaaaagtcgatttttttttcgtcgggatcgcaattctgcagggttaccttaatttcgacctatgtctaattccgaacccgaattcgagcaaaaagtcgaaaattcaaagtttcgaattaaagggagggacggttggggtaccatcgatagtattaattagtagggtttgtaattatatgcacatgcatatttttttcctggaacgtgggaggtctgaaatgcacgaaaaacatgtttttagcttgttttgaagcttctagaatggatttctatatgcatattttgcatatttgtgcatattttggcatttcgtgcatattttatgtgcatattttggcgtttttccaaaaaaacctctaatagatcggcccccaacagacaaattggcctttttgacctcaaaaaccggaaaattttctaaaaaaaataattttttagcaaaattttcacgaaaaatattgaataaataaattttctcaaaaaatggttaatttatgtcaaaaataagcaaaattttgcttttcaggttgatttttcgctaaaatgagtaaattttaagctgtatcgtgtttttttctcctaaaatgatttttaataccacatttagccatttttgaagattttactttatgtttaacaaatttgaagaaattttggaaaattttacccttaatttgaaaaaattatgtgcatatttttcactttttatatgcatattttgcaatttttggtgcatatttcatgcgcatattttaagattttatgtgcatataattacaaaccctatttagtagagatcggatacggaccggatccgtatacgtacttttacggatccgtagtccgtaatacgtattttttttggccgatacgtatttttacgtactaaggattttccgtatttttagtacgtaagtacgtaatccgtatcgatgtcaagtacgtaatactgatactgatccgtataaattatgatacgtattacggactatttttttttggcgtttttaaggtgaaatggagtaattttttaaattttgtgcagtcaattcgccaaaattttgaaatttgagggtctattccgtaaaattttcgatgaaaatcgaaaaagcactggaaatatgggaaaattactaaattggaaaaaagcaaaattttgtgcaaaaactcaaaacctttacgttattaaattgcatttcgtttaaattttacgaaattctttttcatttttttccattttgtaaatttttcaaaattatcgaacacataataaacctacaactaaaatctgcagtttgctccactaaactacaagagttcaatgaaattgcctttttttactaaaaaagtcattcttatgggtgtaaatattttcgtctttttcgtaaaattttgctcgaacgaaaacgaaaacgaaacgaaaatccaaaattttaaaaaccgaaaacgaaacacgaaacgaaaaacaaaaatttgaaaaccgaaaacgaaacgaaaaactttagcggacgaaaacgaaacacgaaaacgaaactcaaaaagtgccgaaaaaggggacgacacgaaaacgacacgaaatttcgtgcagccctgcgccggatccccccccccccccctccctgtttccaaaaaaaattttttttttaatctgaacgcagataattaacaagtaccaatattttaccctcacttccatttgttgccaattttttgttatcttgaattttgttgcttagaattgataataaatttgttataaaaaatcctctagctttaatattcaagatttgtatttattaaaccaatttttatcaaaaaatttaaaaaatacttatacgtatacggatccgtattttttctggatacggatttttacggactacggattttccgtatttttagtccgtaagtacttaatccgtatcggtgccaagtacgtaatactgatacttatccgtattttcgcaaaattccgatctctagtattgattatcaaattttttgcatcatcgtttcttgcatggtaatttaaacccattgattggaggaaaagtgaccaccgactttatcattaggttaaaagaatgagcctgtaatttcaggaaatcgcttaatttatcctaaaggcatatataccaggggtgtgacttgtctttcttttatgcacactgcttgctctttccccgcccatttcccatggacttcttgtccaaattcgatcgatcttcggctgttcatcgagctttttggccaatgtaatctcttcgatttcctcatcgacagttaaatcaagactcgtcgatgtcaatgcgcctgcagaagacgaaaaagccctaaaagtaaaaaatgttgttttgtattatgttccgtgtgaccgttttatgccaaaagtctgttgctgctctttggctgcccccgttttttctgtaaattccttgtataattctgagtgtttgtgcttcaaatgagtggccaatgtcgtcgttggtgttttgggcggaaaattcgttttgtagtcacaatttttgcagaaagcgattccgatttcctttttgaaataattccatattttcgacatactccttctaacaacctgtaaaagttaattaaattactgaccatttatcaaaaaataattgttctctaattttaaaacatagaggaagcagagaaagagaattattatggcgtttttcgcgtaaatttgaatatttttctgactggtcaaaagttcaatctttaggggtatattttcaactctcgcctctcgtcccaaaacgagagacgagaggcgagagtaccaaaaatggcgagagttggcgagagttgtcccacccctgatatatacatataatacaatttgtgatcactgcaacaaaacaacaattttatatacatcagatgggctcaaattcattatccaatccacatcaattaaatggatcatttctcaacaaatcgtccagtcatttctgcttctgatcacttggattgatcactgcgtcaagaggcctaaaaatcgaaaagcaataagtttggatatctgcataagaagcatcattcactgacccatctcaaatgtcgatccggttccactggtccataaagttccatccaatcgcttccttctcccatttggcccatttgctttcgtcgcgcacaatcggacaacggatcacgcctgtccttccgacgcctcggcactgtcatcgcatggaaatttggtgaagaaaccactggaataggcattgacaacgcgaagtgatggacagtcgtcgagaattgacgggacgaattgacgcaaacggcagaaactttctttggacaattggatgccacgaatgtttgtcgcgatcatgggccaaatgttgagcaaaatcgactccaaagtgcgttgatcgaagtacgtgtcgatggtcaaatgaatggggcgggcggcgagaattggacgaaaacggtggagaaaagtgatgacattgttgttgaagtacctgtgaaaaatgatggaattgttttacaaacagaaaaaaaaatcatcaaaatctcacttcaatgaaatggctttgaatccgacgactctctttggcaacggcttttgcgtaattccaaacgattcccaattggcattgacaacatccatttccttggtgccatccgcttcgaacttcattttgattttcatggatctcagagtccagtagcgagtcttgaagtgttcatccacgtagaagtcaaaacggtggctgatcatcgcaattccaaggccaagttgtgaagccggaagcaattcgaacacacaaagccaaccgtcgccagagataaaactgaaaaaaggaaaacaaaatttaaaaattgaaattgaaaattggcattttaattttaattttacattgctttcgccattttctcctccgcttcgtttcggttgtcagacattttattgaggcaaataattaagacagttttcgtcggacttcaattggcttgcaaagatgaaaaaattatgtgaaatcggccgtttcctttttaaaatgtgtggacttttgctgctgaatgacaccccttttgccccccgaaaagataaaagttagggactcttttggtttgcaataaatcatgaaaaactttttcccggatgtttttgaggtctctgatcgcgcaatagattagttttaaaagaggttttaattctaatcatttttgaaggaattttcaggagaaaaattcaaaaaagcgacaaaagaaaaaaaacgccgaaattgagaaaaattcgaagaagcgacgaaaagaaataaatgacgaatggaaaaaataaaaatgaaaagtggcgggagagaagcaactaattttatactaatttattttgccaatatttacacgattttaataatcaatcgtatttcgacaccttactataaaaggcatcactcctcttccattttctttcattcatcaatcactttttccttccttttgcttccgcaaaggatttccttgcttttctctggttttttaagataactagggcatccaattatatgcacatgcatatttttttcctggactttggtcggcctgaaacgcacgaaaaacatgtttttagctttgaagcttctaggacgtatttccatatgcatatttgtgcatatttcgcgatttatttgcatattttggcatttcgtgcatattttatgtgcatatttgagcattttttcaacaaatcctctattaaaacggccctctattaaagcggccatttttgcctctaattgttagtctgtgttgatacgctgagccgacaactgtttgttgagccagtaaaaagtaagaagtgaggttcttgcgatgataataatttttaggagaaaaaatgaaaaaaaaattgaattttgataattgttcgaatccgggttcggagttcgaaatgggtcgaaacggacatcatattcgggttctacgacccctaaaacccatagaaacgacttttattaatttaaaatcaatttaataaagaaaaattttgttgacacaaaacccgaaagtacctcgaattgtttctcaaaagaacggtgttgaggattttaaagaatgcgatgaaacagatgtttttaacaatgatacactgtctttgggttttgaaaatttcatttcttttgcggtgagtggcaatataattaaaataatgtgactttatttttaaatggcaaattaaggaattgatggacccgagcaaaggcttgtacaacaaagacgaggataaagtcaccttggccattgattttacatgtgaatagcgtaatcattttgagaagaattgaaaagtgttgaaaatcgaagagaaatcagcaaaaattccgaataaaaagattttttgatttctattataaaccaaaaaaatttttatgatatcgcaacgaagaaaatttacagattttttgaatccttttttacacaatcactctcccgtggatcatttcgctcaaattattaatgaaaaatgataatttaaagagcatttagagcacatttttctcttccatcaatcaaaggcccaaagtttttcgttgtccactgattgatgagtttctgctaaaaaaattactttaatttcgaatgaattttattaattatccagtgatttttcaaaatgaactgacggaatgttgcattttaattagcacaaaaagtgaaaacaaaactgctataatggatattgattttgtcttgcctgttaaatggaaggaaaatgcctat

SEQ ID NO: 5990 - DNA, 1121 bp, Heterodera glycines
tttaaaatgattttatttttcaatctaaaatgaattgctttcaaagatttcaatattaacataaatcaattcaatactttatattaatttaatattctcaatttttcttacagcttatcattgtgcagttattcttgaaccagtgtgatgtttctcattttctgcaatttaaaaaaatatataaataatctaatttgaacttttcgtttaaaaaaataattaaattgggtaaaaatatttaatttacgtattttattataaaattagcacttgtattccaatttttttaattttactaaggcttttatttgggttttattatgaaaacatatttggacgtattattttttatctggctaaatatatttgtgtttttggtaaaattgttttaaaatttatttatctgaatgagtttctaagcttttgttaatttttgcaattaaattatactcttattttaatttcatttttgaaagtaatagcttaaaccttgtcctgaccacttcataaatgtttgatgctccatttgaaattcgctagcaaaacgagcacaaatggctgagctggtaggttaaagttgttccgcaacttgttattgttctagtttctgttgcgccacatgaggaaaaagggtggaagttggattgggatttgaatttggatactttagtgccaagcacttttaaatttggtttttaattgtaaagctattaattagagaccggacaagagggtcggtcggtcggtttcggtataaaaaccgaaaaaaccgaaaccgaaaaaaaccgaaaaactcaaaaatttgtcggtcggtcggtttcggttaaaaaaccgaaaaaaaccgaaccgaaaaaaaccgaagaaaaattttcggtataccgtttcggtttcggtttttttgaatttttatattttttccaaaaaaagcaataaaacatttttatcaatagaaaaagcgaaagatcacctctgagtaaaattgtagagctattgaagctcttatcaatggtgtataagttgggaaaataattgaaaaaggcagccaaaaaacgtttgttagcttcctgattcttcttataaactagggttgctccccgacccctgggggggggggggggggg

SEQ ID NO: 5991 - DNA, 1202 bp, Heterodera glycines
ctcttgtataacaatatatagtctagtctttaaaaagatttaattcacgcatgctagtaagggtttcccctttgctctccggtatacttttcattgagtctaaattattttagattatgttttaaaaatttaaataaccatagtctcaattatataaataagaattttatatattgcaaatttaatgttaagttccaattttattcaaattattatataaattttctgttattttttatttattattaactaatatagacgattgctttactccttgttctacgacgcaaatcagtagtaatttcacgtatggaaacgtttttcaaatataaattttaattaaaggttgttgcttcctttttttacaatagattcatttatttacaaattattatttttatctaattagaaaaatataatattgcaaagctaatattcataattaagctaattgtctcgctcctctttgttctaatcgtttaatatttattttaatatatcaaaaaattaatgatttttattactattttatgatttcaataaattaaaaatttcaaaagtcacaatatcacttgcgtcatcagcaacggcattctatccattaagaatgctcataatcaagcttttaggttattttctgaaccggaaaaattgtttatattcgaatttttcaatattttagctatactcaaatatttaatttaatttaaatttatgatttgctttgagaaaatacatgctcaaagaagcactcgttttttccatattattttatgagttttttatattttgcttcttcgatggaatgctctttatattagattaaatttctgaataattgttctcgtattaaatcaccttaacatcataacttttttcttactaagtcaatattcttgttatcagatgaaagcttaaggtctatagaagcttttgaataactttatttttagctaaaggcaatagacaaaaaattatactcggaaaagttgaatttcttgttttcacgttgtaatttttttaacttgttgtcagtatttgttctttctttacattcatgaattcccgagacttttatcttttgcttggtaccaaaaacatgggtattgaaaaagtaagaaaaaagttatggcctaagtaattggggatggtcatttatgggaggcataatctgtcatggacgcataaaaccgaccagaacc

SEQ ID NO: 5992 - DNA, 3899 bp, Heterodera glycines
agagttggtcggtaatcggtaattgtaaaaaaaccggtaccggtactgaccggtactgcaagaaccggtaccggtactaaccttttccaccggtaccgctaaaaaccggtaattttgtaaagttaaaaatttttgaacaaaatttttaattttcgcgcgagtgactgtttttaaccaagtttttttttcaaattcaggtaaagaacactaaaaccagatttagactctaaaattaagattttttgtaaaacaagggggtcagcggtcaattttccaattttgcgaaggggtccgaggtgtaaaatgcaaaaaagggatctgatcggtggatgggaaaaaaatactttgattgaagattacttttgaaaaaatgttacttttaagtaataaacccgttgtaaatgtgcaaattgatcaacaaattttttgcggtgcatttttccaagaaattttggagaactggcgtaggtagtgagtccggcggtgccgataggcgccgccggggaaatttttaatgatatttgttaacagattttatccgaaaaatgaccaaattaggttaatttttggggtttttaggctgtaaaaaagaaaaaaataataattattaagtttaaatatttataattaattaatttcaattaaaataatggtaaagaaatatgaaaaatattctattccatggggaactgaacccaagcgaaaaataatgaaagtcagaaggttagccactagacaacatttgaattcgaataaatgctataaatgaaataaaataatttaattttttcctcaaaaatttccacttcttcaccatttcctactcttttctcacctagacacccattcataccagtgtaaatttttaccggcggtaccggtactagacaaaccggtaccggtaccaaaaaaaccggtaattaccggccagtaccggtaccggtaccaaaaaaccggtaattaccggccagtaccggtaccggtaccaaaaaaaccggtaattaccggccagtaccggtaccggtaccgtgcaactcagttttcaatgaaattcaaatgaccccactttttaagtagcgctaattattttatatttttccttgttctacaaaattttaaggcgctagttaaaaagaggacctttttgaaaattttttcacttttttttggtcaatttttttttcgtttattttgatgcagaattcgcttttttaccagatggtatgcttcattatttaataaatagaaaaaaaaatattaaagcaaatttggcgctagttaaaaagtgacagattttgaattttatcaaaaatcataagggcgacccttttgttttacaaaaattttttgtgatacaaaatcgtgaatatacttttattcgccataattgtgctgttaattagagacaggcgcaggacaggatcctgcgcaggattttgcaggatcccagtccgcaatcctgcatattttggaaaatacaggatttacaggatttgctggattaatcctgccggatcctgtcctgtaaaaaattttgaattccaatcctgcaacaggacccgcaaatttgatttttatgcaggattcagcaggatcctgcattgattttttgaaaatttttaaaaatagaatgccaaatattcagaaactttcttttttcaaaaatttttttcttaataaaaatttttcgtttaaaaacttatccttattcgaagccacccaatttggcaaatcggtctttttaaacgcattaaagaagattcagtcgattgcttggagtgtaagcaaaaaaacgttattaatttttcatcttcatcattttttggtttaaaaatatattgaatacttttttatactttgaaagacttttttattaatacagaattttttgaaatttcctaaaatccgcaatcctgcgcagggtcctgcagattttaaatgcaggatttgctggattaatcctgccggatcctgtcctgtaaaaaattttgaattccaatcctgcaacaggatccgcaaatttgaaatttccggtctctactgttaatgcttaatattcatcattatgtgtaaataaacaaaacaaaacaaaaattgaccaaaaaaagagaaaaaattttcaaaaaggtcctcttttttaactagcgcaatatcttctaaatattcattcggtatatataattttgaaatagcaatttttagagaattttggtgataaaatcacacaaaactttttcatctttagtttaaattcgtgaaatgacaaaaaattcaaataaccgccttttttacgccaatttttaaatggcgggaacatttttattcaaatattttttgtttttcaaattttcttcattttctttgctcattttccgcctacgcctaatgaaatgacttaattcaatttgaaaacttcatattttaacaaaaaatatttttaggcctatttttctacaataaaattgcaaaatgtccagcacttcgtccactgctggtggtgatggaggagaaggggaaagtgaacgcaccgcaagtccaactccgctcgtcccgctcaacgaatttgaacggaatacgcttcgaagcgcttcccagcaggagggcagcggtccgtccccctttttgggctttaagcatccaattaatcggcttttagggcgtccaatcattttttttttgagggatcatggcctatttaaaaatgccaaatggtgagtgatacattggcatttcccaattaagagtatggcggtcttgactatcccgcttcggaaagcggcttctccggcgtcagtgcatcaacggtggccaccggacagggacgagcgggcggcacgggcaaacgcaagcggacggacatgaccatgacaccggcacaccagcgcacgttggcagtggatgccaacaatgaccaattgaggcatgagaaaggctgggcaaaatttttccgccatttggcaagccaaatttattttacggaatttcaattttctcaaaaatataaaattcccgtaaatttttatgtgcctttccttatgaattcacaaaatttcttccgtttttctgtgcaaattccctccaaaaatcggaaaaaactttattggtgctagaaatctaacctctatttcgtcaattccgaattctaaatgaatttcaaaacaaaaattcaaaatcggttttcgacctttcgttcgagttcggattagggactcggaattggttatcaaggtcgcaaaaagaatacacaaaagaaaaaatatcgaaataggtgtcagattcatgcttaacatttgattttggactgagaaaatgtgggagcaatcgaaaaaatgcctaaaattgtttaagtgccatttcagaaccgatctcgatgacactttggggccaactgcggccgacgacggcgccggcggtgctgcgattgaccaacgcgtttacatttggggcacccgtgtttgtgttgcggaagtgcaggccaagttcaagcagttcatcaccacatttgtctccgagcaggtggacgacgacgaaaacgccattcaggtgcgtacccgctttttaatgccgaaattcgggtgccaattttgattggcaccccatcatttttcgactcttattcgaatggataatttttttttattagagaaagcctgcctttttggttagggttttttttgaaaaataaatcatggcccaatacccgtaaactttggaaatttttggtgactaattgaaagaaaaaacagggcctaaaattttcagtttttgcttgacggtgccttttggctcggtatagccgaaccaccactaaattggttttaaaatttttcaaaatttggatccagaaatcatccacaacccactgattttgaatgaaaatttttgcacgacagatggac

SEQ ID NO: 5993 - DNA, 1426 bp, Heterodera glycines
ggggtgtagcccccctggccccccccccctagctatgcccttgattggcacggaaaattataaatttttctcaaaaatttcattggttttttttcttgtgcagatatcaaccaattggtcaccacccaaggcatggtcacgcgcatttcgccgctcatcccacaaatggtcgaaggctatttccaatgctcattctgcaactatccggtccaatttttttgagagttgctcgggctaggtgaactgttcactctcaacaccaaccgggattttctgagggggcaggttttggggcaaaaattagtcttcatgttttactgagattactggctattgctgctgttgtaggaggtgcgtaaggtggacatgggcgtggtggaggagccgatcaactgcatcaactgcaataaccaaggctgcttccaactcatccacaaccgatccactttcatggacaagcaggtgatcaagctgcaggagataccaggtgggcgagaaagggcagtgttttggtgtcaattaacaatcaacaaattcaatactcactctcataatccaccaataaagagttcgagcagtacatcgacccgaataccaaaaatgagccaaaattaaattttaaatgacccatttagccccgaaaaattaccatgagaattcaaccccaataaattggctcgcacttttcaattttttttttgagttcaaagtcaacgccgtttggccgttacaaaaaaagcttaattattgacaggcgacatgccggccgggcaaacccagcacacagtcacgctgttcgtgcacggtgcgctggtggagagtgttcacccgggcgatcggatcaccgtcaccggcatctaccgggccagtccggtccggctgaacccggtgcagcgcgcggtgcacgccatcttccggacgagcatggacgtgatacacttccgcaaaatgtgccaggaccgactccatgatgtcggagacggcactttcttgacggaggagcgggtggcaaaaatcaaggcactcgcccagtgcgaggacgtgattgaacgactgatgcaggcaattggtcagttggggaggggagagagggtacaaattaaaaaatggactttttttaattccaactattttttaattgaaaaattctattttacgattaaagatttgtgattggctagaaaatccggactttcataatttttttcgaagcttttacataagttttattatattcgaaaaggcattaaaaatttgtttttgtttctaattttatgaaagaaaaatagaatattttttgaaatttttaattttttttaaaaaatttccaaattttttttctaaaaattacaattttttttatttctccctaagcgggagtggatgaattgggtaaataagagtgggatgagaaagaaatagagag

SEQ ID NO: 5994 - DNA, 1585 bp, Heterodera glycines
ccccccccccccaaaaatgaaaaatgtttaaaaaatttttatttttcggcatttcaaccgcgttttttcagcgcccaacatttttggccatgacgaaatcaagcgtggccttctgtgcctgctgtttggcggcacgcgcaaagcggtggacccgacggacgacgcgtcccgtgtccgactgcgcagcgacgtgaacattttgctgtgcggcgacccgggcaccgccaagtcgcagctgctccagtacgtgttccagctggtcccgcgctcgcagtacacatccggaaaggttgccattgtggttcctttttaattaatattttaaaaaaattccccaccccgaaaaaatggagtagagtaaaaccctccgccgataaattattttccgtttttttttgaattaaacatacattttttcaaggaaaggaggggtcgcaaattctaggaattttctttaaagacaataaaaattccaatatttttcccggggcgcctatcggcaacgctggacaaaaaactccaatttttattaaaaaattaaccgaaaatcataagatttgatcatttttgaacaaaatctttaaccaatcgcatgaaaaattacactttacctctctgttcccaaaattttttttggaaaaacgcaccgcaaaaaaaaagcgggtttttaaaaaaaagttatcaaaatcggcggccgacctccctccccctaaaattctgtcgtttaatgatgaaattgaatttcagggctcttccgcggtcggcctgagtgcgtcgatcacgcgcgactcggactccaagtcggtggtgttgcagacgggcgcgctggtgctggcggacaacggcgtctgctgcattgacgagtttgacaaaatgagcgacggcacgcgcagcattttgcacgaggtcacaaaaaaatgggtggggattgatcagaccacccagaaaggataagggtcaggacctccgaccattcggggtaattcccgcaacttttgtcttgccccgagcccaattaccaattcgggacccgacggagtgacaaataaaacgaaaacagccgaaaaaaacgatgggttttgtttatttttcacaaattttcaataagttttttggggtatggaacagggatgcttcgggtcaagaaaaagtcgggttaggtcgaccgaaaaactttggaccgtgaaaaaaaagtccggtgccggacttcgggtaacccgtacaaatccctgcgcgcatatggaacaaagagctgccccattaaaaattggtgatcagcaagcagcggcgatcaaacaaacaaaccctgatcactcactactactgatcaaccaattaatttttcaggtgatggagcagcagacgctgtccattgccaaggcgggcatcatttgtcagctgaacgcgcgcacttccgttttggccgcggccaacccaatcgactccaaatggaacaagcggaagaacattgtgaagaacgtgaacctgccccacacgctgttgtcccgctttgacctcatctttttggtgttggacccgcaggacgaggcgtacgaccgccgattggcacggcatttggtaaatg

SEQ ID NO: 5995 - DNA, 1749 bp, Heterodera glycines
  unsure (1)..(1749): unsure at all n locations
caatgcccctgtccgtcttgtcctttatgtgcaaaatgtggttttctttgtccgccttaattttggttgaaaatttttcggttgccacaagttctgttgcgtttgccggcgaaagggaccgaatttgtcctggtcatccgacgaattggagtccttactacagtgcaaattttcgggaatcggtttttcaactatttcggcccaacgcagtcccactggatcacaaaattcaggctcatcgccttgtccctccataaatcgctgttgtaaactcactgcaaccttgtcaaaagcaacacacaaacgctgtgaagtttcataaaaaaattgacctccgcggcttcgtttgaatttgtcgtcaattgactcactcatcataagataaatggtcatggctctgctgtaaagtatgtatgcgtcctcctcatttccttcctgcattttcgtttttcctttccgttcgacttccaccaaaaagttgagccgagtaaaattgtcgagccgtcgaagtgaataaagcaatcgattgtcaatgtcgttagcatgttttttgagcacctcataagattcgtacctcaacggatgcaaatttgtcgatgaagtccgcataattttgtcttatcaacacgagataaaacaaaaatccaaatgcataaagcaacacgagctttttataaaagattgtttggcgagcacaacacgagtgctttagacgaatttgtaaacgtggacgaaataaggcggatgaagaagaacccaacacgagggtattaaaatttgacgagcagttgccgaacccaacacgagggtattaaaacagtcgataaacccaacacgagggtttttgccaaattaggtagtcgcgtttttaaaatgagaaattcactgaagaaaaataaagccgtccgccactgagctaacctttgttaccaggagcgccatgttggaaaagaagaaaggaattgcgccgggggttttctttgccacacttctaaattttgcacaaatagtctatgaaatgggcaaaacctgctttaaaaatccaacaccaaacaaaataaatttatgcaacaaataattaaaagacaatccaaaataaataaaattcaatcaacaacaaattaataaaaacacaaaaaaaatcgacgaccaacaaaacgcctaaaattatcaccgacgataacaaaaaatccacccctaccagagaagaaaaacgaaaatatttgggtcgaattcaaatcaaacattatgccaaacaaattcaaaacaatcaaataaaagggtcaaacagtcactaataccacatcctcggcctttaagaaagacggtcccctcgtctttgagtaaatggtgaatgcgncatccgaatggtggggttcaaggctttcagctagtgacgttacggcttttaaaaatgtgggcatttgtgtcctcgaaaaattttaatgtgtttgtccaaaagaattttatcgggaattttgatgaagatccacgttttgagccattttgcacggtccgctaatattcgtccgtcggctttcacactgcaattttcaaatccccaaactccaacccgaacttttttcttgcccgtctccctgcagccaattttcttcccctcacccgaaaatttcatcgtccccgatgaaaataccaaattttgaatttggaatgcgccagcgatcggcggcatcttattggtgaaggagtagtcgcttttctctagttccgaatgccttcgcatccaaa

SEQ ID NO: 5996 - DNA, 5343 bp, Heterodera glycines
  unsure (1)..(5343): unsure at all n locations
tagaaagggaaattggtggggccccgaaaattaggaatacgaaaattctccgatttaaacttgttccgtggaaatggagtttggtcccaatttgccccttccaatttaatatttaatttattctttaattcctcgtttcatcctccatttctgtgagaaaatcatgagggggcgtgccctagtgcggtatgatgcccaagttaaaaattcaagttcccattgcactcactacaaactgacgacctaatgaaaaaaaaatccccgaaggagaatttaattaaacccattccttcggggaaccggttcgggtgccgcggggtaagcagtgctggtttggtttcatcacggcacccatccttttggcaagctagccatcgttgcttaacttgccagatcggacgggtgcgcatgattccacttttccaaaaaattgttcgaaataactaatatatagagaccgcattttgaggcatatgccttttttctgcgcactagttcccgtatattaagcataaataacacattttccacttggtttgaggcttctatgttgacttttattatgcctttttttgcctttttcgggattttcgtgccttaaatgccttttttggcattttgccgttttggtgcctttttttggcgtttttccgaaaattccattaaaaacagaataaaatcgggaaaatacacccttaagaaatgacttaaaattttcagaaaatacacccctaagaattgaaaaattttctcaaaaattaatcgccaaaatactttttttttcttgataaaaaattctcggtttaaaaattttccttattagaaaacattataaaatatttaataaccatttagatgaccaaaattaagtttttggttaagttttacgtgttttgctccctaaaaaccttagaaaaatttttttaaatgccttttttcatgcctttttcgggattttcgtgccttttcatgcccttttttcaattttttcgtgcctattatagtgcctttttcgcgatttttggtgcctttttttgcggtctctactaatatataagaaaaaatttaactctaaaaccgagccattttcgaatacaagcataaaaatgctataattacatttaaaaacacgtagcatcattttttattgagaatagaaagagctgagttcgaagaaactttttttaatttaagcctacgaatatgcatatatttcaaaattcataaaaaatttatagaacagaattcattcgagattttcagaaatatatacgcatatgaggccattatgaacatgtaaataaaatttggtgcgcttctgatcacaactcgaaaaattatgagtaattgaattttcactaaaaagttaagcctaaaattattggcccaattaaaaagcaattttaaattttaaaaatttttattcctcacaatttttcagaatataagcattatttaacatgtaaataaaatttggtgcgtttcagagcactttattattatgaattaattttgcaaaaaaaaattaaaaaaatagaagactcagaatttcgaaaaaaaatttatttcaggaaactgattagaaatgtttaaaataggttaattctcttcttttcagtatccctgcaaagtttggtgcgcttctgatcagtttaaaaaaaatcacaaatttacaattttataaatttaatgagttcctggtaatattttattaaaatatttttccagccttttttttgattcttctttcaaattacaaaaatttatcaaacataacaacacattgactaaaccctgaaaattgaaataaattctcaatcattccgtattcagaacgccttcactttttctcttgaattccgctttatatttttctaatgatcctgtcgccaaagtttctcttggcgacgagaaggcggaggatggaagcgggagaattcccgggcgcagtttgggggagctcggcttcctggtgttcaaccaggacggtacgtcggtggaattggacgaagaggaggaaaatcagtggggaggcggcgtccttgatcatcccgaagcggctccgcggcgcgcaccgaaggacgaaaaacgaaagaaatggcgccgatgagacggacggctcccacacttcaccgggagagccactcccgacagccaatttcgatccttccgccatttccctcgcaatttccccacatttattttgccatttcttatttttattcacatttattattctctctctctctctctcttctcttcgcctatcgtatccaatcgtctcacttctccgatttgcaaattgtttatgcatttcttcgccacttttcccaatcccccatttttcgctggcctttggccgtcatttatccgaaaacattttctttgtcccaatttctgcacattttccatttcattcatttattcaatcccccctttttcccttttgcattaccattttgtttatctgatcagcctttggccgattcattttgccgtctttgaattagttattcgccagcaattcttcgggggcgtctcccccggtctcctccccctccctttgtcattgcgtaacttggccatttctcattttcattttcaaatcgttcgccaatttgtaagggggctcctccccctgctctcttccgtcctcatttttcatttatgcataattctatcgcattttcaacattttgttttccactaatcaccactggnggagttgtctccccccaatttcaaattcccgcaccacaaatcgcggcattttttttacccccctgccgtttgtcactctccccccccccatgttcggtttaattacccaagtttgagctgcttaataaattgtgcttttaatcttgtgtgcttcaaagggtgggaaagaaaaaaaaaaaaggggagcgaactcccttcggacgaactcttcttagcccacggacgggctcgcgcatcgatcggtcacacgggactccctcacttggagtgcccagctcgccttagccctcgcacgggctcagcacgttaaaacgggactcctgcctccggagtgcccagccgtcccatttttctctcccttccccctccccaacgtcctctctccccctccgagagtcggaccatcggaaatcttcagcgcaagatgggagaagcacgctcccggcagttcaacttgtgggattagccaaagagtcccggcttctccaaattctaagtcggtggtgccgttattcacatcactcggcgccctcgcctgcgccttttgctgacagtactcaagcccaagggagccacctctccctttgccggccactgccagcttcactcgttcggcgcctctgcctgtgccgacgatcgcagcactcaagcccaagggagtcacccctccctctgccggccgctgcctttccttagggagtccaatttctcccgcgcaaatctttgtttgcctccccgacccctccgcctcactccccttgggaaagggacccggacggcatcgcgaatcggaacggcactttgaggagtgaggcggtgccagtggaacgggagaaactctcgaccgaacagaggaaggagttttcgccacaaacaaatttggtgccgttagcagggggacaccagcaacagtcaggtcgccgaggaccaacagcacaaccggtcgccgaggaccaacaacaattcggtcgccgaggaccaacccaacaacgaatcgcgccagcggcaatttggcggctcgatcaacagtgaacggaatggagtcgtcggatagtgaggagtacggagatgagcagcacacccaaaaaggaccaagcgggagtcgtcccgaaactttggacggaggaaagaagtctaaagtgaccggcaaaacgactacgagaagcgaatggaaaactcagtggagggggggcgaagcaaacgggtgggacacccgtcgatcagcacagcgctcgggcaaacatcgcagtccgaacgagtcgagatcagatcgagagagcggccgggacactcgccgcacgaattgctgaggcacgtggaacgctggacgaggacatgtcggacggggaagcagctcaacacgcagcgaagctaatggtcatgcagagaggcctacgagaagctgccacgatttttcaggggcatttcaacaaaggaattgcggcagtgggtgatgcaccctatgaacgccaggacgaattgtacgacttcctcaccgctgcatacgataacaaatcaactgaggctgaattgtcatcccaccccggccgaagcgcttcaaatcgcagcggagcacatcggtgacttgaggatgctgcgcaggactctcgaggacgaggacagggagtcaagccgccctgactcggggggctcggacagaacagaaggcagcctagctcggggggacgacccccgcccgttcgaaacgcgacaccgagaggactgggataagagctttcaagcggcatccgcgcggtggcagcccgactcaacggctgaaccacggccacgccatgaccatcagccaattcgggtgccaacacccatgatttcatccgccgcacaggtgctccagcgacgcaacatcgctccctcggtagcgagcctacgagttaacccagctcgggaatgggtgaatcagaacagcgcacaaatgggggcgaacccccaaaggcagatcgctcagccaatccccgtgcttggacagccaactgcgggagccggaccgacccaagcccacacgtggcgggacagacagccgcctgacatgcgagcgacgcgcgagacagggaggtgctccctacggagtcaatcgcttgaccgagcagatgggccagcttacaacgttcgagacggtcagactacaaccacccaccttctccggaaaggcagaggactggacgacgttttgggcctatttcaaacgagcggtggatgaaaagcccatcccaggcgtggagaagcagcttcacctgctgcggtgtttgaaggagggatcgccggcgagacgagcggtggaggtttacccaccgacggacggcaactacccggtggttgtccagctactgaaggagcggttcggcaacacaaatgacctacagcgagcgatccgggcacagcttctccatctccccccagccaaggacaccgtggcgagccttacgactatgatcgacgaatttgaacggggagtctgccagctcgagcagctgggggcaaacgtggacgatgcctcgtttggaccgctgttggaggccaaactgccggtgcggatcctgacggagttgcgcatccgcgagaaaagggatgggagcggagtggacggtccgggaattcgaaaag

SEQ ID NO: 5997 - DNA, 4160 bp, Heterodera glycines
  unsure (1)..(4160): unsure at all n locations
ttattggcaaacaaaaaaagaaaacccaaaaatcagtgctcttctaattggaaaacattgaaaatttgtaaaaagaatattttaaatggaagaaactgtttggataaaagaatcattgaaaattgaaaggatgattataagaaaaattggataaattggccgaaaaaattatcagaaaaactatgtcaatttctagtttttttttcaaattttttgtatttgtattaaaaaaattattttaattaccctaaattttgaaatttttcttagtgaaaataagtgaaaacagtcaattcaaggattgggagggtatcattaaaaactgaacaatgttggaactgggctcccagtatgcctaaattttcgattttagaggccctgtaaaactccttggggttttgctagggtgaaaaataataaaaattaaaaaagcataaactaatattcaataacaaataagtttttaaaaaatgaaattgagaagcaaatgtttgggtcaaaataatctcaaaatgttgtataatctgcttaataaaatccaaaatgattagatttcactattaatgggccatttatttatttgtgaaatgattttaaaaaaataaattggttttctaattaaaataaactataaaacattacaaaactcaactgatcaccaaaaaataatatttattcatttaaaaataagtatattttcaatgccttacaaagatttgcattcgaatcagaacaaatttaaaattcatgacatttttatattttcaataaatcaaattttcacataataaaatcaatggaaaaaattttgtttacttttctttatttaaaaaaaacatgccaagccaaatacaatacaatgatttataaaatataagaattgaccagtttttaaaacataaataattttataagaaaatttatccatttttttcaaaaaatatttttttgctttcctccaaggcgcgtctggccaccaaacacttttcgaagaaacattccaaagccttcttttgatcttcatccgttgggtactgtccggtcgccacaaaatctccctttttggccacaaataagcgaatttcttcttttggctcgccttcaattattacgcaattagggacaattgcaaaaataggcggtgaaggagggataatgaaatctgatatcccgggaattttggctccggaaatcaataaaatggagaaacgcaaaaattgcccctttgcagtgatggaagtcgatgaggaagacgacgacaaaacgtttgactgggacgtcctgtgtgctgaggatcaggatgatcacgaattttgtgccgtgctccgcgtgtctgaactcgtcccggcgctagggaatgccgaacttggcacaatggccgtgaaaacccctctacacgctcttttggcggtgtttttgctgaaagcgggaacagtcaagtcaatgaccgcagcgcgaagtctggtcaaagcgataattgaaggcgagccaaaagaagaaattcgcttatttgtggccaaaaagggagattttgtggcgaccggacagtacccaacggagaaagatcaaaagaaggctttggaatgcttcttcgaaaagtgtttggtggccagacgcgccttggagaaagcaaatttgagaagattggcatgacggcgcccgctggactcaaccacttggccgaatcagagaagaaaaagtgggaagaagcgtccaaggaaacgccatgggcgttagaacaattgagggcaaaaatcgtgcacaagcctcaaaactgatggcacacccgcgtatcataatcggtgatcagtctgctcaccaattggcggaaatcctggaccaaacggcagtgattgggcccaaaaatggaacattggcggaaacagtgcgcactctgaagccagtggtactgtcgagcaaagtgaaggcagctctgattattgccggacgcgactctcttctgagagtagaaactgtcgaaatgatgatggaacagtacgaaatgatcgcgaatctgtgcgccgttttgcacatgtgaagttcttctggacatgctcgccttatgtccatgagaagcacgacgaatacgaagaactggtcgcacgtcttggaccaatgatgagcctaaaccccttcattcccgtctgggtgacggaaaaagggtgatcaattcacgaacttttccgattcggcaactcctttgacaatatgagagtgacttccaacggactaatgaaggacgctggcgtgcgagcactgaaggcctgacttttcactcagtcagacttcccgggtgatcaaaaattgaaaattcggacaattcggtcggcagttcacgtcgctgcttcggttggtctgggtgaccaccgacagccgagcacttcgagttcgggctcgattggtctgggggaccatcggcgccacaccattggttcgatcggttatcgtgatcagcatcgccgtggttcgggctcgattggtctgggtgaccatcgacgccacacgttcggaggaagagcccaccgagatcaccaccacccgtacagcagtggagacaaccgcgtcttctggccgaaccgtggatcgtcgtcgaatcaccgcaattaaaacgttatagttctgctcgaatcaccacacctttcgatcgaacggcagggacgccttttttgttgtgatggggatgtagtgatcagttgacttttgaccatttgatattattttaaatcatatttgtttggcattttatttatgattttgttttgttattttgttttgtgtaatttagttagttcgctgttttatgtaatttggagaataattggatatgtgctgtgctgtgccaatttgagttttaatattatttgacggagttggataatttgtgaacaataatcattggtcaaagtcctaatcaattgtccccatccttccgacctaattaaaagactgtccccgtgtgtccctgcctaattaattaaaagcaattaaagcagcggagaaaagtgactattataccaaggaaaatttttacgtgtttcacttccatgctttggtaaagtcggtccgcaaatgtcggctaaccttttttactcctttatttgaatggaatacaaaaattatgagatgaaaagaatacggtgaatacaaaaattgatgtggtcaaaataaaaataaaataaggtagacaacaaaaggccataatttttaaattttacaactattttcattaaatggctcgtttaatagtcctctccaattttttttctccattntaaaacgttagaaagccaatttatttttttaaaatcatttcacaaataaataaatggcccattaatagtgaaatctaatcattttggattttattaagcaaattatacaacattttgagattattttgacccaaacatttgcttctcaatttcattttttaaaaacttatttgttattgaatattagtttatgctatttaatttttattgtttttcaccctagcaaaaccccaaggagttttacaaggcctctaaaatcgaaaatttaggcatactgggagcccagttccaacattgttcagtttttaatgattccctcccaatccttgaattgactgttttcacttattttcactaagaaaaatttcaaaatttagggtatttaaaataatttttttttaagccccaattccttgatccatttataaattgtcgttcgatttgtccccaattttttcgctatttttaattcaattttttcccattcttttgttgagtattttcttcctttttgcttgattttctcttttattttataaaattttgcaattatttctctttttttgagttcatttcgcctttcttcttctttttcttcccgtttttctccaaatatttcatcaaatgatttctgttgcaattttttcttttccgttttaatttgatcaatttcgatgattaaaaatataattaaaactaataataggtggagtttcattttcttcttaaattctcaaaaataaatttggtaattttttatttttataaataatataaatctaaatcttctgcttttacaaacataaaaaaataatttaatgtaaataaaatttattaagattttaataaattttgttctactgaacaaattattggcaataataagta

SEQ ID NO: 5998 - DNA, 1870 bp, Heterodera glycines
  unsure (1)..(1870): unsure at all n locations
ggcctctaaaatcgaaattttaggcatactgggagccccagttccaccatgtttcagtttttaatgatacctcnccatccctgaaattgactgttttcacttattttcactaagaaaaatttcaanatttagggtaattaaaataatttttttaatacaaatacaaaaaatntgaaaaaaaaactagaaattgacatagtttttctgataattttttcggcaaatttatccaatttttcttataatcatcctttcaattttcaatgattcttttatccaaacagtttcttccattttgaaatgttctttctatcaattttcatcatttttgcaatttccttgtcactcattttcggattttctctttttatttcccaataaattttcattttttccattttttctttttccgttaattttatactgcgtatagcaaattgtttcttccatttctcaattattctttgactaactccaattttcttacaaatttcggcataattttgtttccattctttggtcgaatattttcttttctctttaagctcatttgccatttcaatgaatttttgtacaatttctaacttttcttcatccgtttttgatttatagcttttctttatttgtttttgaagccccaattctttaatccattcataaatatttttgcgatatgtccccatttttttcgcaatttttctttcaattttattccattcttttcttgggtattttcttcctttttgctttattttctcttttattttataaaattttgcaattatttctctttttttgagttcatttcgtttttcttcttctttttcttcccatttttctccaaatatttcttcaaatgatttctgttgtaattttttcttttccgttttaatttgatcaatttcgatgattaaaaatataattaaaactaataataggtggagtttcattttcttcttaaattctcaaaataaatttggtaattttttatttttataaataatataaatctaaatcttctgcttttacaaatataaaaaaataatttaatgtaaataaaaaatttttagattttaataaattttgttctactgaacaaattattggcaataataagtaaaataatgattagtttttaaatgttttttttccattaattcacattttattaaaatggtccccattgaaaaatattataaaataaaagaaaaaaataagtaaaaaggaagaaaatactcaagaaaagaatggaataaaattgaagaaaaaataacgaataattttatactgcgtatagcaaattgtttcttccatttctcaattattctttgactaactccaattttcttacaaatttcggcataattttgtttccattctttggtcgaatattttcttttctctttaagctcatttgccatttcaatgaatttttgtacaatttctaacttttcttcatccgtttttgatttatagcttttctttatttgtttttgaagccccaattctttaatccattcataaatatttttgcgatatgtccccatttttttcgcaatttttctttcaattttattccattcttttcttgggtattttcttcctttttgctttattttctcttttattttataaaattttgcaattatttctctttttttgagttcatttcgcctttcttcttccttttcttcccatttttctccaaatatttcgtcaaatgacttttgtttcaattttttcttctctgctccaaatttgatcaatttcgatgattaaaatataattaaaactaataataaggtgaagtttcattctcttcttaaattctcaaatagatttggtaattattatttttataataatataa

SEQ ID NO: 5999 - DNA, 900 bp, Heterodera glycines
aacagatgatcacccaaaatgcagcaaaagcagccgaacaaagagacacgaatttttgccaaaattttgaacaccgccgacaatttaatttccgatcatcgaaaattatgccccaccacaatataatgcatcggctacgagaatttttgaacccaagccgtcagaccttgcgcgtcatcgacataaatggggaggaagttaaatgctacggaattgtttcgttgccggtgagaagaatgggaaggaccgtgtcagttcgtctccacgtggcccaaacatcgttcggctacgatttgctcttcggaacaaattcactttcggacctgggttttaaacttttttgacgaattgtccgacacaattgtcgatttcaaaccggcatcgaacaatgacaataaggcagtaaacatcatttatggtttgactttgattcaaaattccacgccatgtttgctagggaaagaacgaacagaaaaggctcggaaaaatggtgtagccatcagccaagaacaaaaagtcgcagatgataatgttgccaaaattccaaaagtcagcaaaagtcgtcgcaacaaaagaatcgatcgaagtggcaagcaaaaaacgggaaaaattcggcacagaaaggaggaaaattggagaaaaaatatgtgtatgaggaacgtaaatttggggaaaaagggagtgaaaagagtaggaaagatgtagaatgccaaacagaaaagtcgattttagaggttcaaaaaaatggaaaagtctgccgaaatcttagaggacggagttctcaattggggacaattgaatttttggagggcgggaaggaattggacccgaaaaagtcgaccactggtaaaaagaatggcaaagcgaacccgatcttcagaaattttggtggatcgtaca

SEQ ID NO: 6000 - DNA, 2174 bp, Heterodera glycines
ccaccagaatcggggatttgccatttcatttggcggaggggaaggaagcggggaaggcttggaaggagcattgggcatcgatgggggacaaatggcactggtggagcagcaaaacgaagcattggccgagagggtggccgaaaaaatggcggtaattcggacgatggacggcattttgtgaccgcattttagaagtttttgagcagccaaatggaaccgaagttcgcctcaattctgtcggaattgcattctctgaacaaatccgtggaggaactgaaacggacggtggcgacggtgcacactccgccacaacggcgcggactcatttcagtcccggggatggtgggctcaaccggaagcagtggcagcagcacaaccaagcagacaatgctgaacggttgccaaaactacgcaaaggcgccagtttccaccggtggcagcgcaacgccaacaaaaattgcgttccgtccctacccaatgaacaacggctcacttcggtatcagcagcacaacaacgccaaggcgccggcagaaaataccgtcaatttggaaattggcagacaaacggcacaacagcagcagcaacatcaggtggggaagagcaaagacggacactggccaaattgtggccaattttgctgcttttacccgatgctttttctttagcgcgttcggctaattaacacgcgcaatgactttgccgggggcactgatcactttccgcctgcttcatcttctgctgctgacaatgtgatgaaattcccgcctctcaaaaacgacttcaaattgatgcctttgacttcttcttcttcttcgacaaattgcggcgaaaatgccctcctcaaaatgccattctcgtcctcctcaattccgtgggccaccacgaagccatcgacgcatgtgttggagccgccaaaattgaccaaaatgggcacggttgggctgaaaaacgggcggaggagcgttcggaagtcggtgcacgcgtacagacagcggaggaaggaattgtcatatcggcacatgaaagagatcggactgaccgtaagcgaagctgagggaacgaagcaccgaaacaaaaaacaatctcaccaaacagttggtcatcaacggagtgccaaagtccattttccattgccgcgtcactgacataacaaacgccgtgcagacgaagcgaagggaattggcccagcagggccaaagagtggtcagtgccatcaaaagcatccatcactttgccatgtcattttgcttttgcagttctaccggggccgggacgtgaccgacgcgctgtaccgcgtggagtgttcccgcgtgatggtcaacggccgtcgctgtggccaaatgatcgcggactctctgtggccgcggggcttcttccgccaacgcatgcttatgccaatccttcgcggggttagccatcgcacgaaaaggcgcaccgacggaacgatgagagaggcggtggccaacgaccaattcgaagtgttcaaaggtcgaaaatgccgagggaaaagaaatgagtggaaaatattattccgtttgagaggctttgcttcggttgggcggctttttgatggacgagccggacagatacaaatggatggaaacggcacgggagggggtgaaccaacgggggctggacgaattggcaaactcaaagagggcgcacttcgaatttgagggcggtccgctattcggggacgaaattgtgggcggggaggagcagcaacagattggcattgacaacgaaacggcacaggtgggtgaggagagagtgttagagagatggaaaaagagagagagagaaggaggaacgagagagagagaaacgagtggaaatagagagagagcaaaacgagtggaatgagtgagagaaaggggacggggtgaatgaaagagagcgagagaatgagagggagagagagagagagagaatcagattttttattgcagcttctcacgtccaaactgttcgcttcttcgtattcggaattaccggcaaatttattattggctgaaaatggccaatatgatgaggacgacgaagagatggaagaggaaaacggagaaaatggggagagagcggagggggaggacggacaaagcccagtggaagaagatgaagaggcggaggagctgaatttgtaagcgagcggaagaaaggcactcactaatga

SEQ ID NO: 6001 - DNA, 3063 bp, Heterodera glycines
ttttggttcactcctcaaaagttccgctacaaagtctcacatctcactgaagtccttggcgtttccgattgtggccgcaaaacattggggggaggggtcggaatgaatggggaggggtgcccttgttttttacctcctttttttggcaacatcgtcgggaatccgttcttgctgaatgccaaactgtcctaattttcatttatttgccaaattcaagacacaaatcaaaggtcaaacgaacgtaatggaggatggatttgtagtcgtacggctgaccgtaataactcgttttggtcaagtcaattttgccgaattggtcaagggcacctcaacaaaatgaccagagtaaataaaagtgattttcccaatttaatttttaataatttaataaaattattgcttctaaaaattcgcataaattttaatgttgacacttcgaaactccgacattttggaaacgcaacattaagtataaattacttttgtcgatgttttgccatattatgtcaatgtaaaagtcgcggtcccatcgctctgaataattaataattatgataattaaacactatcatttcatattagccaactaattaatgaatatgactatcatttaattattagctgattaattaatgaaaattaacaaaaatggaccgtgttcgtggtaaaagccaacgacatgcattatctattggaaagggataacaaactcaaaagtcattttcccattgaatggttttattacctcgtgaattattgtagagtaatccatgcaactgaaatggttggaattaattactctttttggtttaattgcccatttaattgccgattaattacccattgtccagcgaaaggacttggactccgctggtgcgaccgacttcggagaagcagccgtcaactttgccgatgaagagataatcactgtttaaaacggatggcatttttgtaaacgaaaaagcaaatgggcaattaagccttatctgaagcggaacgaggcaaaaagcgaacgcaggtacggtcgtggtactgtaataggggcaaaaagaatttcccattcgtccacacctcctcctaaggcttcttcaattcagcccattcccctatttggccattcctcccacatttgcccatttatttccccatcccccttcggcttcttcccatttgcccattaagctatccatcacccttaggcttgtccttatttggccatttctcccccatttgcccattaagctactccttcccctttaggcttcttccctttgcccattttcctgcctgtttgactgccttggccagcagtgccctctcgtgtgggctgtaatgtgtgctgatcacataagggatgcgtgcgtttggccacagtttggccgctctgctcactccgttccgtttgtctctttgtccgcttttgctccgtcgcgtcgaccgaatgtccgactggtaaatccatctctgaagtgcgtgcgtttcagctgctcatttgtccatttcgctttaccttttccgcttggctcagttctctgttcagttcctctaggcaaattcttttgtattttttttaaattttttccgcaaaaaacttttacctcttgacagtttttctgcatttgtaaagtccatttcgtttaaactgctgatggaaagactgttgaaattggcacttcccaacggaaaaatgactaaaaacattccttacggtcatacagtatgaaagaaatatgagttttcttaagcattgccccacatttgtcccagtcaaacaaaatgccaatcccaaaaatgccatttcgttttgtcgcacttgcctaaaagaaatgggagcatccatctgctgttgtgtgctgtgttcgccttttttgatgatggcactgattttggcattcttttcccattttggcacatttcattcacccgatttgacaccgtttcgtcccaaagttaggaaagtgacgctgttcttgataatttatgcgaaatttcaagggttcgcgtgtcactttctgcgttgtttggttcgggtgggttggcgtttcgtcgctttgacgggaaaggggcgggggagtacggccacgcttcggcttcttctcctcccaccgttccttgggctttttcccttctgctgctgtttcgctttcactttcgtccacgcgttgcagcagtcgcttttcctcctcttcctcctcctttgcccattagcagcaattagttaatgaggggggggggggtggtgttaatgatgcttcttccccttcttctgctgcttcttcctctgattgatgttgttctgcttcttctgcttttgctcttctgtttttgtcctttgctgttccgttgtctccccttttgtgcttattattaattattattaatgttttgccttttctccttcgtcttcccctgcttcttctcccattagcattgtccgatggattggaaaggtgcgattgctgcgcacgtcttcttcctccgctgcttttcctactggttcctgttactttggctgaatcgtcggcaaatttgtggagaagaagctttcattgcttcgagcgatcgacaataaaaaaaattgggcatggacagaatggggagggggagaaggggtactcgaaaagaggaataaagtgatctaatagggaagaggaagttgagagagggagggaggaagagagagaaaagggaaaagcttgggggtagggaatgggaaaagcttggggtagggaggaggagggggcaaagccggggggagggaatgggaaaagcctggggcagggagtaatggggggggaagccggggggaacccggaggaggggaccaggatgggtccgctagcactgcaagtgaatgcaattaaatgccgagtgtttctgttttaagcaaaaacactgacctttcgcttactcaatattattattcttattatgctcttattcaaatgcttttgctcaattgccttttgctgctttgcgctttcgcagtgccaatgcgcccaatgggagaaaaagtcaattttgggggagaaagaacattttttgagggaggggggggggggg

SEQ ID NO: 6002 - DNA, 2406 bp, Heterodera glycines
atcagcagccacaagcgggttgaccgtcttccttccgtggtcatcatcttccctctccctccctctttctcccttccctcgtcttcttttggtcatccccccccccctcttctgttgaccattccccccaaatgattaatccatggttagtcaccccccccacccccaccaatgcttttgctttcctttctccacgacacatccatcaatcagttattagtggtcgtcgttctgctgctgatgctgctgaacacccctccccctctcttcccctcccttttctctttctctcctccctttggcttttttccaccacccattccgattcactttcaaaagttccctcttgaaaaccgcaaaaaacccataatgaaccaattatttaatggcttgatgaaagtttttttctgacgcttttattcttgaagaagtggcattacgccagaaattagagaaaaaataagaagagaagcggaagggatgaggtaaaataaaatatttaaaacaaagttaaatttacgctttgccataaaaaattatgcaatttaaaggaaagagaatctccaaaaagagaaaaaaactatgcagaaattgagacgtaatgaaatgaacgaagaaatttttaaagaataaaattggaaaaggaaacatttgagaggattattttttaaatcaccggggaacgatcgatcgatttgattgattttttccgtcgatcgatcggttcgagttccgccattcttgcgctttatctgatcgggaccagaggttggagtggcacttctcgcacgaccattgggtccattgtcagagaagcggccacattagtccaattgcatttttcgatgcccaccaggggcagattgaacgtggcgatgttctcacggccttccgcactgatcaacaccaacttgtagactccggtcagcgatttgtccaaattctgaaatccgtggccaatccgtcgctcacttcgtccctcccactgactttgatctcgcagatgaacttgtccctgttcgtgtcctgctgttcctggctgaactcaaaccgtccgtccgttttgctcagttcgctctctccgaatagccatttggcctttgtcggctccgaaaagctggccacacactccaagtacaccttgccaaggcttgtgtccggctgtgttgggcttcggctcatattcggcggcttcagcggaccgtggcgaatttgggcgttatgaatggtcggcggaaaatgcattacggataattaattagttaattaattaataactaaatttagttaatttacaaaaattattatgaaatttcaaatgaaaaaggaaagaatatttcaaatgaagtttgttgtgaaaacataagcaagcaataaggaacaatcagctggcttatcgataattatctgcccattttttagcgaaaatattttgaagcattgcgaagggatcggaagagacggaggaaaggggggggggatgatgaaagaacgggacggaccaaccgaccgacctctttcgcaattgccccgtggaatgatcacccaattccgatcactcgcttttccatcggcacgccccacttttatacggtcgaagacgtatgatcaaaggaatgaaggaatggcgaattattggccatttaacaaaaacgcgtgggccaattcgccactttggccgaacagcggcagctgttcacttggccaacggaacgaatgtcaagcgaaaggcgagcgtcagaagggcctccggcggcggatcattgctccgtcggcccattgatcactccccccccccccctccgatcgcttcctatttcattttcctttttccgtgcctttctctttttgggattgccatttattttggtaatatttaccaattggcatcgatggcaaagagaggcaaatggcaaatgaaatttgaacaaactttgaaaaggaaaatgagaaaaatgaaacgaacggcaaaaagaaattccaacggaacaaatgtcaagtcaattaaaatagtttattatcaattcaaagggaatgaatggaattaatcaccgacaaagcaaaaaaaaaagaaaagaaagacaacggaatgtttgtttaattaattaagcgaatgtttggcaatttcaacagcaaaaagttaaatggatgtgcttaataatgtccaaattggcacttccatttgctcttttctcactttcttttcgtcactttgcatttgtaatccgccaatttgacagcgaatgtttgtcgcttttcaaatttcggcggatttaaaggatcacaaggataaaccttaaaaggaaaagtggtctttccattcaaattcaatgagtggcacatggaatttgtggaagaaattcgccgtgaaaaggaccaattccattctgccgagggtttcgccag

SEQ ID NO: 6003 - DNA, 4144 bp, Heterodera glycines
  unsure (1)..(4144): unsure at all n locations
tgccttcgagactgaaccgtcgagtgggtaaaacgttccaccacggcaaaatctattatggttcctctcatttggagttcctccaacggaagacnaaaaanagcnaacgaanncggcannnacagaccgagagacgncaaaggananancanncacagaacngaacgaggcacaccnncancagaagggcagancggacgcnncgaaaanaaannnacaaacaanaannangacnncncncnngcncnancacccnccgnnanncgngcgcacaancagcggcncccgncccancccaacaccgaggnanncgacgggnacgcccagnngananngnaagaacnccaaagaggcacggcannngnccggcaacggnncccacggacgggcaccggncgnaggcgacagcaccgacaccaccaccgncaccagcaaccgcaccacccaccacacccgcccgacnccnccacgcagcaccgacaccacccaccaacaacgacaacacccnccaacaacgacaggnccagcctccttcggcagncctcgaagatgnccgtgcataccancttacaatactcgcnctggctgtggcggtggcggtccagccctccttcggctttttcgaccctgcggtggacagggggggagggaattacgatgaacaaaatggaaaattactcatttctcccttctctcccacttttcctccttcctttcactctcctcagttcgccgcctcctcctgcgtctcctcctccatcttctccgtcgtcgtctccaccgcctccttcggtcgcctcaaaaatacccatcatgccactcacaatgctcgcctggctgtggcgatggcggtcgagcctccttcggctttttcgaccctggggtggacagggggaggagggaattacgatgaacataaatggaaaattactcatttctcccttctctcccctctcccatttttcaatcagttccctgcggcgtcatttaccccccccccccccccccctccctcacttctccccatttcgcctctcctcactgaccgattgttttattttcacacaaagttcgttgagcaatgttcggtcaatgcgaatcgcaaattcttgcaccaacgcctccagcagtttgatttggacaatgttcgtatgttccgattgactcatcacaaatgcacactccaggaatggctttggctctaaaaaaagaacaaatgcaacatttgtgcccccaatttccatagagttaaatattatttaaatgggaaattaaaaagaaaatgactctgttcacaatttaaaaattggacacggaaagaaatggacattttagttctaaataaaaaagcaaccatttttgaccactgatttcggctgtggtaccataaggattatttgaaaaataaaaagccatttaaaggacagaaacagcaccattcagcgagtcggtccacgcaaatggtgccatttggttagccttgacaatttgccactgtccgtggcccgtctgtcggtagcgaattgggtatttggtgtcgttcatcagaatcgccggcaccattccgggcacaaaattctccatgtgaatgacggacgattcgtcggacagagagacgataacgtaaaggccgatcaactaaaatatggaaaaaattaaaatttcggaacgacggaagcattacgttgttccggatttgacaaaagccttcgtatgcctctgtgaattgcaccgattcctcctccgtgttggcataacgtgccaccaacgttttgcgtttctctttctgcatggtcaccactttagtgaggccggactgacccaattggacatcgacagtcatctgaacggagaaaggcattaaaacaaacaaatgttttcagattgtgcctcaaattcaaactcgcgctgtccttcggcgatgcctttgcaaataactcgcccactgctgccagccatgtccaaagggaattcggcagaccaatcggactcgtccacgattttcaccttcgcctttttcttagactcaaatttacttttgttcaaaagcaaaatcatctaaaatataattgttggttctagtcggttttacgcgtcccatcacattttacgcgtcccaacaacagtttacgcgtcccatgacatttttttgtgtccatggcggggatggcattccggccacaaattttcggaattccgtgcggcaatctttcggaattgtggtcccgaaaattttttaatttgtatggcactttttctaggcttaaaaatacgctaatcacgaatatgaactcggatttgcccaattccgaaccccggacccgaattcgaacaaaaacttgaattattttttcaaaagtatacgttaaaatcgatcaaattttggcgtaaaccgcgcatttttatccaattaacaatttgaagcattattttaatcaaaaaataatagttgttgcatgaattagagttttttatcccaaaaaaatgcattcttgaaatttttttttcaatttttgttcgaactcgggtcaggagttcggatttgggccaatccaagttcagattcgtaatcagcacccttgaaaacccttaaactatgaattttaaataaaaaaaattttttcgggaccacaattccgaaagattgccttccgtgccatccctaactaagaggaaacctatttttttgtcgtgtatttagtaaattttcaactaaaaatttcgttactaaaccaaagtatcatgtcaactcatacacaggcaactcgatcaatggcttagactaggcgtaggcttttgaaaatttcttttgtgtttactgactgttgacatcaataagtttgcttagggttgcttttgcacatttcgataatcaaagtatacaatcaagaacaattatacgattcggaaggtataaagttttgattgacggttcgaaaaaagggtaatccttcggaattggtgtcccgactggaaaaagagataaaaatttttgtgcgcgtaaatgatgggacgcgtaaactgtcgttgggacgcgtaaaatgtgatgggacgcgtaaactgtcgttgggacgcgtaaaatgtgataggacgcgtaaactgtcgttgggacgcgtaaaatgtgatgggacgcgtaaaatgccatgggactcgtaaagtcaagggacgcgtaaaaccgactagaacctaattgtttgcaaaaaaacacttaaaaacaaagaccacaagcaaaagaaaggtgcacgtatttaggaggggaaatgagaagaaaagaataaaatatgtacatttataggcagttaaaaatgtttgtgaaatctatcccgtaaactaaacaagtacccacaccgtttcaaaaacgagatgtgtaccaataaatagagagtgccagagaaaaatgcatctctcattttggcgtactatttctttgtctctgttagtagagaaaaactgaatttacttcatcctgtttaactttttttctgcttgttaaatccgcttcaaattttgcatatcgatagagaaaaatattctgcatctaatgataggtcaagttaatattaaaataggtcaaactcaaaagttataagaaaaacaaaattttaaagcctcataacttttctctggtacaccaaatcgcttagcatttgcttagaaaaagcttctcctcatcaagagctttcgaatgataccatgattgtccaagttggttggcccaaaaataattcccaaaattcgtcattttttaatattttggacaaaaataaataaaaatattcatgttgcacaacggactcgaaccgcgaaggcccaccacgaggccgcgaagaggccgagtgagtaccttcggtgcaggaaaattattaaattttaaaaattttttaattgctttttaaatatgccaaaaaatgtaggcttaacttttttagtgaaaattcgatcactcatattttttgctaattgagcagaagcgtaccaaactttgcagggatactccccggtaaaggactaacttacactgaaatgagcgccgagctagctggctcaaaaaaattttcgaaaatctgagtctttcgtttttatttattttttgcataaattaattcttaaatattttttcagaaagggttctgaaacgcaccag

SEQ ID NO: 6004 - DNA, 2855 bp, Heterodera glycines
  unsure (1)..(2855): unsure at all n locations
gatcaaattaacataatttttgggccaagtacatacatcggcgtcaagcagttcagtcggaaatgacccggagcggacacgcgtttggtaggctttgaccacgccgatgacgcgacggacggctgtcggcggaatgccaaggccggtgatgcacncgccgacggtggaattggacgaagtgacgaacggatagggaccaatgctgccgggttgaatggtgccacgttttctgcaaattgatcggtgttcaataatttcgttttttggtttacgagttttgatccgttatggcatcgcgcgacaatgtcaatctgagaaagtgagagggtttaacaaacaaaacaacaaagcaaatgcattaaaagaaagcccaatgaacaaatactttccccagggatattttcttttattttgtaattatttccatcggcggaatgccggaatccttcggaattggtgtcccgacagaaaaaaattcaaattttctttacactttctcatgaaacctcgtatgcctctgtgaattgcaccgattcctcctccgtgttggcataacgtgccatgtcgttggaaaacaaagaccacaagcaaaagaaaaggtgcacgtatttaggaggggaaatgagaagaaaagaataaaatatgtacatttataggcagttaaaaatgtttgtgaaatctatcccgtaaactaaacaagtacccacaccgtttcaaaaaacgagatgtgtaccaataaatagagagtgccagagaaaaatgcatctctcattttggcgtactatttttttgtctctgttattagagaaaaactgaatttacttcatcctgtttaactttttttctgcttgttaaatccgcttcaaattttgcatatcgatagagaaaaatattctgcatctaatgataggtcaagttaatattaaaataggtcaaactcaaaagttataagaaaaacaaaattttaaagcctcataacttttctctggtacaccaaatcgcttagcatttgcttagaaaaagcttctcctcatcaagagctttcgaatgataccatgattgtccaagttggttggcccaaaaataattcccaaaattcgtcattttttaatattttggacaaaaataaataaaaatattcatgttgcacaacggactcgaaccaccaccctttgtccctttactatcttacaaaaaccacttcgccacacatgcaaatctttttggaactgggaggcaaaaactgaaacggtgtgtacccaaggcccggaaagatttaatttgaactgttcctttctacctatatattgacaaaattctttctttggcgatatatgcacacggcgagtcaattttgggctccaagcgcaaataagttggacttttcgtcggagtggtctgtgagttagtcaccaaaaggggggtcccaggttcaagtcctccctatgttgtgtgttaatttcaatttcttcttttaaagaagaaggcagaaatattttttattaaaaaagttttcgtgtcaaaaaaaattattttcataagagttagttacgtacagcatcgataatttttatgaaattttttagcctataactttgtcaatactagatcaaataaaaccaatttatgctcattttgaagggaaaattctagagaatattgttagttttatttgatttggccttaaattgagcacttggctaaaaaagaattaaagtattgaaatgtttgccatggaaaaaattttttcctgtgggtaactttttttgaaattttgtataggcccatattttgtccccctctactatcgaatcacagtttattttttagctgtctagtttttaactcgagatcggctcttctatttttacaagggaaaatcccaaaaaaattttaagttttgcaaagttttggcgttctgattactaaataaataataaacctatttgcactgagagcccaaaattgggccgctgtgtatattacaaaaagagcactatttagagaagggtcgaaaaagtcaaagtggggttcgaaaaccaaacgagggatccttttcaaggaacaaaaatgggtaggctaaatgccttcgagactgaaccgtcgagtgggtaaaacatataatgttcaacaaaatctaaaacggttcccctcatttggagtttacccatcttttgtctaaaaaattctttcgaattcggcatttacagaccgagagacgtcaaatgatatatcatttatagaattgaatgaggcacacttttattagaatggcagattggatgcttcgaaaataaatttacaaacaataattatgacttctctctttctctatcaccctccgttattcgtgcgcacaatcagctgctcccgtcccttcccaactccgatgtattcgacgggtacgcccagttgattttgtatgaactccaaataggcacggcatttgtccggcaactgttcccactgacgggcactggtcgttggcgactgctccgtctcctcctccgtctcctgctccgtctcctcctccttctcctgctccgtctcctcctcctgctccgtctcctcctccttcttcgtcatctcctccttcttcgtcatgtccgcctccttcggcagcctcgaagatgccgtgcataccacttacaatactcgcctggctgtggcggtggcggtccagcctccttcggctttttcgaccctgcggtggacagggggggagggaattacgatgaacaaaatggaaaattactcatttctcccttctctcccacttttccctcttcctttcactctcctcagttcgccgcctcctcctccatcttctccgtcgtcgtctccaccgcctcctt

SEQ ID NO: 6005 - DNA, 5355 bp, Heterodera glycines
  unsure (1)..(5355): unsure at all n locations
acgaatgccaaccgttgtcctcacgatatttttaccattttgtgttcctttcttgtggattcattcaaccgcctcacaattgtatgctttttgcggaagtcgacagtgattgttttggcacaaaggggaaaaccgcacaaacggcccagaaaacgttcctcgaccacttcacaccaggaagttggatccaaaacggacagcttgaaaaagaaagagagcaattactgcagacaatcacacagctataagttcgtttacgcaaacgacagtttttaaagattaaacattaacatttaattttacccccccccccccccctataaatgctttccgtttccctcacatgtcgttgcagttccgattcgttcacagtgtcggtcaaagcacaaattgcttcatatgcatagcgttttcgcaatttgtcctgctgaagtcgttccctttccgcttctattctttccgaaatcatttcatcattaatcggcaaagtcttcttcatcataacttattcgctaaagaaaaattgagtcggcaaaaattaaattaaaaatcgttttcaaacttccaagtcattgctcacgaaaatataagaatcatacatattaaacataataaaaattgatgaagattgggctttttattaatcggggtgttaatggagagatgaataatcggtttcagttaattacccccctccccccccccctccatcctttttagggatggtcaaaaataatgtcagattcatgatcactgatcagagcgatcccccacgggaacaatttagatccagatcaaggtcgagctctaaattttactacaaaatatctaccttttgatgaaaatggttgattctgacaaaaatatccgtaaacatttaaaattttttgcaattttgattttgattaaaaagctctaaaattttttgcaattttgattttgattaaaaagctcgctcactttttttttttaaatgtgcttaaaataataccctttttaattctgtacaataaaaagactgaaatgcttgcgcggggagatgcaaaaggaaagagacatttttcaaggggattaaaaaggttataataaatacataataattgcgagtaataaatttttcagagtgggcgatgcttcatctgaaaaggaatgccaagggttcgttggaaattcttcccgaaaaacacccaacatttcccgttggtcgctcattttgtgcctttcgcgttactgtgagctttattggcggtggttggcattggcattcctttttcttttaactgagtccatcggtctgtgtttctttttgattttctttccaaaatgcccatttagctcaagtttgtatgcctttgtttattgcgcgagttatctctgttatggttcgggcaagtcaaatgagcgagttggtcaattccgttttgatattgactggtacgactgtggtcgctactgtggctgggggattacggtaatttttatacgcccttaacatggccggggctgattgtgaatggcgatgaagactttgtatttaacaaaatctcgcaatcaaaacgaattcaaacaaaacccgaatttaaatgtttgtcttcaggaatttcgtcagtgattgtgaatcttaaattcagagttggcactttccattttgtgaccgctaaactcaatcgccagatgcgtcatgatctgttccattcgatcactgctcagggaatcgatttctttgacaattctccgactggtcattagttccacgaaaggctgagtttgctaaactttgcctatttaggcgaaattctgtctcgacttatttcggactgcgaagttcctttcccttctcttttcggccctctaattttggctaatttagagcgtttcttcgactctttcgtcctccgtcgatgtctttttcagcaatggtttgatggtcctcggctccttggtgctcatggtggagagtagttggcagctttctctgatcactcttttactcattcccatacttgccgtgttcatcaaagtgtacagcgtttattacgatgtgagggaagaaaagcgacgccaattcagtgcaattacttttagaatatcgccgaacgttcccaaatgtccaaagcgaatgccaatcgaatcgcggaggaaacgatcagcagcatgcgaagtgtccgcgcgttcgcagccgagcggcgggagcggcaaagatttgaagccgaattggacgccactcttcgggtggacagagtgcgcttttgaaccatttattgtactatatatatgtaaatgctgaatgaccaactgtcctttcgtccttatttattactttatttttcaattttagaccaaatccttcgctttggtcggttcccattggttgaacgaattcgccaacaatctcattttggttgggttgattagttgcgtttcctttgcattttcccaattttcggtggctgtgcttttatttggcggttatttggtgctgaagaagaaaatgacaaacgaacaaatatttgcttttcttctctatcagctgaaacttggcgggaacttttaccaattgagcaggtcatttagagagagaatacgaatattcttttccttaggctttgtgaacttatcgcctaaaaatggccattttgtgatattttttgggtataaattatacagattctcaaaaaacaaaacaaaattttccattaaaaaagtttttctttttcgtttagtgttgcaaatcggctgatggaaagtatcggtgcttcccgtaaagtctttgattatttgtcgcggcaaccaatgaattcttttgaaattggcaaagtgcggcccacacccgtgacgggcactttggaatttcgttgtgtgactttcgtttatccgacacggccgaacattttcgttttgaaggtgcctcctaatgaatgtgtccatgttttgaacaacgaacttttcagaatgtttcgtttattgttcgccccggtgaaatggtcgctttggtgggcccaagcggtgcggggaaatcgacggttttttctctattggaacgtttttacgagccaacgcaaggccaaattttgctcgatggcattccaataacgcgatgggaacatatttattaccaccataaggtccttttcaaggagggtttaattttgcctttcaattttaggtttcactggtgccgcaagaaccgattttgtacagctgttcaatccgcgacaacattctttacggtttcgacaatccttcggcggaagatgaagatggcggtgatgcggcggttaatgccgcgaaaatggccaacattcaagaatatgtggcgcatgagacggagaagggcttcgccacgaaatgcggcgagaagggcatccagctaagcggtgatattggcattctgaatcaaatcctataattgtttcgtttttttggcgaaggggttggggtgcattcagtttgtattcacaatttttcgatttttaaagatgtatttttttaattcgccaaaaattcgatccttaggagtgtttttttattttgcatttttgtgaaaatttccaaaaaatgccgaaatttgctataaaatgtcaaaatatgcatttatatgcagtaaaagccttcaccaaatcaaaaaaattaacgtaaaaccaatttcaggattatggaaaaactcgggattagccaaaaatttaaaggaaatatttatttctgtttccctttaaggcggtcaaaagcagcgaattgccatcgctcgcgcattggtgagacaaccgaaagtccttttgctggacgaggcgacttccgcgttggatgcgcgcaacgaacagctgataagggagtcgttgtccgcttgtgcgaagggtcgcaccgttctgatgatcgctcatcgcctttccaccgtaagacgtgccgaccgtattttggtgatggaacatggccaaattgtgcaggtccgaaataggaaacggttgttgtgagaattagcgcacttccaaataggacggaaatcatgcggaactgatgaaactgaaggacggcctttattactcaatggtgcaaaaacaaatgggagaaatgttggagaaccaatgaattgcctctgccatttagctgatctcatttcctcttttgtaatctgtgataactcatgcttctgctgctccaggataaatgtgttgtttttgtacatgtttgtccggtttgtccacgccttttaaatgcaaatcatttcactgggcacggggaatgggcagtggggggagaagaagcggatagttgcggaagggcgggggaaggcgagcacatcactcccccccccccacttccctccctccgtcgcactctaaccgatcaaattgaatccttcctcttcttctctcccttcccttccttagccttcgcttttctcattttcccctccctccaaatccttcttatcccccacttatccctgctttcaatttcctgttcatctgttgctgctgctgcatttcggagaagggacgggtggggaggggcattggcgctaataaaaaagcggaaccattcgcctcatattgacaaaaattagtaaaatgaacgcaaaaaagtgccaaagcaatgctttgtgctgaccctccaatctttcgtcatccgttcctttacaaattaattgttcttttcctaattgccctattaataattaattgttattttcttaattgtccaattataattaactgttgttttcctaattgccccctcctccgtccctttttgcatcgatggcttcatttatgccgaatgctgtttccggccattacccgggctggcgcggccgatttccctcctctcataagcggcgttctgagcccgagtggtctgtgaaggagctgatcagaatgaacccattgcatctgtcagtgtctttcaatcggtcaacaaaaaacgaatgcttttccttttgcagctttttcctaggctttgtccctccctttttgggggcgattgggtcaattgtgacggcactgcttctgcacaatgatgaaataaggcaaatttgaaattcattcaaaattcgtcctataattttaatttcagtaattacaattggcagtgcggggtaaacgttgagcaattaacttttaagctaattttaaaactgcagagagctcggctcccttcgctttcgcgaataataaaccttccgatggaaagtgagtggaatttgcaaaataaatgaccaattaaagtcgacgattaaccaagggattttctggcaaatcactttccttttagacattccgctgagagcagtcgaaattgcagtggcctgtaagtgtctctcccagtcgaagactnntatttgatggtccccttggt

SEQ ID NO: 6006 - DNA, 2890 bp, Heterodera glycines
ttcctttacaattaattgttcttttcctaattgccctaataattaattgttattttcttaattgtccaattataattaactgttgttttcctaattgccccctcctccgtccctttttgccatcgatggcttcgtttatgccgaatgctgtttccggccattacccgggctggcgcggccgatttccctcctctcataagcggcgttctgagcccgagtggtctgtgaaggagctgatcagaatgaacccattgcatctgtcagtgtctttcaatcggtcaacaaaaaacgaatgcttttccttttgcagctttttcctaggctttgtccctccctttttgggggcgattgggtcaattgtgacggcactgcttctgcacaatgatgaaataaggcaaatttaaaattcattcaaaattcgtcctataattttaatttcagtaattacaattggcagtgcggggtaaacgttgagcaattaacttttaagctaattttaaaactgcagagagctcggctcccttcgctttcgcgaataataaaccttccgatggaaagtgagtggaatttgcaaaataaatgaccaattaaagtcgacgattaaccaagggattttctggcaaatcactttccttttccacattccgctgagagcagtcgaaattgcagtgggatgtgagtttctctccagtcgaagacttatttgatggtcccttggtcatttcctttcagttttccgttatggccgtttacggagtgtccactgcaattggccgcgtctctattcgctgtgccgacacttttacctttggctcggctctttggaattgatttttctggtcgtaaatttcgtagtgattaggctatccgaggatggcacatgaccgggctgggctcaaaaaaacagctttttgggatttggtctggtttttccaaggttttcctggtccaaacatttgggttcgggggtaaacaatggaccaaacaatcactggcaagaatgtaaattgtaaggatagaataaaacacttcaaaaaatatactacatttggtacaagggtttaacgaacttttctttttcgattttaattttattatcaaattaaattaattgttttttgagttgtcctaatcttagccattttaaaatactttctctgttttccaacattaccccaaatgtggacactttgtcacattaccccaaatgtggacactttgtcacattaccccaaatgtggacactttgtcacattaccccaaatgtggacactttgtcacattaccccaaatgtggacactttgtcacattaccccaaatgtggacactttgtcacattaccccaaatgtggacgctttgtcacattaccccaaatgtggacactttgtcacattaccccaaatgtggacactttgtcccattcgttgctttttgttaattaccccccccccattttcaaaggtcgctctgtcggtggtcggggagcgtgagttcatctgttggtttggctttttgatctcctttagccgccatctttccttaagcttaccatgtgatcttcttttacgccttcggtgccttcgccattggcttctttctgaccaatgtcatctgtcactcgcagtccctttattatttgaacccttatgtattgccaattttctttgttgtccatttttttacatttaattacgcagggtcgaatttcgtaccatttcaaaattgtggtgaccattctgtaagaaagtgggcattcgtcgttagcttaactcagtatttttaaagttacgtcatctccgtgcccgttctgttcggcgcttttgtgctttattggcgaaaatgcatcaccatcagtcagtttttcatttcatttctttctcattttcgcccttcataaaacaatgcttttcaaatgcttttcagtgtacgatgttttcgcagtcgccgaatatatcgacgtgtttttgaccatcgcttatcattgctgtgccttctttgacattcgctacaaagtgattttcagtgtcagggaagtccgagaaaggaaaatgcaatgagagaaggaaaagaaaaggaccgaagaacggacgaacgaaagtgacggcaaaagaaagacaaagtgacaaacggacggacaaaatgtcaaaaaatgctcaagaatttaaatgttcagcaaagaaaccatttgaaaataaattttgaacaaattgggcatttattaggctgtttttcataaataggaagggatggtccggtggtgccaatgtttttggagtttagtcttaaaagaattactgcttaaaaatcattttgcttttttgaaaaataattatttattctggagttaaatctggagactgaacttaatcttttacatattttctcaacttttcacatttatttttatcttttttattaaatttaaataatattgtagttagtgaatgttaatttaaatgatttagtatgccgtattatattttttctctcgggtaactaaagcatggaagtgaaacacgataataatttttcgtgctatgaaattcttgaactgacttttatatttaatttagcgaatttttttcgccaattttcacagtttaattataagtcagaaattctataaaaaagaccgaaaaaagttatgtcaaataagacttctctccaattgagacagatcgctttgcatcagcttaccttcactaattcaattcggaataatgaatttattaaaattgcttattatttttttctttatttagacagatctatcgagaaatagaggccccgtaaagtctctctacgacccaaaaaaccctgttttttgccaaaaattctttgaactgcaacgccaattcccaccactgctccagtcgaagtatttccac

SEQ ID NO: 6007 - DNA, 1500 bp, Heterodera glycines
  unsure (1)..(1500): unsure at all n locations
tcattttgcttttttgaaaaatattattannttctggagttaaatctggagactgactttaatcttttacatatttctcactttttcacatttatttttatcttttttattagttntaatttatgtgtatntagtaaattntaataaaaattattaattcaatttattttntattttctacactgcgttttttttaatggtcataaaattttttatcttcagtgctatatgcctttaatattttcataaatgctgttttatgtaaagttaattatagcctgctgatcgtttttcatgaaaattttaaattcacaaaaaaatgtggttttttttaaaatttactgcgacgcacttttttattccttttttatgaaatttcatcaatccccgctttccgcgtcttaaaaacccaatcagcttcttactgtataacatttttagatacagtaattttaaaatgtattatttgactaaagtccgtcaacagtggtggaagtttaaaagaggcggtttatttgaaatgttttttgtcgaagaaaagcgcgaaaaacttcgcattcagaagaaaaggacaaaattagcggacatcttcttgcacaggcacagaagatcaacttatgttgcttctcttctaacaaatattccttttcagcagttccgatgattattatgcgcttcgtttgctgtacaatttgcccgtcggattcggaattgcgcttctcatttacgacttggcttggtatcgcatcaacttcgccgattccattctgatcaacccgttctggaaggactttgtcaaatggctgatgatcgtctcttccgccctgtcctatacgcttaatcctgttggtggtctccaacggatgcttccacgctgaatgatgttcgttttcagttggtccgtgcttctctcggctgtgccctgttcgccagtttgggcagcaccgggcaggggtcggttttggcattggtcggcacaatcagtgagcgattcaatttgcagattactctcagtttttgtggtcgaaaacctaaacaaaggtgagcacattctccccatccaacattgttttttgttaatacattcgttttttttcttcaaaggacccattgaaaatatcattcaaaatttcaacatttccacgatgataacagtctgtcatttgcaacttcaagctcggataaccaaaagtcgaatggaattgcaagcgggtccaatcgaagcactttttgagaaaaattttggtatttgtataattttatcgctgacaatattttttccatcaattaggaaaagttacaacgattggaaacaaagtcgtccatacgctgaagtctttgcttcagccctttgacgacgacgttgaggaggacagcgaagaagattcccatttggcagcgattattgacacggcccgaagtgattgcttttgattgtgaggattcacgggcgaggggtgttaaatggaaagttttgtggcaacgttactaaagaatttt

SEQ ID NO: 6008 - DNA, 2319 bp, Heterodera glycines
  unsure (1)..(2319): unsure at all n locations
aacacatggtgctctctctaaagcatgagaggcacatcgcgcccgtcacaaaataatacattttaaaaaacgttgacaaatttcacttctgtgtctcatggattaaagatggggtgaaaataaggaagggatgcgatacgaatggggaccggtaaattggacaccggaaaattggacaccagaaaaaaaattttgtttttttcggttgcgggattccgactcctgaaatgttgtgcaaagttttgaaaaattttgcggaagttattttcgaatttttatatccagtaaaaatttctttaagggcaccgaatacatattttccatatatttatacatttcagtccattttttatccaaatttcggcatttcatggaaatatttttttttggaaacaactcttaatttaaggaaagttttcgtccaatgtgtgattattcatctgatatccatcatttcaattccattttatcagtgtaagtttatgatatgcgtttcaagataatttttcgccaaatatttaagatgttttcttcaacacttcttatttgttcgttacttgtcttttttatttggcaattgtaattcgtctggcatggattaagggttaattaaggatttaatttcctaaaagattggcacatctcatttttgatagagaatttgcaaatttttgaaaaataaaaaaatttaaataataaatccaacaaaattttaaacataaaaatattcgattatggcctaattacaaaaaattaaatccaatttttcgaaattttttggccctgtagaactaaatttaaaattattcttgccgaaatcggttgggcttaaccatggaaatgcaacaataaataataatagttttttgcatgttttttatttcaattagaagtgaaattttcaattttttgctctaaatttatcatttttggtcaatattttcttaaattttttggcatgctttttcataaacatttatttaaatagttcagaattttttttttttgtaataattcctcctcatccttttcataaatgagaccagtaccagcaggagggttttaaaattttaagcacaaaagcgccgttggaataatgccgccactgatgcggcgacggcacaaaatcctttggacaaggaaagtgcgcgaatcactgtgctatgcattgctgtccaaatccatggcatatgttttgtgttacttggtaatctcaccattacgccatggtacacgatgttgacgatatgtacaaattacgacccaatcttgcaacaattgtattacccaatcaatgcgttcacatcgttgttttacatatcagacgaggcaatcaatttacaatttaattatttggaatcaaaaaaatttaaaaattaattaaatatcattagggtgcgatttttttgtttttaacggattttttttgcggttttattccgctgttagagaactgcttgaaaaacacaaataaataaatgaattaatgaaatgctgttagcatcatcggcattgaaaaaaggtttctttgcatgacatagaatttgttatttttggacaccaaatttgaatcgtctaattataaatttaattactttattgacactgagacaaattttcgaattagcccacactgacaatatattttttggttcaacctagcaccgttaaaacattaattaaaactaaattaattcgcccgtcaattgtccaaaattatttttgcagctctttttgttggccgtctgtatggacatgcgtgtgcaatttgcgcaaatgattcggaaaatgtttgtgccgtttcggaggcgtggaactcaaacaatgacagttcaaactgtacaggccaatttcaatagccgaatgcggcacaatgccaatgcgaattagtctcgacatacactctcgaatcattccaggacttgactgatttgctaacaaatgtcttggaaaattgttttatagcaatttaacatttcatcgagaaacaattacttatttcgagcatttaatattgttttttaaaaagagaacaatgaatgaaacaatgtaaaaatttgtatttaattggtcaatattattctacgcttttcaatattagctgacctaattaaaatttttcaagtttgtgttaatttgtggaaccataagctgtagttaatttctgacctttgtcggctacccatttattcgtcaaaaacatatttttanattttcttgaaaatgtttttgatttaatatttattcaccataaaatatatttacataaatttgaatgtttttttccaccttttattcatttttcaataaaatatcaat

SEQ ID NO: 6009 - DNA, 2540 bp, Heterodera glycines
ttctgcttctaggctaattggtttgcattcaaaacgtcatgctgaaatttgcacaatattaaaaaggaaattctttaaaaaaattaaaaaaaaatttaatataagactcactttgaaaaatttttcatatttctgaaacaaaacaaaaaacattcgacaagaggaaatatgcgagttatgcaaatcgaaaagtacacaatgaaaaatttttaaaattttctcaaaaataactaactctctatatgcttagagcaaattttcaattttatttaaatcgagacatgttcaaaaataaaattgcttttaaaaaggccagcaaccgcctctgttcatttgtgaatttttttgcgctttaaaaaaaatttgttttgtgccaaagaaaaaaaccgggtcctaggccttaatccagtttttttttaatattgccaaaaaatcaaaaccgaaacctcaagtgtagcgcactcacacgctgcttccgtgttataagggcaaccgcttgggcacccaaagttttgacatttgccgttgacgttgtcccattggcacaaattttgactggcagcgaatggtggtgatgtgaaaagcagcagaaggcacaaaaatattgggagaataattgggcaattcttcattttttaaaattttattgaaacgaagctttaagtttttttatgatttttgaataaaatttatatttaattgaagattttttcgtagcttttatatcgaaaaagttttgctattttttaaataaaatgaaaattaaggccaaagatttaatgtcaaacaatggaaaggtgttaagcactttttcgtgtgcaggaatttttttaattaaattttcgttcaagacattttttacgtttatattattgaataatatcggaaagcttttttcattttttatttttcatttcttcgatgaaaaattccgttttttaaattaaattcaaaaattattttttcaaaagcaaaaacaaattattacattaattatttttatatgtaatttggagaaaaacaaaattcgtcaattattttttaaatgtaaaagataagcttacacagtaatgtaatccaatttatgcaaaaataaaaaaataaaattgaatttgatcaataaatgcattcaaattaaaataaacactgataattaattgatttggtcgatctattattatttgcctttctctagtcgtagactcactatttaaaaggcaattggtagagaatttttgctctttctgactgtcctactgaaattttacagaaaaattttcacaaccctctagggattcttttcggaaatttcccagattttcaatgtgtttcgtggtgtcccggtcactataaaggagtgatctgatcaagttgctgtaaaagacttttttgatcagcatcaaaagttagcttagcagaataaaaaacgttcttgtacatcgttttttcgtaaaactggtaactttgcggtatttgaagttgttcaagattcaatggcacagctggtggcgcatctactagatgtcttgttcggtttatcatctaagcgaaagatcttttaacaaattttatgattgaaaagatttaccaaatttgttgccttttttgacggcacttctgaaagtgcaggcgaactaatgctttgagtagaaaccgcacgaattacagagggagctttctcaacagaacgccttttgatggcagtcgtgactttttgcgcaacgacgtgacttgtattccgttcacatgtgtgagttgtcgccatgcggatgaattcatctcgaagtgaagtccaaatccgtcctttgcacttgtccacaccgctgtctttgaactcacatcgccaaaatttaatcgtcccgtcggtacttgtcttagcaaatttgtaaagatggccatcatgttgtagcgttgacctgtttcttttggcgtcaatttgatgttgcatacggtacataataaatcttaaaaagtttaaatttatgttcgaattaaaattaaaaatataaaaataagaataacactattaatttaaaaaagtcattttgcttgctaatttttgcgtgaaattttatttgaaaaattaattgttttatttgtggccgaaacgtgctggggccgaactgaggtagaccggaaaggagtgataaatgagggggagggagaaaaaaaaagaaaagagagagagacagagagaaaaagagaaagaaaaaggagagatgtatgagagggaggggggggggtgggaaaaagagagagagagtgagagagattagagaaaaattagaaagagggagattagataaagagaagtattagaaaaattcgcgaatcaattttggaatcagcttatgtaattggaatcttaaatataataaaatatcattatactttactttctctggctctttttacttttaacatttaacaaataatgtggtaattatttaaaatattgataaaatcataacgaagtggtgaaaaagaatgaaaagacacgaaaattgtaagctgtgaaagtcaccacaaaaatacaacaa

SEQ ID NO: 6010 - DNA, 3781 bp, Heterodera glycines
  unsure (1)..(3781): unsure at all n locations
ccgaaaaagggggaaaatgccaattgacaacgccgctagggcacaaaaagaatgtgtaatttgcatacgaaaatccgcgccatctttcgtttccccccccccttaaaatgtttctagatacgcccctgacccaacacaacaaccatcatccaatcgcccattcattctctcccgcaattcctccctcatcctcgtcccatcaattcattctcgtcccaattgttgtgttccttcgccaatccatccgccatttcccccgcatcgaccgaccatcaccaaattgcgattttgatcgaacaacacaaacaaaataacattgagagaattggaggggggggaaggcaaaaaatggaaatgaacgaaggaaggaattggcggacaatcggtgcggaagggtaccacacaaaaaaaaataaattgagggaaggaaatggacttaatggaagaaggacggaagagcgagggaaaaagggggggggggacgaaagtggacgattaaaaagagaaagaaaggggaggaaaagcaatggacggggggagggagggagagggaggggatatagttattaataatatcaaagggacggaagaggaaattgcggagagaaatgagagagagaaagtgatgagcaaacaatgaatgggcaacaaaaataaattctccccccccccaactatttttgtgatggctttaaattgggaatggggggtggtggtggggggacggggcatattcttgaaaaaaattcaatttaggcaccaaattatttattaattacacacattctgaaattggttaccagcaaatgaaaaatgcgattgattgattgggttcgttcggtttcccttatgagtctgtccattcacaaccaaaaggcacttttcatccgaccacaccgtcaaaagcagccgatggccactgtctttggcatttgtccgacccgtcgatggcaccaatttgaagtgccgacgcctttaggtcgcctcctgcgccaccgcctccctccgtcgttttggctccttctcctctaaaaaataagtgaagtgaaaaccactgataatgccattccaaaaaggtaattaagcgaaaacaattgagcaataaatagaaattcttcacatttttctaataataaatttcttctttcatttaaggaaccgagagacattaaatttttaatttaatcaatgttcaaatgcaaaattcaaccgaaaattttctaaaatgtaaaaaagcggacaatacgtaatttgttgcccctcccccaatgggtacattccattttatgataagtgaccaacaaatcccacaataagttaccccaccccattcaccgtaccctttgtcctctcttcgtccgctgttttccgtccctcttttgtgtccgtcggttgctccgttggcactgccggcatttgttcggagagcattcgctcgaactcttcctccaccatgtcgttgtcctcctccgacatttgttggcccaaaatggtggacaattcctggaaatcagcgagacagagggcaataacaacacaaaatattgactctatcttagaaaggacctcctgaaactcttgcgcctctttgctctcctccattaaacgttcaacttcgtccaaagaaattgtctaaaagaaattttcaaattttctaggaatagttggcaatgtgagcgggtcaattattccgaaagtgcctgcctcgttcagtgccttcaatgcctcggtgccaagccgaaggttgtcgaacacttccctgttgatctgtgccatttccatgtcggtgatcgtccgctccacctgctccatgaatccgccgatccgattgatcatcgtctcctggaagcgcttccttttcaacagtaacaatgctcggcttcaaagggggtggtgagtttgtcactgtgtgcttttcctcattagcatccgttccccatttgctcactctttgcgtccgtctctgagcagtgcccgcgctctctccgcgtccttggcgatgttgcgctcgtaccgttgacacgcttggcgcaatttgtcgcgctgcattttcaacgactgaaaattgatgcaactgcatttatataaaacaatgccatgcaattaacaaatgttggactcaattttctcctaaatattgcaaaaattctgtgttcttaaactataatcatttcgggagcgcgtcgacaaaactttgtccagaatcttaaaattgtcacaatcagcaaagtactcactgaaagcggacccttaaaattccggcttataagtcaaagttttttgtaatcgtttgtacttaccaaggtcgttcggtcatgatcagttaccgctggcggagatctgttcgcttttgtccgaatgccaaagaaattacccatcagagaaaaatcataaaaacaatgaaaaaattatagaaaaagaaattttgaattagtaaaggtaaaatgacaacaaacaattgccatttgaaataggaatacaaaaaatttttctcaaatagcgaaaaaacatcaaatgagtataaaaaatgttggaatgataagcaattaaagctgggatcacggccgcaatttgcgcaaagacaagataaaatatcatggcaaaaatttttaggggaaagaacaacaataaatcaaacggagtcggtttcgggactgagcatgacattcagcagcacggacggctcaaattcattctgaagcatatatcgcgcatttggacagggccgaaaggcaacgccgagaacatcagtcaaagaaacgatctgaaaaaatcaaataagtttaaaaaatagagttaaaaacacaaaaaatggcaacaaaaatggacctcggcaaagagggaattgccctgcgccgccgttttggcttcgttgcccaatttgagttgctgtagctcgacttgaagcagtgccatctcctcaacctgaaagggcaccactcaatggcacaatgccaacaatccaaacaatgccttttcgttgtatcttctgttgaactcctcctcctgcactttcattttgctcttcagctcccgaactttggccttgtactgcccaacttggtcttccaatttgcgcgtttcctgcaaaaaataaaaaaattatgtcatttctcagtggggcgattaaaatttcgacccaagaagatgcaaaataaatggactattttctcatactttacaaaattttggagtcccgatccaccttcgagttttttttctgattgcgtaaacatgcaccgtacctttcggagttgttccaccgcgtccgaatcgtcccgtgacattcgaatcatggcgctttgctcttccaccatcttctccaagtgatcatgtttgatgtccatctttttcaactcaaactgcaggtcggccgcgaatttctccgcattcttggccatgttggcattctgtgactccatcgcctgcacttggtcctccaaaagtgggacgcgttcggcattcggtgcgatgaatgtgatttgtgcctgcaacctgaaaatgtaattcaccgtacataaagcaacaacaaatagtgcgaaatgccaagttcgtttaagtagggctatgtaccggcaatggcacgcctttttcttttttgaaaaatccgacttacacttaaccaggcatttggtgccgaaaatgaataaaccacctgtccccaatttatacctctcaattntcttcaacagattgttgttctcgcgttccttctgctgacaaattcctcggctctgtccttttcttggccaaaaatgtcgcgaattgcgcgcaatgactt

SEQ ID NO: 6011 - DNA, 2149 bp, Heterodera glycines
ctcacaatcagcacacgtacttgcattcgtaagaccccacggaccttgagaattggactgtttccgctagggaaaaacgactttctggccgaattgaacttcggcgtttgtgcaaagttgagcgagctgtgccgacgccgttcgccattctctttgtcctcctctttgatgtcgctgtgcaacagtttgggccatggagcgaaagtccaacagcgacggtcgtcgagacattcaatctgaaacaaatccaaggacaaaaatgagtatttgcaggatgaaacttacgacagtggcaaagtgccgttgatgtttgtcctccaaccgttcacaaatggtcgaaaatgcctccgtttggagtaaacggaaagtgtatagcatagccaaatgaatcttagggtcaaaaaaaagtgaaagaacaaaaactgggtgccactttggtcgcctcggacaaatccccactctccgcagcctcgggacgcaaatgcgaatgaaactcctcatccaaaccgtgcgcaatgatatcaatggcattgcgaaaaccaaagttagggtcgtcaatgaaagtgagtgtgccggacttcctggtgagaaaagcaaagtaaaaagatggaaggaaaacgaataataaaagtacatgtaattggctaaaattggcatcaaattgcgcacttccttcagcgattggcagtcttccaggccaattctggccgccaataaattatactaaattgaaaacactgcaaaaagagaatcgcattttactaacaaatgccaaaatagcagcgatattggcgtcgtccatgtggcgagcagtgagtgatgtgtctgtcgatggagagttttattctcaatttttgtaagggcccaaatgttttgaatttatactatttttcctgaattattggtaagaagaagaaaataagtttttaggaggtttacataaaaaattaggagtgtttttttttaaattttataaagaaaagttatttgtgattgtgaaaaggtattatttttatgaattttatttcaaatgagtagattataatatttaaatcttaaaattttgagatcatgtttcccactaccttctcccagggatattatttagtaaagagtttttttccccaatacacttttcaaaccccatttttcggcaccgcgaattgctatttttattgaattctgaaccgatttgagaacattagactatataaaaatgaaaattttgaaaatcatgtttcccactcccttctcccaggggtattattttgtaaagtcttttttccccaataaacttgtcaaaccccatttttcgcaccgtgaatgttatttttattgaattcttaaccggtttgagtagattagactagaaaaaattgaaaattttgaaatcatgtttcccactcccttctcccaggggtattattttgtaaagtcttttttccccaataaacttgtcaaaccccatttttcgcaccgtgaatgttatttttattgaattctgagccgttttgagtagattagactagaaaaaattgaaaattttgaaatcatgtttcccactcccttctcccaggggtattattttgtaaagtctttttttccccaataaacttttcataccccatttttcgcaccgtgaatgttatttttattgaattctgaaccggtttgagtagattagactagaaaaaattgaaaattttgaaatcatgtttcccactcccttctcccaggggtattattttgtagtctttttttccccaataaacttttcaaaccccatttttcgcaccgtgaatgttatttttatcgaattctgaaccgttttgagtagattagactagaaaaaattgaaaatttttaaatcatgtttcccactcccttctcccaggggtattattttgtaaagtctttttttcaaaataaacttttcaaaccccatttttcgcaccgtgaatgttatttttattgaattctgaaccggtttgagtagattagactagaaaaaattgaaaattttgaaatcatgtttcccactcccttctcccaggggtattattttgtaaagtctttttttcccccaataaacttgtcaaaccccatttttcgcaccgtgaatgttatttttattgaattctgaaccgtt

SEQ ID NO: 6012 - DNA, 1040 bp, Heterodera glycines
tggtggaagagcaaagcgccatgattcgaatgtcacgggacgattcggacgcggtggaacaactccgaaaggtacggtgcatgtttacgcaatcagaaaaaaaaaatcgaaggtggatcgggactccaaaattttgtaaagtatgagaaaatagtccatttattttgcatcttcttgggtcgaaattttaatcgccccactgagaaatgacataatttttctattttttgcaggaaacgcgcaaattggaagaccaagttgggcagtacaaggccaaagttcgggagctgaagagcaaaatgaaagtgcaggaggaggagttcaacagaagatacaacgaaaaggcattgtttggattgttggcattgtgccgttgagtggtgccctttcaggttgaggagatggcactgcttcaagtcgagctacagcaactcaaattgggcaacgaagctaaaacggcggcgcagggcaattccctctttgccgaggtccatttttgttgccattttttggattttcattgctttgttaaggtgattgatggaaagtcaaaattagaggaacaattgtcaatattgcacaccgacaatggcactcttcggcgtgaaaatgaacggttgaagaaaatggtcgatgaaaaggacaaacttttggtgttgcacaacggaaaagaattgactgggccgactttgggtatgaaaatgtgacaatttaattttatatcgtaataaccaaaaaagggatgccaatgttttttcgtaacacgcacgaaaagggtaacgataaaaagaacttgacccccactcccataaaacaaaattttcataaatttacgaccgttttttcagtattatttgattttgccatgttttttttaaggttttacctgttaatgttgtatttgggggttttttctttgtttatttcattttccaattaattaaccaatattctctctttttattatcatttccccttaagctgttctgtttgcagtgaaaaatgagttggaggagctgttgagtgagaagaaaagtctg

SEQ ID NO: 6013 - DNA, 3740 bp, Heterodera glycines
agagattacagcggacagcatttcactcaattcttcatgatggaggaacgattcgtgttcattttcggagtggggatgggcacccaaaaaataaaccaaagcgtccaagtcacggagttgattaggagctgaaacaaatgattacccattttccagttaacacaccctacgacccctctactatcaaaaggacgtgagggtcatatggaaggttttttgccataaagacggtctgaccaaataattcagaaatattcccgactattgtactataaaatgttaaaatttaaaacgcttacgccttccaagcatagagagccattgaccacggccgattttcttagtttcgcgtgaaaaaatgtcgacgtacaaaaagcctattcttgaatcttaaatggtaaaaatgtaatgtagacatttcaaaactgcaaaagtcacttgttgcattatcagtcacatcgaaaagtcgaaccgatgggtcgcaacgctcaaaactctgattttcataatcatttgtgacttcctaaagtgatggagtggaaaataaaggccaactgggtattaaaaaccaaccctaaactcaatgttgaacaattctgaactgaggagcagcattttgtcaaaggttgaaagtacggggaaatgtttcatcagctcaagagagtcaacactaaacgaaacgactgaatacactcattaattatgtcaacaattcgactcacttttggttatgttctgcctctttacgacaaatgtaaaagagatcaaaggcttccaaatcggaaatcaccctttcttcctgttcttcggcatacgttttccaagcgccttcgagtcgggagaaaaacacgggacgaaagcgcctggaaagtctaaaagggaaagaaatttagaaaaaatggagaggggtaaaagatactcgtcgacaaagacgcggacagtttggggactcccggccattttggaagaaattcggtggtgcgcagtcgacgaaaagccaagcgctttggcaaagccctcacttaatggaccccgattgataaagtaacaaaacaaagaatcaacgtgttatgccgcaattcctcgatgttttgtgagttgttcaacatttgcgaactgaatgcctgcaaaagtctcacgtttccccatcgatgcgttcatttgttaattgttctcacggatcttgtgacgtaactctgccacaacccttgccgaatctcccgcgcactgcaataatttaaggcagcgaaaagagcgtcgtgttttttgcttgtcacttcccacggaccattctccgggtcatttcttagcaaaagctcgcaattaataaacaaagcatcgagaaacaaaccctttggagagtaacgcgagagcacgcggaggggcacttttgagcaaatagcgatgttcgatagggacaatgacgccattgtcctgcatgtgattggccctgaaaaagaggtaaaacggaacgaatgggcaaattacagaaatcggaagcagaattggtttgtagcggaattccacgagaaattcacttcctgttggagttgtgcctttttgtcgttctttttcacctaaaaacaacataagttaaaacatccaatgccataaaaccgtcaaatagccacagagtcgagcttggaggatcatccagtcgagataccgttgctgccatggcttcaattttccggcgtcattttcatgcgcttgctaaaaagggaataattatgggctgaactcaaaggcacaaaggtcaaaaagcgagagaaattccacgactaaaagtcaaagttactaaaggtacacacccaaaagaagagaaaaaaattacaaacatttaaactcttttacttttattttcaaaaccaattcacctttacagcttcgacccaagtgggctcagtccatcgttcactcaattccctttggaaggtgttttgaacttgcttagaatataaaaatcagaaaaaatgctggactaagaattacataaaggtcttccctgaacagggaaggatggcattcgggccaatcagtgaacattttcacgaggagtgtgttcagctgaataagttactttttgtaaaactttactaaaaaataagctgaggcttacagcatactgaacgtcgtattcctcgtctattagtgaactgactgtgttgtcgaatgtacgcctttgtacgtttgggtctccttttgccgttttcttcgcatcttttatggagtaggtatttcaagcattttgttttgttatatgtcgaaatttaatcattaccttcgtcaagtaagtccaaatgttcccaaacactggcgccatattccaggattagtttcacggttccttcataaaactcatctgctaaaattaaaatatttaaataggaaaataaaaaagcaaacgtacgtgtggcactttgcagtgggggccattttgaattatgttcaatactttccaaaagagcgttattttctgcattttcatccggaacatttggaagactaaagtaaacagtgagacaagcagtgatggattggtcattattatcacactcacgtaataaaatatcccgtttgattgtgcggctttcggttttgcatcacccatcgtattgcttcaagtttttttgtgtttgaaaaacacctaaactggttatgtaagctagatttaggttaacaataagcaagccaagccttttattttcctttccaattccagaaaccaatggttgagaataaattaatgccacaattccattagtgatagcctctaaaatctcgagttcgagaatttggtgggtgagagaggtgttttttcgggtctgtgataaaaaaggatcagtcagtgacagatcagcggcggtggggaatatttacttttggttcaatttactattttttggcttactctgatcattggtccgatcgactaagctaatccctgatcacaggacttggacacgagatgaataacagtagcaacatcttcaacaacaacaacaacaacaatagcaacaattgtgccgttgcagtcgtcggcggcgagccatcatcttcagccgctgcttcctcctcctcctgctgtggtctaagtggggtcatgggtaagttttattttatttttgacggtacgtcaagggcctctcaaataatttaaaatgttaggttttcaaaaaagtaaataaataaatgagggaattgaaccagccggagggagagctcgtccggagatgtgtatttttttctggcctggctataaattgagcattttcaaagtaaaatatttggcatttcaacggacaaatgaataagatcggcaatttgttgcatggaagctgagagagtgggatgaaagtccgtccaaactggaaatcagcagaaaatgggggggggggcggggaaatggcaattaaaaaacggggaagagggcgataatatagggatgccatctgaaaattttaaaaatcaaaacgactgcctcaaaaattaacacaattggactcatttggggggttcgaaatcaaggaagttattcaaaaaattgctttttgatcagttgggagaggaaacaagcaaatcacacatttttgaacaggataaatcattttaaaaaaattataacccattctggacttttgatgcaagaaaaagcaacaacaattcttcccattttaaattttaattttaacagcagcagcagcttcttcccccaccctcatcttcatctgcatcatcat

SEQ ID NO: 6014 - DNA, 3241 bp, Heterodera glycines
  unsure (1)..(3241): unsure at all n locations
cggctttcgttttgcatcacccatcgtatgcttcaagttttttgtgttgaaaaacacctaaactggttatgtaagctagatttaggtacaaataagcaagccaagcctnttattttctttccaattccagctgttttgacaataaaccgttgaagaataaaatgcgcccgagacatctttgataaagtgcactgaatattgcccaaagatttgaaacgaatacaggccaacataaacttaaaagttttttttactaagtttttgggaaaatgcgggatttttaagattaatccagcgggattcgtgatgccaaaaaatttaataatgccaaaatttaattaggtataataattttttcaattcatatttccgattcccaatttttgggccgttagaattcagattgccgaaaataaattatgacgtcgtgaagagaggactctactgtctttcaaaaccattgattgtcagacaaatacccaattttttttggtactgagtgtgagaggctaaaactaaaaccgtctttagataaaatttttataatatgggatttggtggtcgaggaggtggtggatttcgtggccgtggcggtggtcgaggtcgcggaggaagagacggcgggcgaccgatgacagactatgggcctccccaagaagttgttggtcagtgtcaacacaatctattataaacagaatatattgcacttattgcagcttcccatcagaaaaagcacaaattacttccatttagagcttggccatttcacgcattcttgcgagaatgacatcgtttgcttaaccacctgcggaaaaatcccctacttcaatgcgcctgtttattttcaaaataaagaacaaattggaaaaatagacgaaattttcggtggacccaaagacaatgtaagttttatttattgctttatttttaacttgaataattttgcctcggatttttggtaatactgccggcggaggacggaccccttgagcaaaaaaattcgacctttatttaaaaccgcttcaaatgcacaaaggaacaacgagttcgccagtgttttcagcataatattggctctattgcactttatgagtccaattgctttttatgaggtttcgacggatggtttaaatacctcttgaaaagccttaagaaacaattttaagttactcttattccgttgtaaatgtaaatgtttcagggcttctcagtcaagctcaatgaagggctaaaatcttcatccttcaagaaagaacaaaagctttttatcgaccctgctaaattgcttccattggagcgttttctcggcggaaatcagtccggcggtgggagaggcaggggacagcagcgggggagaggaggcgcgggacgagggggccgtggaggcgggggaggacgcggccgaggctttaacgcttcaggcgcaggcagcggagggagaggtaccatattaacatacaaatagaattggccaattccaatggaatggtgtcgctttttgtaaccgcttttaataaatttgccaataattgaaaattttttggtttcggtaagggggtgggctacgtaagttacacatgttgatattattgtaattggtggagattaaattctttctcaatcattgctaattttttgaactttttatgatacatgacctattagatgcaggcctatttccaaccacacacattgataggctataatataaaatttcaaaatttataggtggaggaggatttagaggcggaggacgtggaggaggaggcttcagaggcgcttcagggggccaagggggtaatttccgtggccaacggggcggtggtggtgggttcaagagaccattcgaaggcacacccgcggccggaggactttccaagcggaagaagtttaacgaatgatccatcattttcttgattcatttcctttgttgccgtgttctctttttggatgttctcttgaattaatctttcccttttcttgagaatttactgacggaaagcatccaaacaaaattcattgttgcttgtttcaatttccaattataaaggttttgcttttaattccatttcttaacattgccaagtcggtgattgaacatgccatccatttccttctttaatttactggcacatcttttccaccgtcgttcctcctttcccgacttcgtgcttctccaaagactgaaagtgaatcatcacgcggtcgggcggaatcccaaggcgactttggacgaattcgctgatgttcttacagtgaattacattttcatctgcgctgacacagccaattgatttgatcttataataaacaacaaacaatcaattaaaatcgctgagtgacttttcacccctttttttattttctttttacttgcagaatcatcgctggttcggcagggtcacttccgatttggcaacagtttggtcccgactggacaattagtgctgtcgattccactggcttttgcattgaattggccactgtcgcgaggaatgttcgtctgaattcgttgtccaatttgagttcgggaaggttggtccaaagatttataaatggcatttcaaaatgtatttttgtaagtttgcttgaaaaagtccaaattaaatcagtgtgctttttgaaattacaatttcggagtctatcgttctgtcattttgtcgcaaaatgattgcatgaatgggtgggttggtgttagataagtgtctctgtcagtcagtcgttggtttcgtcgtctctatcggttactttctttatctcttctctctctctctctcccttttacctcccttttgtcactttctcccttcgtccgtttctccatctcgtcactctgtgtttgccctgctcattctcggcttcccctcctcccttatgaattgacctctctctcttggtcattaattttaatttccactcgatgaggtccaatccaaggacgtcctttgaaccaaggacagtcccacccctgcgtaactcgtcactgtcgttcatttgtggcccctcccctcccctttaacagtacgatttccgacctccgctcaaatgtccacaatttgcagcatatccgtcggatgattctttggtctttccatcgttggcatttgcgccctcccctcgcccaatcccatgaattatttgtccatgaatgtgcctacttattgtactacgaatctatttttggaaacttctccgttatggggggcatcagattcagaaaaactctttcctttcattatta

SEQ ID NO: 6015 - DNA, 2000 bp, Heterodera glycines
cagggctgccagattaaaattttcaaaagcctcatttggcaggtaaaaaagcctcattttgggtcgaaaagcctcattttacaaaatttattcaaaacacgtttaaaatattcaaatgttatatttttgattgtccatgatcaatttgagcatttttttgttagaaataagcattttttgggattctgaacatgaaaaacgaagttgattttttgcggcgcttttcccaaaaaacttttgggggacagggggaccggcggtgccgataggcgccgtcgggaaaaattttgtaattttcaatgcgatttgttaacagattttgtccgagaaatgaccaaattttgcgattttgagcaaatttttgcttgtaaattaaggatttttacggtccggcggtgccgataggcgccgccgggggaaaaattaagaattttgaccatatttttagcatattttcattaaaaaaattctttaaattgccaaacattatgccaatttatcaaaatttaaaagattctgaggattttccccaaaagcctcaaaatttctcaaaaaaccacaaaaagcctcattttgcaaatttagcctcattgacctatcaaaaaaccacaaaatgaggctaaagcctcagatatggcagccctgctcatttgccttggtcctctaataattagtaataatatactttaaatgcttttgtcagttttaatgtgtgctgtttgatttgccgattcaagtttcgcctatttttgttcataaatgtttttatgctcttattttgtgtcgtttccttttttacactttctttttcattcctaatgttcactctgcttaataatttgcttatgctaattgccactgccccgtccatttccaacaatttgggcgagtgcactcgcggggggggggggggcgttggggagggattgattggtcctccctctccctctgcggtggttcttccgccgccgcgatgctactgatgaaaatgaatgggaaatatgtgaacaccgctgcgcacgcgcacttgcattgccaataaaacacacgacgcccgccccactcactttcgttggtttggcgcgtgtgcggcgactgctgacacagcggaagcccgtgaaccaccaaaatgggagttgtcgggagggaggggataatgtgggtgttacatatgagaatgcctcttaaaactcagtctgtcatgctgcgcttcctcaatttgggcgtgcgtttgggctgaatgagtgggaggaattgccaaattcttttggttcgttcacctgctgatggacccctgaaatttgccagtttgtttaacttacaaccagccaaacattcgattggaattcactgtcaaagcccactctctccccccaccctctcacaacgtctcaaaatacgttaaccattacaaaatattattttttttattcttttggtgggcgtaacagcaaattaatggaaataaaccccacttttttttactttagcttggaatgtacggctcacaaaattttcatcagcagcagcaaaattacgataaaggcgaaaaacaccgaatcgaacctccctttgagctgacaacgactacacaaagttcagatttatgcacttcagcaaaaagcaaagttggcattttgaaagtttcgatattcaacaaatgaattaatataaatgtgtttggacattcgtttgaaccgtcttaataatgatcccttctcaatttgcagatgtctccctccggcgtttgttgtgacaaaggttcagtgcgcggtttaatttcaactggcggcagcgcgaggcatttgtgcgcttacggcgacgaccattcggaggaccaaaccacacacgcgaagatggacaatgctcacgcgtcagtgcactgccactgtcggccgttgcccgcccattatgggtccaccagcacgacttagtctgattttgccttacttttaacccgttttattttcaaatgccaaatttgataataatctttttat

SEQ ID NO: 6016 - DNA, 1934 bp, Heterodera glycines
taaaatgtgatcatgtattcgtgatcatcggcccaaataacccctaaagacatgtttttggaagatttttggtgaaaaaatttctcaactcaaaaatcatgtgctcccccctttggtctggaatctcaaaatcacttttatttttataaaaattcttaaaaaaatgataaaaatgccaaataaaatttatataatagagcaaaaaactgcggatttttgtagtattttatctttccagaatatcttttcaaaaccgagttatgaatttttttctgaaaattcgaatttttccagaaattctggaataacttttttccttttttagatagaaattccaaataaattccataaaattctcctgatttttctctaaaaaaaataatgaaattctttaatttaaaaaaaataaatttaaataatttaaaagaaatcttcaaattaattaaaaacagtcaaaataacccaaaaatgcacagaaaaataatgttacaccgtccggattcgaactttgcaccccccccccccccaaaaatgatgcctcagaatccccaatcacacagggattctgaggtcttgactatgtcaaaagtaaaactgattacgtattcgtgatcagcggcccaaataacccctaaatacatatttttggaagatttttgtgagaaaaatttttccactcaaaaatcatgtgctccccccagtgattaaaatttgaacaaaagtgattagaagaggtacaatcatggtttaaaatgaaataaataagaaaattgtattattggatgtattataaatttatcaaattaaaaaaatccttttacttattaaaaataaagttagaaatttataatatagaatatttattgaaattgaaaggaattaattctcgaaaattcaaattaaataaaacatttattcatcagaaaataatttaaaataattaataaaacaatattaaattaaataatttaaattaacacattagttcaccaaaataatttaatttaaattaaaaatttttatttatttttaataatacaaaacaaattaattaacatgtaaaagtaatcaaaaaatgcacagaaaaataatgttacaccgtccggattcgaacctgccccctcccccctcaaaatgatgactcagaatccccaatcacacagggattctgaggtttaaacgatgtcaaaagtaaaatctgatcacgtattcgtgatcagcggcccaaataaccactaaagacatgtttttggaagatttttggtgaaaaaatttctcaactcaaaaatcatgtgctcccccctttggtcccgaatcccaaaatcacttttatttttatatctttttttaaaaatgtgataaaaatgtaaaataaaatttatattatagaggaaaaaattgcggatttttgtagtattttacttttacagtatgacctttcagaaccgagttatgaatttttttctgaaaaatcgaaaatttccagaaattctggaataactttttttcttttgaacattataaaaccaaataaacctcataaaattctcccgattttttgctatttttaaagctttaattcacttaaattgagcagtccttcattgagttatgaattttcaaattttaacccaaatttccaaggaccaaaaaaattaaaaatattttagaatttttaaaaaattccaaaaaatctgaaacttaaaataaacatcatatttgtgctcaggaccctaatttaccccagaaaaatatttttaaccctctttttcaacccaaaaaaaatttttgaaaatttctagggggcctagctcgaaaatttttgaaaatttccggccatatggcacaccattcgatagagcttaaaaaagtctacaattttgcccttaggagttttttcgataaaaccaacccctaacgagttatggacccgg

SEQ ID NO: 6017 - DNA, 3067 bp, Heterodera glycines
  unsure (1)..(3067): unsure at all n locations
aaaaaataaaaaatcctggattatagaggacacttctgcggagtaccctcacaacgggaattttttgatccgagtttcagaaaaaaagttatgggccgtcaaacgcacgaaaaaatgagaaatccgtccctgggactcagtcgtccgcgctgaatttttttctatagttttgccggattctcctcaaaaagtagtaagacccttccaccactttcagggcgctcccggccttcggccgggagattttgttttttgaaacgaaactccttgtcaatataacatatatagtaactagcgggtgcgtgaaccgtcggctatttagctgggaaaaagcgcttcgcgctttgggagcttcgctacctaggctgtgaagcgattcaaattgatcgaattggttggagagatttttttgaatttttaaaaaattataaggggtttttagtccacatcgaggctcaagacgggcgcttcgcgcccttcgcgtcctcgaacgggcgcttcgcgcccgtttctaatttttgttgtgcttttcggccgcttcgcggccgttttttaaattgtgttgagtcggacgggcgcttcgcgcccgttatttatgggttgtggagtaattgttggatccgaagcagttattagaagaggtgcaacagtgcttagaagaggtgcaacagtcatcagaagaggtgaaaaggttgaaaaataatataccatggcatataaaaagagcaaatacggtattcgtgataagcggcccaaaacgacttttcgggccataactttttattcgaaaattttcagaaattttgaaatatcttttttcttatccgttgtttaaataccaaataaaaggcataaaatgtgccgtatttttcctcattttttaattatttgattgtgaaaattcaccctccctaacccgagttacgaatttttgaaaattacaccaaattcccaggggccaaaaaatcctgaattttcaaaaaatttttaaacgaacccaaagtatctgaaaagaagaggtacaaaagtgtttagaagaggtacaaaagtgattagaagaggttcaacagtgattaaaaaaggtacaacagtaaatagaagaggtacaacagcgattagaagagtgattagaagaggtacaacagagattagaagaggtataaatttgataaaagaggtacaaaagtgattagaagaggtacaacatagattagaagaggtacaaatttgataaaagaggtacaacagcgattagaagagtgattagaagaggtacaacagagattagaagaggtacaaatttgataaaagaggtacaaaagtgattagaagaggtacaacggtgattagaagaggtacaaatttgataaaagaggtacaaaagtgattagaagaggtacaacagggattagaagaggtacaactgtgattagaagaggtacaactgtgattgattagaagaggcacaacggtgattagaagaggtacaaatttgataaaagaggtacaaaagtgattagaagaggtacaaaagtgattagaagaggtacaacatagattagaagaggtacaaatttgataaaagaggtacaacagcgattagaagagtgattagaagaggtacaacagagattagaagaggtacaaatttgataaaagagcaaaaaagtgattagaagaggtacaacggtgattagaagaggtacaaatttgataaaagaggtacaaaagtgattagaagaggtacaacagggattagaagaggtacaactgtgattagaagaggtacaaatgtgattgattagaagaggcacaacattgatgagaagaggtacaaaagtgataaaagaggtacaaaagtgattagaagaggtacaaaagtgattagaagaggtacaacatggtttaaaattaaataaataatgaaagtttttataaaaatcgattgcattttaatttaaaatttttttataataaaatactctttttattcattaaatataattttgaaaattaataattgaatatttattttgaaatgaaattgattttttataaattcaaaaaataaataatgaaattaaataaattaattaaataatttataaaaatcttgaaattaattaaaacattaaaaataacccaaaaatacaaagaaaaataatgaacaccgcccgggtccgaacttcgcctatatgaaattctttaatcaaacaaaaaattaattttaaaaaatttttcacaaaaaaataatttaatttaaattgaaaagtaattaaaaaaacaaacactcttttaaatgaattaaaaacattaaaaataaccaaaaatgcatagcaaaaataatgtacaccgcccgaattcgaacttcccccccccctcaaaatgatgcctcagaatccccaatcacacagggattctgaggtctgaacgatgtcaaaagtaaaatctgatcacgtattcgtgatcagcgtcataaaatacccctaaagacatgtttttggaatattttcggtgaaaaaatttttccacccaaaaatcctggtcacccccctatggtcccgaaaccaaaaatcacttttatttttataacaattcgcaaaaaagatataaaaatgtaaaataaaatttatattatagagaaaaaaattgcggatttttgtagtattttacttttacagaatgacttttcagaagggagttctgaatttttttctgaaaaatctaaaatttccagaatttctggaataactttttttctttagaagatagaaatcccaaataaatcccataaaattctcccgattttttactatttttaaagctttaattcacttaaattgaccggccctccattgagttatgaattttcaaattttaacccaaaatcctgagggtcaaaaaattgccaaatatttttgaatttttaaaaaattctanaatttactaaactgaanattaacatcagattcgtgctcagcacatcnaaataccccagaaaaatatttttgacccccattttcacccaaaaaaaattttcgaanattctanggggcctagctcgaaa

SEQ ID NO: 6018 - DNA, 5795 bp, Heterodera glycines
  unsure (1)..(5795): unsure at all n locations
ctcgaccatgagacacgaaagattcagccttgntggaccttcctgtggccgcacacgttccaacacccaagcgctctgttcgatcacattcttccaatcctcctggtccgtccccatcagcgtttccattccgtccggcggtccgatcgccaatgatttgaagccagtggcactcacagcttcacgtgccgcacaacatgattccaaccatttttcgagcgccttcgattggtcctcctcctgtggaaatttgcctgtttccacataatccccccttttctcggagaaagcggccatttcgttttttggtccgtttttaataatcaattccacgaaaattcgggcggcggtgtttgaagagacggtcccggagcgcaacaagaaaatggccaagagtgcttgtagcggtgtttggacgatggttgctccgatcccggtctggccaagcaccgggtccagctcccccaatttcaaaacactgcaaaattcatgcccctcttctttggggttgcaaattgagttccaactgatcccggcgtccgaattcatttgacctgaaattttcaaagggaattccgtccctttgatcgagaaagatttattaatcccgctatcttttcccccatttttctcttcttttccctcttcgtcgcctttaatagcaattgtcccaaattgcttattttcggctagcgattcttcccttctttggcattccatttgaaccgacacgctaagaatcattgcatttaatatatttttatagggatttttccctcgtggcaatgttgaaatgtttggaatcgatttagggacttttataagcctttccaatggtacagtgatgggattagccgtctttttgtcgactggcactacttctgctgaggaatcggttatttttacgataaagtaagggccgaaatgtgtccatagtaattttttgtgtcgggaattacggtgcattcccggaaaagctaccataaccctttccgatatttcaaatttgtttgccttcactcggggctttgcgtcataccactctttactctttttcctgtattcctccaaattttgtttggctttgtcttgaatatttaagagattttccaagaacaattgaaaatagttttcgtgatcaattgtatatatcggattaaaatttatttgcgtaattttgtccgatgcaattattgctggtcgtccaaacatcaacaagaaaggggaaaagcctgtagattcagtcggcgttatattgtaggcgaaaacagtaaacggcaaccgttcgtcccacgtccaattgctagccgttgacctttttaacatcccaattataatcccattcactctttcgaccagtccgtttccttgtgggtcgtaacccgctgtaaatgacatttcagttccaagaattttgcttatcccttttagtgttgcatttacaaattcctttcctctatctgaatgtatctttttgggggttccaaaaatcactaaaaatttttccacaaatatttttgcgactgagtctgctgacttattcggaataggttcggcgaccaaatatttagtgaaatgatcgatgattacgcaaatgtatttaaaatttgattggcttggtccgatgtctaaaatgtccatacaaactaattcaagtggttcagaagaatgaactacttttagtggtggttcatttgagcgggcatttcgggtatgtgcgcatattctacaggcgagatgaaagcgaatacaatctgatagcatattaggccaaaaatataattccgaaagctgtttatacaattttttgccgctcatatgccctgaacattttccttcgtgtcgttcctttaccaaattttcacggaaggattttggaacaaagaggcgcattcttccatcatcttcacagagatacaaaagtttttcgaaaattgtatatctgtgggacttatccataacactttgtcgaatttgagggtcatttggaaccacttttttggccaaaaattcatagatcggctgcatttcactgcttttagtctcttcctcccatttttctttgtgatcagtgaaatcttgtatagaatctggaacttcatttgttcgtaccttcccaattaatgcaatttcttgattgtcttttggctccaaaatttggtcagctgctttagaacgagaaagaatatcggctataacatttttcttccccggttggaattcaacttttagaatgaagcgggagcttaattcgagaagccatcggtcgactcgggaatttccggtttcgtttttactctgaaacatccaaataagtgctttatgatccgtaatcactcttgttgggatcatgatgatgaattgggcaaatttttttacaccaaatttaacagccaaggcctctaattcggtagcactgtaacgagattcgtgatggttgcattgccgtgaggcaaagtaaattggtctaattctcttttcgggatccggttggcataaaaccgctgcaatacctattttactagcatcagtcataattataaactgcctgctcgggtcattttctgctgctttgaaatccggaaaataaagtacaacatctcgaattattttcgatttaagttcctctagtgcttccttttccttttctcccattttgaattcaactttttcgctcagtagcttaaaaagtggggcggcaattgtaccaaaggaatgtataaatttcctatagtatgtcaaaaatcctagcaaagaatgaagctctttttttgttgtgggcgttggcaattcgatcactggtttcagtttatctgcgtccatttttattccttctctcgtaaggatgtgacccaaaaatggtagttcggtcgcacaaaaatggcatttttccaattttaattttaaaccggcagttttaatccgagaaaagactaattcgatgtgtatcaaatgctcttcgaatgattctgaggcaattagaatgtcatcgatatacacgaacaaaaattggttaatcattccgtcaaaaagacgagacatgaacctttggaaggtagccactgcgttagttaagccaaaaggcataaccatgaattcataaaggccatattctgttgtgaaggcagttttttcgatggaattttcttccattttgatctgccagtaacctgacataaagtctaaggtactgaaaaatttacgtccgccaagcattaaaagtgtattgtcaatgtttggaagcggaaagcaatcttttcgggttattgagttcaaccccctataatcgacacagaatcgcagagttccatccctttttgggactatcacaattgggctggcccaaggtgacattgaaggtctaatgagacctcggcctaagtaattttgaatcatttcggcaattttttcgcggtaagcatatgggacaggtcgcgtttttgtctttattggcgcttttccttcggtttcaatttcatgttcgaccaaattagtctgcttcaggtcttcatcactgagcgcaaaaatttcaggaaattttttgccaaatttttgtagtttttccatatgttcttcagggaggtccccagttctggtttgtaaaatttccaaaaatttcattgcgtctagtcgaaaggccgcaattggatcgttttttttggaacaaataatttggctgtttaagaaattttctgcttcttcgactgattttgcgagttcgacttttccaacttttgagttttcgaaaagtgtaatggctgacattgaaaaatttgtcactggaacaataatttttcctttttgggcaagccctactgttggttcaacacgaattgcggcgacggaattttcgtccggcgttgcgacaatttcagctccttcgaattgactatcaatgcttaactccaaatttttaactgaattcggctcaatggtcgttctgtaaatgaccgtgagaaaatccctttttcccgactctgttttttcgaattcgaccatagctttattgcgttcatcataaagtttgaatcctaaatcttgtaatgcgttggtgccaatcaaaagtccgaatccaattggagcgtttgtgatatgaagaaaaatggacaccgggtctgaaaacccatgacgatgaactggcaatttaacagttccaaggcacttaacaaattttccgttaacatcaaaaatttgagtttttgacttaaaaatttccaacgactccaatttcacttgcttttctttgaccaacttatgcaaaaagtcgccgccgattagtgattacccgcgttttgttgaagacttcttcccgctgaaccaccaaacaattgtgctttaaaaaattggatgaatttggtttgaatgtgtttttgttattatttggggtctgaatttgagtccgatttgctcccgtcacaacaaaatttctattttgttgattattggtgtcctgattttgcgaaaaatcttttggacgcgtgcaattgcgtgacaaatggccgggttccccgcaattgtaacatttccattggaaatgttgaccttctttggactgatgattggtattgtaagtctgcgaaaatctttcgcttgttcctgttccgaaatttgagttgacaacagaattttgtcgccatttctgcgtttgtacccgatgctgaaatgtgtcattcgtcggtgtgacgaaacgttttgctgcgcgttgtgctgattcagcccgagcagccaacgaaacgaagtgatcgagtgtcatgcccacagtgcgaattagctccaaatttagagcgagatcgggattacccatcgcccggattaagaacttaattgaatactcatcacttagattgtttgtaaggccagggtaggcccgtttaactaaggcagaaatccttccggccaaatcatcaatcggttcatttaattttctgcggacgcccatcattaattcgtcaaaagcgttgagattttttgagtcagtttcttctaactgctgcagcatttcgcgacggatgagttcataacggtatggctgagttgcctttgctgcttcaagcgctctctcggctttgttaaacactttgctttccaacgccaaaattctttttgaatttggccattcgtccgtgtaggcatcaaattttttgaaaaaacgccttacgatctcaatgccctcatttccatttaaatctgggattcgttccaagatcagattaaattcaaggttgcttagaaccgttgaattgggttgtgtatgcataacaaattgtttttcgcagggattcataatcggtttttgaaaaatttgctcatttccttggaacgggaaagcatttggctgtcttggttgctgattttgtgggtatacaaaattaatgttctcctctgctccttgccagagttctgcttctgcaggaatttttcgaatgaaacgactacccgcctgaattggtgcgtttggtggatcaatacgatgaccaccactggagaaaaattccatgttaatgctacgctgagcatttgctgctatttggtttatctgcgggggtctcagtgggatagggcggaaaactgtgttagcaacaggttgctgcattgcaatttgtcgcattcgctcagcttgaccaactattatcggaaaaggtccgaatcgctgtcgattttcaatatttacagacggagttgaggtatgtgggggttggagaaaatttcgagggctagctggttggcttggcgcaaaattttctactcgaatttctatgcaaatcattctggcgaacgaatgttgtccgtgaatc

SEQ ID NO: 6019 - DNA, 1809 bp, Heterodera glycines
  unsure (1)..(1809): unsure at all n locations
gcagtcatttagcaaaaggtgtcccctccaccgccgcgccggagggcacaaaattgagcggtggcgaaatttccgtcacggcaccgtttgccggaggccgatttgcacaattattattattttaatgcttgtaccaacaactttccggagggttaaatgggcgaggcaccacctcaccgcccaaacattgtgccaaaattatttgtgccaatgccacccgtccccctaccccgcccatccatcgcttaatttaccaccaccttccacccccacacccgccacccgccttaaatgggcgacatgccgtactctccagcacggcgcggcgtgccgtccgtgcccgccggggctgttcacaaaagcgcgttgagccgtgaaacagtgccgcaggggaggggggaagcctaaacacacactaatttggccactagttcagcaaaagtaaatggatgaagggaaaggtgctcatttgtccctaacggggccattgttaatagaagagaccggcacggtcggaattttcggcatttttcggtttttttttgggaattttaattgaaaaattaaattaataaattatggtgggactccaagctccgacctttcaaaccacgcgactagactttaatcctgcatgattaaagcaatttaaaaattaaatttttcgacgaaggctattggcacaatgcaagccaaaaaaatcaaatttttgtcgtcaaaaaaatataatcgcaaatttaattttacttacttttatatctgtaattagcaattattgtaaataaaaattaattacttataccaaaaagcagcctaaatgtgaaattattattgtaacacgaaaacatttttaattgccggtcaaatgtctctggagaccaaacaattcaccctgaaggaattgggagaaggggtcattcattggttaattagtgcaatgcaattgaacctaattatatcccttctctggatatcttattattatgatatattccaagaatatcgcgagcgatcaaccattgaaaaaaagccatcggcgggaggcagcacatcattaactaattgccctcaatttggtggcccacccctcccaccaaaaaccaccgtttgacaaaattgtcaaattatgaacgaagtaaatatgtgccgcctcaaatttcattgcccaaatttattgtctgtcgtgcctgcccacaccatttttctcccgcattcattcatttccatgccaatttacggtagattacggtagggagaggccttggggacagagggggcgccggggggaatgaccgccgcaaaacgacacgacgatgacggcgactccccatcattatgatgaggatgatcggcaatgtcatcaacggtttccctccccgcccctgtccccgtctccccgaaaaattcgcgggaatttgtattagaggagagagagaagcagaacgccaaattggcgatatttttctgcccccgcccctctcattgcaataatcttccaaatttggtgatgatggccttcacacttcttcacaacgttgccccgcccccgcctctccccgcaggcgaggcgataattctcaatttataataataatttggcgctaccctccggggacaaatttgtttattctccgctaacgacgagtgccaaacttggacactgcagagcggaggaggaacaagaagcaactccatcagggccgagtagaagtttagtccgagcaacagttgaaggctcaatttattgccaannntaggcgcttatatcatttgccgctggcgatgtcggcatttccacggtgccaaaat

SEQ ID NO: 6020 - DNA, 974 bp, Heterodera glycines
atcggagaaagggggtgccatgccacaccttaatttccctcccaatattttttccgaataatgcataatggcaaaggcaccaatacccgttgtcggtttctgtttgatcaaagcttcataattattgacaaattcaaatgcaataaaacagttaaaaaactgatgaaatgcggatgttcggatgggatttgatcatggtatcaatttcaccgcctgtcaaattttaaatttttcaaaatttgaaattttgtaaatgatgtcaaatgctctaacaaaagctgtatatgaattaaatggtagaatgataataattaaatgtgctgctcacacataagcttattcccggccaggcgacttcctcagtgccgcacttggccattccgcagcgttcatgccggcggctaacatcaatggcattccgtcctcatcatcatcattaggggcagccgcttcaactagttctggcaccgccacaacaccaacaggtggcgtcggcaccggtgccggccaactggtggcacggaacagcaccaaaacgttgaagtgccccaagtgcaattggcactataagtaccaggaaacgctggagatccacatgcgggataagcacgcggatgctgaggtgagtttttttagtcatttggcacatggccaataattttgaatttgttcggcttaatagtggcggtaacggtaattggttgggtaattagcagtattacccgattttttaaacaaattcgaaagagaaaatgccgtattttacaagttaatttatccgacaattgaccggtttaacgctaatttccacggcaattagccgtgccaaacaaaaccaacagtgtcatttcacccggcagatgagtcattaggccaaaggatacggtaccctcaaaaaaaaacgagaaagcaaacggtgccggataaatgcgaaaaagccggaaaatgagttcccctaaatttgctaaaaaaaa

SEQ ID NO: 6021 - DNA, 3969 bp, Heterodera glycines
catgccatgcaggaaatgccgcagtcaattgccggtacagtttttgaagcgggcactaattggttttgatcgggaatgaaaaattgattggtctcgagaattagctgagagtaaaagaattttctaaagcaaatgctctaaactgtttaagactaattaatttttgattgggaacgagaattagttagtttaaaaaccgtttagggttaattagttttggtcggggatgcaacttctcgaaggaagaccctaaaaattctagcttctaaaactctaacttttcttttatggaactagaaaatttccgattttttaaaagggatactgtattctcaccaaacgttgtaagcctaatgtatactgtattctcatcaaacactgtaagccaccgtaaaggtcaaggaatgcggtcgagagtttagactcattgttccctaaaaattcaagttttgttttatagaattaaaaatttatgattttttatacaaaagtatactgtatttctcactcaaatactgtaagctaccgtaaaaatcaaaccaagttgcgggtcaagagagtttaggctccttgcttggccaatttggccaccagcagcagcaccaagcagcggcggcagttggacaacattcgtctccgttggatgcgacgatgccgacggcaccgaatgccgtggcacagcgtgccgaactgtccgccacgctccaatgcctgatctgcttgaacttctcggccaactcgttggtggacatgttggcccatttagagcgtgaccggggccaggcccaggagggcgacaccgccgcactgcacggatttttccaggtgccaatctctgctgggcgaaaatggttggcggttgacaaacaactgataaactcgggctatccggtcactatttgtgggagtgttctggccactctcaattagcgttgttcgagattctcggttctcgagtcgagaaattcttgggtttttagggtctctggctcaagtttaggctttttaagtctcggtcttgagacgcgaggccgagaaaaatttttccaacgcttgaaaatagggaatttttgaaattttgattatttcatttatccaaaactctgttctcgagacttggaaaacattttaaatctcgggctataattaatcccattggaatttgatgaatgataattttatgaaatgcttttccttaatattttgtgtaaaaatttctcaaaaatccaaatttttgaccatttagaacgaaatttgtgagacaaatctcacccaaaattcatttggcatgataattagctaattaggagcttaaatgttttttaaatttgcgctttcagtgccttctctgtccgtacagcaccaatttgaaggccaactttcagctgcacacgcgcactgacaagcacatccaacgagttcaacttgtgggttttccaattgatttagaattttttttgaaaaaaattgcaattttttagtaaaaattgaaaaacaagtttgagtgaccattttacccaattaatgataattggttttttttgagaattttcaaacattgccgaaaaaccacttgatcagatttggaaaaagaaagatctgatgagattttccataatcatatccaattttttaaactccaataatcaaattggacttaaagagacgctaaaaatgcaatttttccctgggggcgcataaatttaaaaattagcaccggaaaaattttttggacacctaaaaaccagtctttgggttttttttgttcccgttacgggcctgatcaccaccacagatgcaaaatcatcgccaccggcaaaaaaaaaaaagttaattgtgccctccacgccaattaaaaaagggggcgctggtgggggtttttggcgttttgttgctgctgccccgcattttcaaaaatcgtccaaaaataggtgtgtctgagttgtgtgtatgttgtgtgagcgcaatttctcatcaaacaaatcgcccgaggggggcaatttttgggtccgaaataaatttgccctttttgttgtccaccgccgccccccccccccggcacccaaatgaatttgtcccccccccgcccccctaatttgttccacaaactctgtggtgctgttgctcatttccctcaccgcgacgatttgcgcgcggttaatgagccgatggattcaggggaaaatttaggggaaggatcggttggatgacaccaaaattgggggaggggacgaagagggggggagggacaacactttgcaaacaaatgcacttctgctgctaatgattgctggcgaaattccttccaagccgatgccctgggggggaattggaattttgaaaattcttagttttcaatttttgaaacttgggagggacccattggaatttttcaaccgaggttctcggacttcatttttggctaacgttgaagcccatccaagttgaagcagggggttggggtttttttttttttgaaaattctcagtttacacttttgcaactaggagggaccgattagaatttttaccgagggtctctgtcttaatttggccatctttcaagctcgtcccagccgaagtcttagaaggaggaagagagaaagattttttttttgaaaatcttttttacaaggcccttcctgctttttctaattccggtccgggcttaacctaagaatcgttagggcgaaagttttttaaccgacatttggtcggccaataaatgttttttcataatctaaagcctaatttaattgaaaattttaaattagacaaaatagggcctaattgtttttacacgtacagatcaaccacctgcgcgaaggcagtgccgtgatgggcgtgccggaacagttcgcgcggcttggcaacctgaagagtgcggtccaagtgcgttgtcaactgtgcgaggaggtgttctcctggtaaataaatgtctatgccaaactggtttgatcagtttttatcactaaaataaatttctaaatgttctaagcattctggtaactcataatttacctttagttgctatttcattttcaaaatgatcagaaagactctgagaataaattgatcagattttccatcatgcaaaatgcttcaaatgatcaaaaagctaaaaacacctctgtttgtctatacgtacttttctgcatttgtcaaattccatggatttattaatgccttgcaccaatgcttttccttttattattgtccgagggcgaaaattatttgtgccttccctccgaccattttcggcattttcctttcgcgcaaagggcaaacaaaatccaaatccgccccgccgcggctcatttgtataccccacaaaggggcaaaccttccgctgggcttaacggggtaaagcatgatcgtaaagcgcactttaaagcctctccatggtacccacgattcaccacaaaaattcagctacggcgcgcatcagcgggccccctcccccgagggctcggcgctcatagacaaccgacggacgacgtaccgtaggggcggggggggcaacgatgacaaacacaaattaatggggggattatcgcacctccgtttcccaccaatcaaacaaaaagcacatcctttttcttctgtgttcatcctagacccctcttacaatgccttttgatcacttttctgatcacccgagtcaccactattccttttggtcgagttttacctttctgatcagtccatccattaatggccaagctggatcttctgatcacttcatctccaaaactggtaattcccaccaaaaaatggtgtttctttttttgatcactcactcactctcactaaaattgtttcatcttgaccgttttacaacttaatacactgtaagcatttgtttttgatcactttcccatatcagttgatcactactgatcagtgatcaccgtcctctccgtcccacataaaatgcctttttaatcatttttcaccaataattctctcc

SEQ ID NO: 6022 - DNA, 908 bp, Heterodera glycines
aattttgagatcggaaattttcaaaaacgggttttgatctgaatcagtggtttccaaaattgcagaccctccctaaaaaattcgcaaatttcattagggctattttaaaattgccatttaactattacaaaatcccccttaatttttttgtaaactgggcacaaaaatgcgtataaaaaattagggtaaaaagataccgagtccgccctggatttcagaattacacaagattcgcatcggggtacataggtgaggcatcatatttttttcaaatggatacggttccggcttttccccaaaaaatcattaattgcttcattaaatgctaattagccaaacgacacggacatggcttttccccataaaaatgatcgatagagagagagtggaaaaccaattttttggggttggactccggcgggaggttggtgggctttttccgtagtgatcacagcgggacatttcacccctaaaaccgacacgcgccccccatccaaaatcccatcgacggtcgttggtcctatcgcattaaataaactcacacacacaaaagccctcaagggcggagttgtattggttatccccccccccccctggccaatttcagtcccgcaaattccgtccctgcagaagattagagcatcgtattataaccatgttcgttgttgttgaccaaatctaactaaattgatatgattagaatttcgaaaattatagacaggttgctctaattagcctagtaaaatttcgatgaaaatataaactctaaaataaattataataatttaaaatttgaaaaaaagattttttgcggattttttaatcaagtagcaaaagccttaacattgatttctacataagcagagcatgtgaaggatatcaaactcataaaattcggtcaactgaga

SEQ ID NO: 6023 - DNA, 1248 bp, Heterodera glycines
  unsure (1)..(1248): unsure at all n locations
cccccacccaccgcccagcgaacagtttgacttggaaaattttttgatgtttttaaatttaaaatattttaaaattgctgggggctaaaatcctcctccttccttaaaaaagagaaaaattaaaaagaaataaattttgtcaccttgggacaaattaaatgccaaaattttttgcttttgtttatcaatctttgtaattaacaaatgaccactaaaaattttttaaaatagtgattttgaaattttattttcaaacaatatttttttataaaatgcaaaaattttagatgtttttgcaataaataaaatattggtttttaaagtttgaacttggaacagaaagagctaatttgccgacgctgaaaaaattttattttaaaattcaatactctttttcactggcaaaactacactttaaaaacttggcattgccattttgccaacacttaattaatgccatttaacattgctgggtctaacaataattatccattttttctgtccactgccggaaatgttcgaaaattcggcatttgtccccgcgaagaaattggtgtgaaaatgggggggggggcagggatggctagtaacattgcaaattgaaggcaaatattgccgcccctcccccggggggagggatcaaaagaatctgccgacaccgtcgccccctccctcacataatctgcgcgataaatatttgcgaggccattttcgcccttcacctccctccccccggctccttccggcacgctttgttcaatgggcggtggtgctttatgaggctgtttagcctcggcttattagtcccctcccccccccccacgggcgtaatgagtggctttgtcccgcgctccgaagggtcaaattttggcacacaccttttgacgacacatttagaatttgttttgtttacattggatacaacatatatggaatgacccagattggttttaattttttgtcgaccatttgtcccaataatttaccatttgtcccattaatgccaaattttccatctgaaagggtttatttagtaattgtcggtggttgttttttttatcatttgtcttaatgactaatttttggcgctaattcctggatttttactatttgtcggcaatatgtcccaaattatttatcatttttcccaatttaattttttaagaccctcatttttattttcgaccttttgtcctgatgataaaagattttgaccatttgtccaanttattttttagatcttttttt

SEQ ID NO: 6024 - DNA, 1543 bp, Heterodera glycines
agttttgtgctgtcacagtgcttttaatttacataaaccaacttggactgttccacgtgaacagaacttccaaaggatgtacatctcctctttctcgttgaatgacatcccttggccaattaaacatcagtcgaaattgtaatgttcagatgcccgagagtctcgacttcgattcttctcgactctctcccgaacagccctataagattggcaaacgccaactcacccaaaaacggattgatattgtcgtggaccgcatctttgacagcggtcaacagcactaaatcttcgcgtaggaatttcagcggttgcttttgaacgaagcggcgatacgtcgcgtgggtattcactcccaaaatggcgtgctttcggtttccacctgtgctcatattgctcaatttggtattgccactggcgagggacaactgaaacaaaaaagggacgaaatcggaagaaaattcagtgaattattatcgatttaaagggcaatcatcgatcactgatcaatcagaatctccaatcaaccggtgattatcaattgattgatttagtgatcaatggatgattgagcaattgatttttagtaaagcaattggtgattgattgtggattaattatctgtgatcggtaaaattgattgatcaatttaccaatgatttggccgtttcttcgtcgattagtcgaaaatcgtcacagaacaagcgccacgacattttgttcaacgcgcgagtttggctaaacatggccaaaaaatagttaagtcaaccgtgaccaattcccaaaagtgaccaataacggcgtaacatccaagccaaaagaattagcaaaatcaaagccaaaatcgtgacagcgatggcaatttcgatggtataagagcaacgctgaattgaggggataagcaggaaatgaatgcttaaaagtcattattacaattcattacctgacccctgaagccgcaaattggctcatccggtggcaaagaaccgttttcggaaggccaaaagccggtcattacatcggccaatttcttaattagtaaatagattaggggggaggggcacttaagccaaattgaaccagatcgtagcatccgcttttgttgatcagcccatcacaattttgcacgcggtaagcggtcatttggaccattttcagcactttgtcgcggtttggcgcgataaaaaaggcggcaaattggggggccctaaaaagcgccggtttcgtcagttcctaacaaataagcgtttgtttgtccaaagtgtcgtccacctgtccgcgaggtcgtccatttgtacgaatccggtggacgcggcaccgacactgccaatgccttaaagggcggcacaattccctttggaaagtccgtcaagtgccaaccctcaaaggacagtcttctcatggcattccaaatttggtgtccgtccaacaccgcctccgtcccatttccgtccatttccatcgttttgttcaacacatgacgcgctgccaacgcgtacagtttcagcgagtcgtaaaggtggaggtaggcaaaagtgtttgtctg

SEQ ID NO: 6025 - DNA, 2147 bp, Heterodera glycines
agacggcttacggcactcatgaactcgcgagttaattcacgtgtgtaggagaagatgcacaccaccactgaaagaaaaatgagttgagtctggggccaattgtcgtgccattcccgtctaaattcacctcccccctcccccactctcttcttaaatcgtactctctctccctctctcccccctttgtttttcattctctctctctctctctctttctgtctgtctgtctgtctgtatcaccatcttcctttattttttcattgtctctctacgccttcccccaaagtcccaaaattcaacgatttctggccctgtttgcgcatctgtctcgcccccacaatgctttagtccagtccgattcatccatcgacaaaccaatcaatccaccgccccctcccattgctcaattcgtcttcctcccccgcccattcattagccgcttcatccctctctttccaaattcaaagttgaattcgtcctcccctccccctcatttgctgctgttctgcacctcttcccctcgggtaaagatgtgatgagttccttcctgctcatctcttccttccgatgaggtcattccccaaccccccccccttccccaatctcttcagcccctcctcagaatcccttctcctatcgatgcttcttcctctcctctccgcccttttgctgctgcttctgcctcctttccatcgcttccctttggcccaattcgcttccaaaccgcgtgagtaagccctttgcccgtttctgtcacccccgttcatctgaacaaaccatttcagcacctctctccccaaatcccaagcctaagtctcctcttgccgctgggcctttgttgctgaaagcatgctgtggcgacaattgtgaggagttccaacggcccgaggaggtacaaaaagatgacaataggcaattaccgtatccctttgcaattcagatgtacggtatcacttggtgggttctgttcacactgactttttttactcgggcaagaaaaattgccgttttaaagttgcggcaacgaaccaagcaaccaattcgaggaaatctgttgcgacaatgtgccgagaaggtaagtgccgacgagttcgactttggaagccgtgtcattgttaatccgtgccattatttccatttcctcaggcgtcgccagccctccagcttcatcgaccgctgctgcggcgaccaaacccttgcctatgaccagacttgctgccaaggcgtggtactcatataattatggcaaagcattgtttaaaagttgctgctaattgctcttagtccaggtgcacaacattccctcgggcgaatgctgcggacggatggcctacccgcggaacagcttcaacactttgtgctgcgaggagacgctgatcaccaacgtggacccgtcgctgatttgttgcggtaattacgctaattatactagtaaaagccaaaagaaagtgtcatcaattttaattatatttttaattggacattagcggatttttttgtgtgtccctttggcaggtaaaaatgcgtacgatggcggaaagagggaaatgtgctgtgggggtgccgtttatctgaaggaactgttcgacgggtgctgctccatatacgtgagacgagtctcagtagataatttagattttaaaagttttagggtaaaaatccgccggagtatcagcagttcagcagccgaacccaccaatgttgtgacaaacccatcgaacggttcggcacaatcaaatgctgctacctgaaggactcccagggccgcttcttcccgaagagttacgactcgtcaaaacagtgctgtgcctatccgtacaacaaaataacggcaaaaaatgcaaagggaaaatgcacggactgaaaatatgccaaaaccgaccctttgttacttattccattcccaaagcccaaagtaaattttggactatttattaattaattacccatgccgacgaaggcattcattccatattttattattattttattgtcgaattggttgtttgtcagcacaattgtatgacctaactaacttcagtttttcttacgattagctcttttttatatttctttctctttgctcctccaaattccctctttctctccccccactgatcaaattgccgaatttccaatccccggct

SEQ ID NO: 6026 - DNA, 772 bp, Heterodera glycines
tttacctgtgtttgtcacaatggccagctaaaataaaaaaaaccattaaaaatcgtttaaaattggctttaatccaatcgattgcttatccccctaccgtcccccattcttcgctttctcgcctttttccaattgtaatgctccaccagtctaatcagtgctcttgcgatcgaattgctgtttttcgaggaggtgcgggccaacgttttgtaaatgttccggtcggacaccgccgtcgtcgttggcatgtacgaaatggcggggatgttccagaaagagcacattttggccaccgcttcaaactctgttcaaccaatcaaacccaacccaatctgtctctgatcatttgccaactcaccactggcacaatacggacccaaaaaggctctaactttctgaaaaagtgtaaggaatgttctgcgaatggcattcgaacctctttgtggtacattgcggccgcaacagcgaccccttcgtacgaatcgccgcaggcggcgaccgattggatactgtaagaggaggtaaggctaaaggggggagacggtaacacctaagaacaggccatttgcgagcggaattatgtacaccagcgacacattactgctgatcgcgatcatatcgctaattatgttatttgcgttaaaattggatttttagttttggcttaaaatcaaaacaaatttctcatcgtaaaacaaattgaaaaaagagtctgaggactcattcagatttggaaaaatattttaattttaacgacccagggacggtcttt

SEQ ID NO: 6027 - DNA, 1449 bp, Heterodera glycines
ccccccccccccccacattttatctccgatagggcgcctcccatcccgagggggcgcttaaaaggaaatggagaaccagccaaaggggtcagttggatcagtcgggagcagggctggccgtgattgaatttccaatcacggaaatccgtgagccgtgatcacggggctttaaaaaaatccgtggcccgtgatccgagatcacggcacccccaaaaccccgtgatttccgtgatccgtgattaaaaatttttttttctaatgattttttaatttaaatttatttagaaaaacggaatttaatcgctggaaaaattcctaaaatatattttaaagaaaccaaaacacaatccgctttttttgctgcgtaccttttccaaaaaatgactaagtttacgattttgagcaaattttttgatgaaagttagagctttttgtagaaatctccaaggataaattttattttttaactaagtttattaagaaaatttttcaaatttttcttaaatttaacgaaaaatctatttatatagagaaaaaaatcagaaaaatttcctttaatttgtaagctaacttttgatgctgaacaaaaaaatcttttggaccaacatgatcagattactccttcatggcgatctgaacaccccaaaagatacagaaagtggggaaaattttagaaaaattcatagggtgtttggaaaatttttctggaaattttgattaagcctttcattataatttaagcgacggagagaaaaaatagggatttttagccgtttttgcgacaaaaatgggttattttttgctattttggggtcaaaatttcaaaaataccggtaaaatgttccgtccgccggtggtgccgacaggcgccgccgggaaaaattttgaattttgagtgaatttcttaacagattttgtccaaaatatgtcaaatcattggttaatttattggtctatggacgttttaaaaataaagaaaaataattttcaatgttaggaaatttcttattaattaaatttcaattaaaattatcaaaacaaaatataaaaattctcctatcccaatggtgaattgaacccaagagatatttatttctctccattagtcaaacactcgaggttaaatgatcttaaattattttaatcaaagaatttccaatcgcgcgaaacaaaaacaaaaaaacaaaagaaaactcgcccatccaatcgtttctctcctccaattcactgttatcacttgtcattttcggcttttacatttatgtacaataattgcttaattagctttttggttctttcgttttcctttgtgcgtttcgtaattttaattttggggtcattagtgagacaaagtgaaaatgaggcgagaattcccagcagaataaccgggggggggggggggcggatgacgacgcgcttttttggtgctttctctccggcagcacttta

SEQ ID NO: 6028 - DNA, 965 bp, Heterodera glycines
gaatttccggggggattatggggggaaaagggggggaaaaggggccaagccggaagattagcgagaaagtttatggtgaaatttccccccaatttctcgagataaacattaataatatttttttttttgtgatttttttattattttaatttttaaataagtttgtggagagacaaagtgccaacgacaggggacgaaggccgaattaaattttatgagagaaaactgagcagcagcaaaatatggcaaaattggaacaaatggaaattgagcaacgaagaagcagggcaaaggtggtcccagggagacgggagacgggccaaatccgatcccacccatggcattattcactccccccacccaaagtagcaaaaagttaaatcaaactaaattaaaatttttgtactttttgtgggaagtgcgcggacgatggcaaagaaaagaaaaaatatccccccccccccaaatgttttcgttgtgtacgtgcacatgttgttgttgtctcccagtttatgtgcacaggtttcttttcgaagatcgcttcgatatgtctgttcttttcccttttctgtccgacaaatcaatccgaaaatgaatttctgtcagcgcaatttccaaatttccatcatttttcccctaaattcaattaattttttctagtctctggcacaggctggaccagatgctgaaagacatgggtagtatgagacgttcgtgtgtgtaaatgccaaaagtcgtgtcatctactctgtttttcggcatttgcctctcgctaaagtgccaaccgaagaattttttctctctattaattaattattattttcacatttttgccagccataatgctggcggctatttccattaattttatttttattcgcgctaattttcgtgaccaattaattaattaatcgatgtgcttggtttgtacgcctaaagcggcgccagtgatttgtcgcgtttat

SEQ ID NO: 6029 - DNA, 4433 bp, Heterodera glycines
tatcatttcagcaattttccgatcactcattttagatttcctatttttatttgccaaaattttttcattttttccattttttcattcaccgttattctttttttgtgaatgccaaattgtttcttccatttcctaatgacagctctttttttggagaccaaattctttgatccattttttaatataattttgggttgtgcccaaactttttgctatttttgtgttaatttgattcaattctttttttggatattttcttcctttttgcttaattttctcttttattttataatattttcttattatttcccgtttcttctgttcattttgcattttttgttctttttcttcccatttttctccaaatatttcatcaaatgacttttgttgcaactttttctcttctgattcaattggactaattagggcaattaaaattaaaattaaacagataatatgaataaattcatttttccggtatgacttatattcccttatatgaatttaaattttattttctttaataaatccacattttagtttagtcgattaagagccttttattcacatgaaaaaattacatctctctacagatctccggcaaaaaattgatttaaaaaagaaaaaaagatgattatctttttttctactctatttattaaaaaaagaaaaattaatttctttttttttggaaaatatgtaaactgataatccgaatgtgagtgattagaaaatttcaaaatgatgaaaattagtggttgacaaatgagcgtaattttgttgttcagctaaaaatttattagcattaaggcaaaatgccttgattggaatctacaataattccaaatattgaatcagggccagaatttttcaggtaaaatgccattaaaatatttatataacaaatccccatttaaatttcgtgtagtcttcttttttctaaattgtgtatcataaacttttgtcattttttcaatagtcttcatagcccatataatcgagctgttaattagttaattaattaattacaaatattgaattaacttagtttaacttttttaatgtatagaattgaaaaattttcattattttacttattgacaatatttttggtcaatagattcgaattttacattaataaacagggctgcaaaaaatatacacgaaagttgaaaatgagccctcaagcacaaaatttcgatttttgaggccctgtaacttttgaagcaggcaaaatgcaccgctaaaattaaaaattcacactagaagtcgatcctgctctatccaatggtatatcatttatatgcaatttcctagtcactgtctcggagatgttttcccctgtttgtttgcattattaaaaattgttcaaagaaaaccaaaattttttcttttcaaattcggaatctttcaaaaacccgagaaagaaattttttaactcgaaagcatccaatctcgaatttttgttgtaaaaattcggggtttttagtgaaaaggaagagatcatttccccaatgtatacagtacatagttagttctacagtacctcgtcagtgtactgtacgattccggtgatgtttgcctggagcaaaatgcaatacattcggtggtctttgacacccagcatcaaagcgtggccagcgccgagaaacaaaagcccgaaatagcacacagccagactgtaaaagatggtcgacatacctcggcctaaggcggaggaaattttttgtaaaatatttttttattaaaatattaattaaattaatttttttttacaccctcagcctccctcccccgtattaaaaccttgtgaaggagaagccattttaagttggatggatattttttttaaaaataatgttgtcttgataaaaaaataagttaattttttattattttgaaaaagcaatgtttataaataaatagttgtccttatttctaagattgtcctttctttttaaaggaggggtaaatttcgctaacataattaattattagtaaaaatcgtaattataaattgtccttatttctaagattgtcctttataaaggatggttaatttttattatcattaaaaaatagaaagttttatttataaatagcgtataaaattgaaattttttagtctagaaacttttcacgcttgaattttgtaaaattttgaaaaacgataatttttgggcaaaatctattagcaaattatgatcaaatttagaaattcctttggcaattagaagagagcaaaccctcccaaattacataataaacaaaaaagcaaggaatagagtgagagttgatcaacgaacacttctctgttgctcctcaattacctaataattagataacgggcgaagaaagaaactacattttagtgaacaacaaaatgatgaaaataatattttgtaggctaaaaatcgtggatgagaatgatgatggacagaagagagagaagagaagagaagagataaactcctcctcctccccccgccccaaaaaaacgaaaaaaaaatcaatttcatcgattcatttggtgaatgggattaaatataatgaatagatagagagatataatgtaatgaaaatgtgtggatagcggggacattggagaacacttttctttaagggggcttttaatttttaaatttaaaatccagtgttttatattacataaatttggaacatttttccgagtttgtgttgcttttaacaatttttttttatgtttaatttagaaagccaaattttaggcgtttttaacggaattaccccctccccccccaaaaaaaaaaaattaattaattaacttaaatgttgaatatgaaaaagcaaattaaaacattaagagaaaatttacaacgaaaaaacacgagatccaggttttatcgagtatattcaagaattcttttttgtttgttgctttttcccataatttagttaaataaaaatttaatagacttcaaagctttagttttcgttggcactttttcgttttttttttaactttttttttcacttattttagataccaatttttacgattttatgtactttaaaatccatgcctttatgagacaactttaagaagccatatttttttttctctgttcgtcaaatttaaaaacttgttaacattcgaaagctctataagtttcgaaattatttatgcgacttttataagcgattaaataaccaataaaaaatttaaaattgaaaactgaaaaaggtttttgtcaatttttatttttaactgttttacttctttacgaaccattgtcaattttggttagctgatcaagttttttaagttcttttgaatgataccatgtttacttggatctgatcaacaaagaaaaaaaaacttatggcttcttaaatttgtctcattgtcagacgcggttggcccgtttcgtttttagacatccgatttttttgaattcaaaaatgacggaacgccatgtcatgtatttgctgttgcgtgccgatttgctcgacgtgttgcgctggccccttggcgcggtgttcacgcaaattgcacacgcggcaaccgcatgcatttggacgttccgcgaggacccggaggttgccgcttatatgaccgacatggacaacatgcacaaagtgacgctcaaggtgggaaaaatactcaaaatttaatgaattattttaaaatattataaatatttataatttttaattattttaagtggcttttcaaaaaaacttttttgccaaatatttgcaaaattaaataaacaaaagggtctaccttttaaattatttttttgttgaaaattttatatatcaagggtcaaaagtaatttttatttctgagaaattttaagccttcgaatttttatttctgaatttttaaaatccccgaaattgtgattttcgagaaaggttcacaattgcatcacttgtatctatttcatgattcataaaaaaaataaaagaataattaatttctaatgaattaagcagttttgtactaatttaaaaaaatgccatattttgcaattttgtgtcgggattttggtccattttttatgtctatctatcatttcgagatttaatattcaaataattcaaattctttacttgaaaaataagacattgttggtcaattagtttttcgatcatctctaaggtgccagatgagaaaacgcttttggaacatgccaaacggttggctgacgaaggcattgggcacagagtttggcacgaggatggcatggctgtttgtattgcggtgaagccgatgccgaaacaaaagctgaagccattccttggcaatttgcctttgtacaaatgaaacttattcatgaatgatatctgtctgattgcttattatacttttttggtgaattttaaatatttggacaaaaaaatgaattgaaaatgaatttcaaatatattaaaaaactgttgtgact

SEQ ID NO: 6030 - DNA, 3155 bp, Heterodera glycines
agtcacaacaaaaacacaaaatgatggctaagtaaagaaaagtacattaaacaaaaataacttttttcttttaataaatgtctataatttccccgtcattaaattttttaataattttatcataatttattttaataatttattttatttaataatgttttaatactaccaaaatcaataaaaacagtaaaaaattgattttttttaaatctatttaaaaaaataaaaaaactgtgaataatttattcatagcagaatgataatcattttataaaaaattattatccataaaatactcccgaataaatgaatttgtagcttttgatatttataatattttttattttttataaaattgaatccggcaaaatccgaccaaattttgatgaaatatttggcaacgggtggaacacaaatgaaaatgaagaaaagctgataaaaattgaacaaaatgaaaactcagaagttgatcaaatgggtggagcaaatgggaaactagccaaatgatcaacagaaaaagaaacaattttaaaatttgatgcaattaaagataagttaaaagaaaaggggaaaaatcaatggaaaaacaattcaaaaattgagatgaaaactgtaaaattattaggcataagtcgcgacaaaatatacaaatggaaaaaagaaatgaatttaaataaaaagaaaattatgaaaaagagtttttatgaaacgaaaaaaaaagaatttattgaaagatttgatgaatttaaaagtttataaggataaagcaaacagaaagaatttgtgaaggaattgggcatttctgaattgacatttcgaaaatggaaaaaggaattgatggcaaattagcataaaagtaagagaattttagttttacttaaatttttatttccaagcatataattcttattccaatgaggataaattgcaaaggatgaagcaatacttgaaaatgaaagaagaaaatccaaaaattagtgacgaaacaattactaagaaattgggaattggaagaacatcactgattagatgacaaaaaattttaaattaatatttactctgtgatgttttgatcaaaagagcattgttattgttatggccttgaataaaactcatttcttaaaaaaaaactcattcgaaaaattatagagactaaatttcatttatttcttatttcatttgaaaaacataacacatatttaataaatcgcttttaataaatgttaaacccaccaaattaatataaaaaagggagtaaaaaattgattcagtaaaatgtaaatattctgaatgatttctttatatatatgattaccattttataaaaacatttttttattcaaaaatatttacgaatcaaaaatgtagagctttaatattatggaatttaataattatattaaccaaaattatagagaaaatggacaacaaaaaagaaaaataattcaaaaatttgaagcaattaaagaaaagtcgaaacaaaaaagaaaatttcaatggaaaaacagaggtaaaattgagagaaaaattggacaattattaggcacaaatcgcgacaaaatacaaaaatggaaaaaagaaatgaatttaaataaaagaaaaattatgaaaaagagtttttatgaggagaaaaagattgaattcattgaacgaattggtgaaaagacagaaagaatttgtgaaggaattggtcatttccaaagacacatttataaaatggaaaaaagaattggtgccaaaatattgtaaaagtaagagaactttcactaaatattttatctaaattaatttaagtgagacttttagcaattccttaaattgtgtcgagttaatgatttttatgctagggatgggatattatgagtaagaagataaaattttcatatccgtagctgtagctagtttcataaatatttccgaattgcaaaaatgaatttgtggcatttaatatttataatattttttcatatttttaatagtgaaaccggcaaaatccaaccaaatttcgatgaaatattactgcgaacgatgggacaaaaatgaaagagaagcagaaatgagaaaaattgaacaaaatgaaaactcaggggccttatgctcgtctcgcggtttagagctaaaccacggttaacggcgttaaccgtggttaaaaatccttaaccggtatgctcgtccttccctttttaaccgtggttaaggctaaaacacggttgagttaaccatggtttactccatccttaaccacggttacgcaaattaaccgttgtttatttccaatcgatatgctcatctaaccgtggtttcgtaaattatttagtaatttaattgtaaaataaataaataagttttttctaggataatttacatgcagaatagaatctgacatttttgtataatatacaaattattacggaattaaaattaacgaaataaatgaaattgaaatggaataatatatccaaaaatcaatgaacattgatattttaaagatccccaatattgtatcccaagtgatggcgcatttctcgatccttttccagcttcaaaagctctatttcaagcttatgcttctcaattgccaaatccagtttggcactttctttcaaacactttaatctgtaaatcgcgtgcagttttgttgatgattatgttggaaatatttccacaattttctttttttggcagacatgtaatcagcagcagcagaagcagtagaaaagtttcgtattttgctactgatcacgccgcccgagtgatgacgaatcggtgtcaagtctgtaaatgatggcggaacagcagaagaagttgttgcagtagcagaataagtctccgatctagagcaaaagcttgagtcgagaattgcagtagatgatttggggcgttcccctatggccaattaataaattagaaaaatggcaatattgagatagttcaatggggttttcgccaatgatgccaataattcgcgtgtcctccgccataaattgatcaaaaatatcaaaaaaaggcttccgctcagtcggtctcccactaccagttggtggcatttttgtttcagcaatgaagtttttgtactgcttcagcatgtttctgtagcgttgcttaatttgctcctgatcacgcactgatcgagcgtcctaaatttatccatagaa

SEQ ID NO: 6031 - DNA, 5672 bp, Heterodera glycines
ggatttaaactgatcgacaaagtcaacatgaatgtttttgaattctccccgatggaaacacatgcaaattcggcacatataatctatcgagtcacacttctgcctcaatcatccacacttgtcgaattgtcaatggccaatggacaagaagacaaagaagtcactgtaataggaagaaatgatttggatgagcaactaagaattgagcctactttaacatcttgcaaaaacggacaaatcgctgtgccgatcacaaacttttcgtcaattccaattacactggaagcgaatgaaagtgtcgcattggtcgagcatgtcgatgaatggcacgaattggaacattcgtttttccctccgttcttcgtcagcagcgtcacacatgaaaatgaaaacatacgcactgaacaaatcaaagaaatcttacgaactcgtattggccgtattggcatgtctcagcaacacgaagcggacaaattggaacgtttaataattggtttcgaacaaatttttgcactcgatgacagcgaactgacacaaactgaaataactcagcatttcattaacaccggcgatgcctcaccaattcgaggccggatgcgtccactgccatttgcacatcgtaaaaaagtttcgtcaatgctccaggactatttaagcagaggattaattcgaccatcaaaatcgccatgggcaagtcccattgtccttgtgccgaaacgtgatggaagcttaagattttgtgttgattatcgagggattaattcggtcacagtgaaagacgcatacccgttgccgaacattgattacatccttctcgcactaggaggaaagaaatacttctcgactctcgacttcctttcgggctactggcaaatcagaatggacgaaaagtccgttgaaaagactgcgtttgttactgaattcgggttgcacgagtttaccgttcttccattcgggctttgtaatgccgttgcgacttaccaacggttcatgtctcggctttttgaggatctgattaatgactttgttttcgtctacattgatgatattttggttgcatcagagtcgtttgaacagcatttggaacatttagaaattgtgttcgagcggataaaagattccgagctgaaattgaaaattgaaaaatgtcgtttttctgcctccgaattgccatttctgggacatgtgttaactcgccgtggtttgaaaatgaatgccgataaagtaaggcctgtcattgaactgcctttaccgtcgaccaaaaagcaattgcattcatttctcgggttcatgacgtattatcggaaattcatctatggctttggagagattgctgcacctctgtttcacctcctaaaaaagaacacaccatttgttttgggagagaaggaaatattggtagtcgagaaattgaaagaaaaacttcttgaagatgcggttctctatttcccggacttcaaaagcgcaatgaatgatgctgaacgatgtttcatcatcctcaccgacgcgagtaaaattgggatttccgcagttttgtgccaagctgacgagaacagacgagtccgtccaatttacttcgcatcacgtcaatgcagtagacacgaaagtaattattgcccaacggagctggaagctcttgcggttcgatttggtgcctggaaattcgcacaatttattaccggaattccgaccaaaataatcaccgatcataaagcgcttccgccaatgtttcggagtaagaaacaaacaggaaactctcgagttgaccgctggttaatggaattgaacgcacgattcactctaactgtcgagtacagtcctgggaaatccaacattgttgctgatgttttatcacggtccggtgctttaataagtgaagtcactgagaattttgacatggattcagcttttgtctgtaaattaaaagagaatgaaggcgaaaaaaatctggaagtggatgagatcggagaaaaagagagaatcgattgggtcgaagcgacaaaggtcagcgaattcagcgaaatatacaacttcttgcaaaaacgaattttgccagacgaaatccggaagaaacaaaaaattttggatacttttcataaattttccataatggatggattgctgtattttataccatcgaaacctgaaggaccaaaacttttcgtccccagcaaattcaggcaaacttttattgatcagcgtcattcgggaatttgttcgggccatttcagtggaaaaaaactttttcgtcaattgtcggaaaagtacttttggccaaatatgttcggcgactgcgttaaaacctgtctgagttgtagaatttgtgcacacagcagaaaaccccgatcaaatgaaccgccactccggataatccagacgtccgaaccgttggaacttgtctgtgtcgatattttatcgatcggaatgtccgaaaacggtaatcggtatgtgcttgtctcaatcgatcacttcacaaaatacatcgtcgcaaccccaatcccggacaaaagcaaagacacagtctcaaaagcatttgtaaaagattttgtgttgctgttcggggcaccaaaaagattccatagtgaccaaggaaaggaattcgtcaacgaaactctaaaagaaattttcgccattctaggcgtcgaaaagaccacaactgctgggtacgacccacaagcaaatggagctgcggaacgggcaaatcaaactttgcttaatatgcttaaaaagtctacgtcctcgcactggagttgggatgaacgacttcctttcgttgtgttctcgtacaacactacaccgtctgaagtcactggattttcgccatttcaactgatgttcggaaaaattgcaaattttccaggggaaatagactttaaaaagtatggaaacccgttctacaccgtggacgaggaaacatatttacaagcatttaaagaacatttgcagttaattctcgaatatgcgcgtaaaaatgccgaaatttcacggacggaaacaaaaaaccggtacgattctcgcccaaatgtgaccgcaaacaaatttgcgattggcgacaaatgcatggtcatttatcccggatcgaaatcccgaatacagcacaaaaaactgcattggaatcagttcgggccgtacaaaattgttaaaatgttcgaatcatccgcagacgttgtcccagttgataaaagttcagctgaaccgattaccgtcccaatagaacgtctcgtccgtgtaccagtcggagttcccgacatatcaacgctcccacacggaaaaaacccataccggaacattttggctactattttgcttgcaaatttagaaataatatacccaaaaagagaacaagtaaacgaaactccggtgtcgagtgaggaatgccaaaaaaggggaatcacagaaaactcagcagaaaatttcgatcaaaatcagttagggacaactgacattttaggtgggcggaagatgcagcaggacgaaagcgccgagcttatttggaccatgaaatgcgaaggcgaaagccacgaattctgtggaaaacttctgtgcgcggagttggacccggttttggacgcaaaaacggagcccggaaacgtggaaattggcactcctctgcaggccattttgtgccttttcatcctccgttccggtgccacagtctcttccgcggcggcaaaaagccttgttcatcttatacttggctctgaacccgggatggagttggtcgtttatgaaggagtccgaaaagacaacattcgtgccggtgcccttccacgagaagaagacgtagagaaaatttggtcaatgtggtgtgaaaagtgcgcggtgaccaaaaagcttctccaatcgtcaggatttgagaagattcgagtgcaaaattccgacggagagcccaaagaaaagcccgaaactattcaggtcgaaatgccggaagcggtgcccaaattgcccgaatcagagcgtgacggttggagcacattgttcgaacagaccgggtggattctggaaaaagtccgttccatggccattcatcgttgccgcacattggttgagactccacgagttctgatcggtgactcgacggctttccaactcctctccgaaatgcgggcacaaacgcaattcattggcaccgaacgagggctgttaactgaagtaatccgtccactcagcgagtgcgtcttctcaagcaaagtgcgcgccgcaatgatcatcctcggtcgtgattcgctggtcaaagacgagaccgttgatcagatcatggaacagtgccaacggatccaacaactgtgttcccgttttccgtctgtttcgttcatttggttgcctccaccgtacgttcgtcagtacgatttggcctatcacgaaatgatcggccgtctttctgaactgctcggcgattggtttgttttcgtgactccgtttggtaggagtttgattgaaatctggcgttatggcgattcctttgatcggagtcgtgtcaatgcagatggatggatgactgaaaatggcattaaagcattgtcggcgtggatcagcacacaaattccgaaatggccaaacaacagacaacttgggattcgaacggtccgctccagcgtttcggtcactaggagagtctatgggttgggtctatgcgaccgcccggagactgcggcttcttcttcggctcgtggggggttgggtctatgcgaccgccgcccgaattctcgttctcgatcgccgtttagacgccgcgacaaccgccaatcgcaaccattcgttcgaggaggacaccgccgagatgatgtgacgcgcgaccgccggcactagcttgctcagaccaccaccgatcggatgccgaatcaacttatcggcagggacgccttttctttggggggttgtgatgtgttaaatgggaaataatttggcttttctataatatttttcttctctaattatgtgccgtttcccttgcctctgactgccttttattcttttaattcaattctctaattatatgttattttccttttgtttttctctctaatttattcctatttttctcaatcgatattcctttgcttttcttctcccttgtgctttcctttattcattctatttggtgttcacaaatttggacctcagacttttctcctctaaatattttgtgtgtggactcttaattttcgtcgtcttcgcattgaatttaaattaaataaattgaactgtccccgactatttcgccgtccttaattaataagcattggccccgtttgtcctttctgtgctaattaattatttgacccgagaagaggaaaagccgaacgaagcaaagcaaaagagacgagcccctccgaccaattggactccaatttttgcacgagtatcggcgtaattattctgagaatgcggttggaattcctattactgttgagcagaaaaagagataaccaattttccaaatttttcccaaacaaacgcgccgagaaacaaattccagaacaattagtatcggcgtaattattctgagaatgcagttggaattcctattactgttgagcagaaaaagagatagccaattttccaaatttttcccaaacaaacgcgccgagaaacaaattccagaacaattagtatcggcgtaattattcagagaatgcagttggaattcctattactgttgagcagaaaaa

SEQ ID NO: 6032 - DNA, 5397 bp, Heterodera glycines
  unsure (1)..(5397): unsure at all n locations
atttttccaattaaaagaatggtctattgtgagcctgttgatatatttcaaggtgaagtgtatttgctcgctactcttatcgtggttatttttactttggctacaactgtaatttatattatcatggctattatgctaaagggtaaatttaattacacaattaaaaatatattactatataaaatttaaatgacggtattacaattggttaaaataatgcctttttattgctcagtgatcagaacaacagcaggaattcttcccagtcccaaattgaaattactcgtcgcattttcaaatctttggctgtgatcatgccagtgatcttctgtctttggtttttatccgctctaaccaacaactttgttgtgccgcgaatattcactaatgatcagtcactgcaatttttgatcatacgattagtggcacaattggtcacaattgcctgagcgattaacctacctaatcataatccaccagtcgttgttgtatctgacgggtcacaaattctccattcttcgaacaatcaaatgcaaaacaactgaaaatgtaaaaataattcttttttgaatatgttttactgttggcttaatgaatgcacaatttttactctctataaaagtgtcaattgcaccattttacattgaaaaagagctccgccgaacgaccaattctaactcaaaaattgaattagtcactaaaatattataaaaaaatttcgctcatgtataaaagtcagggtcaaatgctctaaaaaacaagaatttttctgtccattagccatgttaatttgttcaacaactaaaaaattatgttctaaaaaaagttagacgctttggccagctactttttattcgctcaagcaatcaaaattcaactcccttaaagtaaattattttgaatctctctagacataatacgatttttcgggtatttgggtcggaatccggcgagggaaaggaaattgattcggataagtggtcacaactttttttaagcggcaacacaaagtcaattttggtttataactttattttctgtataaagtattctgtataaaaattccaatacaattcttgtgttttcatgtctcgtattttgtttttattttggcaacatcactgaattgtagatatggtgctaggtcgaacctaaaaaagtattaatgatagtaatactcaaacttagatatttggcactttttctttaaatatttccaaggcccaaaaggcccggggaagggactgggccgagtccataattaggcttttcaattacggaaatccacaaccaattacgggagtcgaaatttggcggatttaagcaacggcccaacacggatagaaatgtgactcacaccagaagtttttttttgaaaaatttctttttcctaaaaaataaaacctttattattttttatctttttcctaaaaaataaaacacttattatttgcacaaaaataatcacgcaattttaaaagttgccttttgtcttgtcgacaagaaaatccgctacttttttatattcatccacttttttgtgcttgaatcatttttgaagtcagacaatttctctatttctctgccatatatggtttcatataatattgctttcacaattctatttaattgcgtgagaattttttaatcgtacataacaaaagttaattatcaagcaattaaaaaatttgtactcagagaaccatacactttaaaaccccatgaatcgaatgaattgcatcattaggaagcgatgcacatcagaaatttgacccaattaaatattttattaggctttttaagtactttaattaacatcaaattgctaacattagagcacgactgtaacgaatgtaattcaatttttttttttttgattttggtttattaaagtctaatgtgaacaacaaaaagttaggaggcataacaggcgaattatttcgaggggcaagtttcattttctttttatatttaaataaaattcaataatgaaatttcctgaggatatcctgatcccagattgaattagattttcatgcgtataatatttttaagtcccattaaattaccatctaattttttaatgaaataataaatcgactaatggataacaacagtaattcatcaccatcttctgttaatgagtttggagagtccgaccaaatttacgtgtacaccgtttgggtgacaatcattcaacaaattttgtcactttttggcattgccctaaacagtgccatcgtttacatcaccatcaagcacaagtaaagaatagatgcgattgggtaatagttttcaattatctttctttttaatttccacccccccccccctccgcccacttttcgtacaatttttcctcctcccncaaatttaaacaaacacaanctgcggccgctgtgcagtggttcatccgatttatctcagctgcttgtcatttcccattagccgccgataaaatgcaaaaatatggaaaaggcgttaattagaatttaaaaaatggtacaattactggctgattaaataaatttggatatcacttgtccaattcgtcattttgtccattgtgttttgtctgcatgtttttctccgcctgcttcttcttcccttctctatttaagtatttcctggtttcgtatgccgtttttactcgtctctccccttttggcattttgtccatttcggcattttgtgtgttttgtctgtatgtctattttttgcctcctgcttttcctctcccttttatcccctttagctgcttcttcttgactttttcctctctccccttttggcattttcctcccctctctcccccaaaatgcccttcccttttcggcattgcttttcctccctcctcctccatctaccgttgtttctgctactgttccatactattgctcttcatcgatgttcttcgatgactccgtttcccttctccgctccgtccgtcgccgtctgtcccatcactttccatgcccaggcaatttccactcgccaactctcttccgtcgaatttttcctcacaaagtcagtgggtggtgctttcatttattgggcgctacccgaaataaagccggctgctaatcactgatatgaaactcggctacccgacttttggggatttgcaacttggggacccgacatttggggacccgacttttggggatccgacacttagggatcccgacatttggggatcccgacattaggggacccgacttttggggatccgacatttggggatcccgacatttggggacccgacatttgggcaccgaacgacatttgagcaaaagacacttaagaaaaccacggacatttggcaacccgacatttagggacccgacatttggggatttcaataaaacaaaaaaaatttaaaaatttaattctaagccacaaaattagacaaaattacgtctgcttttagccagagttaattccattgcaaaaaaattaattaatattttaaaaattaactctgtttccggactcaccgcgaggaggcgcagaattttgagcccatactaaccacaacacaatagacaaaccacaatacattttttaactacagtagacctttttccaatttttatttaaagtgcctttcccaagggccaacgggaacagaaatccgtcaaggacattcaaaaagttccagccgactttgctgtctaattgcgtacagcaacaaaatgccgaggtcatcttttcggtttcttatatttcgagtgactttgttcggtgctttaaatgaattttttaacgaattaattttttgtggctgacctgcaaaacaaatctcttccactggtcgccctatttcggtatttatttttccaaaaatatatccagggttgtagtcatcaacattcacactgaattcataagaattcagagtgagcacaaatgggaaaaagtcctttaagatctgtttctcttcgcaagctaaaataattatatcttttcaaaaaataaagatttttaaccttttatttctactattaatttttaacgtatatttattaaacatttagccgccaaaaatgcatatacaactatttttggagaaaacctacaaattcgtttttgcttgttccacttaggacaggcaattaatcgtagattgaagaccgggaaacttagccactattacacaacaaataatgaatacaaaatcttggttcggagtttggctgcgctctcttttctggaggaaattcgagttgtgccagctttttacttgcttcgacacgagcgaatgagctcggcatacaagttgttccaaatgcaggacaaccagtcgcaatattcaattactttggacggtattgttaaaataaattggattgtttattcattatatccaagaaactatgtgcgtggtcacgatggaagacctccactgtttcctgttcatacctggaatcaccatgatagtgttcttcaggacttggggcgcacaaataacgcccaagaagggttccatttggctttaagaatgcaatttaacagtgtgcatccgccattatcgaagtgaaaatcgcgtttaatcagcttaatattttaattatcagagttatcactgttctgaaagaagagcgaatcgcagccgataagctgcggcagtatgagttggacccaactcaagggataagaattcgagaacggaagaaaacataccgtgaaaatgatttggctatcagaaatttggttgaaggctttgatgccattgagaacccaaacgaagatgagattcttgctcatctcagatcgttgcaatacagacttatgcgcaatgattttgagaattgggacgaccaaaatggtgattaattctgttttcacatcccgttggcccttgggaaaggcactttaaataaaaattggaaaaaggtctactgtagttaaaaaatgtattgtggtttgtctattgtgttgtggttagtatgggctcaaaattctgcgcctcctcgcggtgagtccggaaacagagttaatttttaaaatattaattaatttttttgcaatggaattaactctggctaaaagcagatgtaattttgtctaattttgtggcttagaattaaatttttaaatttttttttgttttattgaaatccccaaatgtcgggtccctaaatgtcgggttgccaaatgtccgtggttttcttaagtgtcttttgctcaaatgtcgttcggtccccaaatgtcgggtccccaaatgtcgggatccccaaatgtcggatccccaaaagtcgggtccacaaatgtcgggatccccaaatgtcgggatccccaaatgtcggatccccaaaagtcgggtccccaaaaaaattatcaaaaatttttagttacctagcctggtccggaaaaattctagaaaatttgaaaaaa

SEQ ID NO: 6033 - DNA, 2332 bp, Heterodera glycines
cccaaagtcgcaccacgatgaaactcattcttatttcccatttgatttttagaattctttaaaaaaagttttctgtacagtttacctgtaaagaaaatacagccatttgcttttgattcaattctattcttttatttaattattgagatgggatcgggatgggtccaataagtggaaaagatttgatgggatcagacggatcaaataggaaaaattttattaggatagcggtggtacgaccccttcagttgcaattggtaaaccccttatcgagtctttgtcggtgttggtcgggtaaatctgatcgggattggatttgtcaggctcccgaagatgttcccggcgcatttggtccgatttggctaataaatccattaattgagttagtttatttttaacagtccgtcggtgccgtccgcttccgtttgtgccctccaatgtgcccacaacacattgtgccaatcggccgtgttcaaccacgacacgcgcacctgcgcactttcccagcaaaattggcacaaccattgcaagggcagcaaagagcgcttcaaaaccttccatttgtccgcggacggagtcggtgttttgtccggcccaatttgtggcgatgctcgagagttttggcggttgcactttttaatcactttcgactctcgatttaattctggcttctcgggcatcgcttttccgagttcttcccatccctaacaaaaacaaatgcacaggcagacgccctctcattgatcacttgcattgagcagtgcggagcgatcggtggcacgcgggcaaatgaaaaagttggggaaaggaaatccgggagggggggggggaaggaagtgggagggggcgcaccccaaaatgtcgccggaagattccaaatctaaaaaatttctttaaattaaaaaaaaattatggcgccgaaggaactcaaaaacccagcttttcgaatttttgccatgatttcaaaatttgcagattaatagagtttttcaagtctttcgaacataccaagaatttttaattttttgaaaaaaaagttacagtccaaaaattcttccggacattttgtcctgctaccggctgggggggggggggaggttggtccaaaccccaaagcccaagcccatcaatgggcttgtattaatttccatgacaccccaatccaaatccatcgacttcgctgaaaggaatttcaaaaagccttttcctctgatcattccaatccgatcactaaccttcaaaggaaggcaatgacattgcgcatttgttgaacattcttcgcgcccgcggtgccatcgacggcggactccgttacgcgcccaccaatggcatgatcagtgccatggcagctgatcaaatttcttctcaaatgcgctccattgagccggttggcatttaagcagattggcacacaatgccaagccaattaaacaccttttgccaaataaaggaaaaagtgccgacattgagcgggaaaacaaggcaattggctgatcagcaacaatttccattgccagagtttctctcgctgcacgatggacggcaccttctcgataaagcacaacggcaggtaaaattgatcagagacaactttcattgatgttaataccaatgctgaatatgatgaagattagcaaaggttagccccaaacggattttggtcccattgtgtttgatcctttcctaaacccattttcggcattttaaagttccgccacttcaatctcggtttagtttttgccggacggaggaggaggaaaattgtcggaggcgaataaaagtgctggcgatcagaaggacggctttttgggtgccgtccgacaattgcatcaaatgcagcaaaagctggaaatgcttctgatgaatgcggtgaacagagaggagaaagtgatgccacaacgaactgtccaatggaaggccaatggcatcggagttcaagccgaaaatggggacggaaaggtggagaagcttaaaatgttaggtggggccgattaatcggcttaatcgtttcgcaatagagcatctaattaactaatcacttaattagtggcattgaaaacccaataattgcttagggcaacagccctacagtaccgtcaaagccaatttcacaattgtcttcgtcaattgcttcttcctccgttcttttgccgtcctccaattattcagtccatggcaataatccctcgggggaaaatgagctcataaacaatggcagcgattatcgggaacagcaaaatgacaccaatttcatcaaattgttaaagccgggtagggaaaaaaattggggggggggggcaaaaaagagacaattagctgaagctgatcaatc

SEQ ID NO: 6034 - DNA, 5325 bp, Heterodera glycines
  unsure (1)..(5325): unsure at all n locations
aaattacttagtgacgaaaatgtagtgtcgaaattacttagtgtcgaaaatactcagtgtcgaatttacccagtgtcgaaattacatagcgccttgtcaaaatgatgatatatgtgttntaaattaaatataaaataaaatagttaattttgaatttttcgacctttttagaattaatttttgtgacttttaaattttttaaaaaagagtggttttacatccatttttccatatttcgagatcagcatgtaactatgttcaccatatccatattcaaatattcatatacttggtacctatcataaatttgaataaaattgcttacacctacaaataaaattgaagcgaatggcgctaattcaaacatattttgattaccaaactgatcaaatttgatcaaacaaaatttagctttttcaaattgaaacaatatacatatatttggtcaaatattttaattttattgaataagaaagagaaggatatagagtgtgatatatttagttccaaatatacgttcacgaatttttaatacttaatctgcttcctgtggaccaatcgagttgaattttttgcaaaactcgaatttgaacaaaaactaaaaatccgaatttcagaaaagttcacttcacatgtatgcaacaaacccaattcaatccatgaaatgacaaaaaatatataacaaaaggcttccgataaacagtatttctacctggattcctcggttttgtttttgaccaatttacctgcttcgaatcgccaaaaattcccagtttcaattaaccctattttcgggtcaaaaatgagggcggttcctacattaaatgttttttttttactaaatacataactaagcgcgtaagcttcggcctaagcccaagcagtctaagtcttagtgcctaagcctaggcttaagcctaaagattaggcttattctaagcctgtgtggactgccgattatacgaagtgccaattgtcgaactgccataacactcatgttcttcgccttccccccactttcttatgcccataatcatagctaaaagttgggttttttctgattagtttcaaagcaatgggaaccaagcgcaattataacaacaacataaagtattggtgcaaaaatctgtgggatctcggcaaacgaacttcgcaaggcttggcaaactccgtcagcatgccgaacaacaatttgctgcaaactctgcgacctcggcgctcaaacgtcgcaaggcttggctttctccatcggcatgccgaactcttcatcatttttcagacttggcattgctttttcatgccggtaaaatgccgttttagtcgataattcatcaaaataattcccaattttccatttacaaattagcctgttgctgtgttcctccgcggctatcttcgagatgggaaattatgctcaatgcatatcagggatgtgccgagccagacaaaatccgattccgattatggcccaaaatccgattaattgcgattccgatttttttttaataattttttcccaaaaattttattcataatcaaaatcataaattttaagattgtgatgcaaaaataaaagtttctacacattctcaggcaataaacgttttctcagatctgtcacaatcaacccagcggtggagaatattcccagatatttgacatttttgctaaataacaaaaaacttgattatatcggggagaattaatccggcactgctttgtgagaaagatttaatttcagtcattatgttaaaataagattaaaacattcgtttcagaaaacattttttttcaaaattcattggtattctcactaaaaaaattccttcaaaaggtcaattcttaggggtgtaataattagggctgggatttttatgtgctaaaaatcctgaaatatgtaataaaatatgtgctaaaaaaacccaaaatatgtgctaaaaaccaaaaaaaggcctaaatatgtgttaaaaaatgcaaaaatatgtgctaaaaattggaaaaaccaatggtatttttgcataaaaattccaaaaaactcattctttatcatttttgcccgcacaattgcaaataaaaaacatttggaggtgtttgggggtaaaattagtccttttttgataaattgtttttaaagataatttttccatcagttgagtaagtgccagcaagaaacttcgatatccagtaacgaattaatgaagaattcgattttcggtacacgaaataaataaagaaaattttgaaagagcctataaaaatggcaagaaagttgatttttaggggtgcatttttgaattttttgtgtttttcttagatatttttttcaaaaatgccaaaatatgtgcaaaatatgtgccaaaccccgaaatatgtgcgatatgtttttatgtgcgaaaacgccaaaatatgtgtttttatgtttttataagtcgctctaaatcaaaaattgttcggagaaaatgctatttttgggcttctctcgccataactaagccgcaaaaaaaatatgttaaaacataaaaatcccagccctagtaataatcggatttcaaggcaaaatccgattacgattatccgattccgattatggcccaaaatccgattaattgcgattccgattcggcacatccctgatgcatatcatttacagcatcattttgtggtgggaggcggcggggaggggtgccaaaaaatcgcattagtacatttgtatccgtttttttttgtccaatttttcaaagattgaaaatatctgacgcatattttctttcataaacgccttctggactggtcagctgaggacaactcacaatcagcttttttttatttttcaaaataatattttaatttataatacattttttaaactgacaaaatccgtatttttaataattttaattaaaataaatcttataaaattaaaattaataaaataattagtagaaaaattctgataacgaaagacaagtgttaaatataaaaaataatagtttattataattaaaattaaaccaaatattttggtttatattatttagttaaatttaattattttttaattttataattattttgtaaattgtcgtaaagctgatcgatcgttcattaagtcttagtttggtggtatgaattagatttttgggcaacattagctccctcccctttaaattagaaccccacccccctaaaataaagcacctattcgatgggggttgaaaaataaagcccccgggggctcttattttaggaaatacggtaattcaattttggtattatgcaaattttgtccccatttgcacagctttttcctctgggtgcctggtgttgtacacgcattttggtactgcttcagcggcatgttcaagagaacggccccaatgtgatctgaaaaagcggagttttcattttgggtttcgttccagtttcatcccagcagacacttggttggccgtgttcgaattgcttacgccggcgcaaaacggactcgaaattgcacttatcagtccccgatttgagtgccgtgtgaacgaacacttcaaaacccgcaaatgggcattgggacaaatgaaaattcgaagcaaaattggaaaaaatggcgtgaaagaaatggaaattgtcaattccaatcaaaaatcgctgccaataccgaaaataccgctgccaaataaagtcatcggattcaacagcattgcaatcgagtggaaattgaactgaccaatgcattgtgatcgtgttccttctttttcagttatgtcgaccaaaatgtcatcgcttttctccgccgttttcatccactgttggcccatttgaacattaatttgtccattgcggcaatggatggcagcatttcattgtggtttttgcgcacccattggccaatgcttcaagataacattggcggcctgtcttttgccaactttggcattggccgcttccgccttatgcatgaacacattttcgttgatttgcctattgacgaacgcccatccttcgccaattgtccatcgcttcgcgttgtccaagtcccctttgggcaccacttcttccccgactttccgcccgataacagttcctccgcaaatgatggacaatcactggcgcactggcttttgtcgcctcggccggacaattcgccaaaattgtcgtctgtgctgatctatctgaatatggaagacaaaaaatagaaatgcttaaaacggtgttaataattttatgcaatatagtcagttttttgtaataatttatgttatttggttttagcatttcgaaaatgccacttctgctgtcaattatgttattgtatttactttggcccttggcgtcactgtggccccttttgaattgtttaacaaacgtaccggggaaaaaatgttcctttcaagagtcaaaaaatcgcgcatgaagcacggttctgctcgtcaaatgttgttggtccgctgcccgattaaccgcgatttgaatgaatgggtgtgatgtgaaaaggaggcgattgactggcaaatttgtgaccaataaaacaaaatttttgatttaatttaccgtatatataatttaccctttgttgatttttggtcataaataggtaaataaatcttttatttaattcaaataaaattcaaataccgtacttgctcgattattgcccccgggggctctattgttcaacccccctccgaaagggggctttattcgagaggggggatctaatcgaggggggggctttatagttcaaccctttttttacaaaaatctgacaaaaaattgtgtttttttggtaaaatttttgccaaaataccaaaatttttcagtggtattaggtaattaaaaatgttttttttttcattttcggcaaactaattttgtgcaattttttagaaatatctactaaattttcatttaaaattctaccaatacctaattgtcagggatggtatatctgaggctttagcctcattttgtggtttttttaataggtcaatgaggctaaattttcaaaatgaggctttgaggctttttgtggttttttgagaaaaacctaaaaataaagaattttttaatgaaaatatgctaaaaatatggtcaaaattcttaattttttccccggcggcgcctatcggcaccgccggaccgtaaaatctctgaatttacaagcaaaatttgcttaaaatcgcaaaatttggtcatttttcggacaaaatctgttaacaaatcgcattgaaaattacaaaaatttttcccggccgtgcatattggcaccgccagccccccttgttccccaaaagttttttggaaaaagcgccgcaaaaaaatcaacttcgtttttca

SEQ ID NO: 6035 - DNA, 1615 bp, Heterodera glycines
caaaaaataaagaaatttacccagattcttttatattgtgtcaaacccgtaaaattagactttttgacaaaatctgtttacaaattgcactcaaattttcagaatttctccggcgggcgccgggggggggggtgaactatagtgaacgccccgtgaaaaaaagggtgatataccaatcgattcgtctcgagtagctacgcacggaaaaatatgtctcgagttgcgaaatgccaaaaaaccgggttttgaaccggtttaaaactcgaaaaattgagtgaaaacttgagcctcgatatggactaaaaacccctaattattttttaagaattccaaatctccacaaccagatagctaatctaggtagcgaagctcaagaagcacgaagcgctttatcccattcccagagccgacggttcacgcacccgctagtttatatataactaaagaaacaaggcaactcatttccaaaaacaaaatctcctacggggcgggacgtagggaggagttcgaaatttcgaccttggggacaactttttgaggcgcatctgggaaactatagattttcgatccgagggccaactgagcgccaggcgccgaaaagtgactttttaattttgcttcttcaccgacctcgtagggcctaccagtttttctgaaaaactggctaaaaatggcctacttttttgggccatttcagcgccggcggaataactcgccggggtttgattggaggaggtcggtgtaagcggcttttttgtagagcttgacgagctctatccaaccatgttttcggatttagaaaatttcagaaattttcgagctaggccccctcgaaaattttccgtttttgaattttattattttttgcagatttttccgggcaaaacgaagaccactttcaagcaaccgtttttcatgctctatcgattggtgtcattttcagaaaaaattttcaaaaattttttggaaatagaaaatttttggttgctaggcctcaatttcagttctggcgcaataactcgtcaggagttgattttatcaaaaaatcgtataagagctttttagtagagaattttaagcgcaatgtaatgtgctttatctcatgtttttaacatgagtttaaaaaaagttataaaattaattgtgattttgaaactcaaatccatagggggcgaccccacggttttgcatttcaggaaaaatagtttttctcctcaactacctacctccataaaaatttcatggccccgacaatggaaagcacttttatatggtagttttaagcgctgatcaagaatctgacgtcaaaactgcaaaaatctatgattttctcaatgattcctttgccgcgacatgacattttcatggggggtagcaaaacttacaagtacccgacaacgaaccggcctttgccgcagggaatttactacctcaatgacaatgacgacaaaatgatgacggattcgcgattcatttcctttaccatttattgcctcaccaaatatttcggattcccccacatcaattgttgtattcttcagcattttgctctcttgcccttattgtccttttgtgtgtccaattgttgttgaattctttttttttaaatctaact

SEQ ID NO: 6036 - DNA, 4014 bp, Heterodera glycines
  unsure (1)..(4014): unsure at all n locations
cccttatttaaggccttagtttggactttttcgcgcttaaaaatccgttccctagtcatcattttgcaaaatattctcctctgttgcggttccctttttcttccaatccgtcgtcattttatgccaaaatgtttccgcgccttccgtttttgtcaatgggttttcgcctcccattggcaacaatttaagacgaacaaaattcaaaaattttttggataaaatgtggttttctgtttctttcatccaaagtacaatccgtaaaaaataggaaaccctaaaaatccaggctttatccaacgcaattaattcttctgctatttgtgtgacatcattcggaactcggccaaaattgtgctaattgccacaaaaatgaacagacggtaaaaggattttaaaagccaaacaaattagtcatttatttaactaacaataaactgttttcccacttcagttggatttgcaacgacgtttggatggacattttcccctcttttgaccgtcctcaactcggcctcaaaatggcacttctttcgccacgtttcaatgcgttggtggacaaacatttcgatggcaaaagcgaattgacaatttggagaacgatcgtaattcgtcgcaaggacaaaggaccagaaccgaaactgactgtatggttcgattacaaatttgtgccatttccattgcccgacgaccgtccgctgcccagcaaaatccgttttaaatgccttcggattaagtaattcaaaatcagatagctatgacaataaaagctttccttccattttcacagttacattgatcactccgtcatcgcttttcttcgttcaaatcaccaaatttttgagaaaagaggcaccaatttatatttgtcgattccatcatcacactctacgaatggccagcggatttgggatgtttttgttcgtgaaatttggccaattttttcgacaaacattcaccgtttgcgcattaccggtcgtgatcatttggacaatttgcttcgtcgcacttcgccaacaattctcaccgatctcaaccaattggcttcaatcgattcctatgatttgttgcccgctgcgattggtgatgattttgatgtgccaaattcaacaatttctgctggccaagcattgtccaaatggttgcacacgccgagaaaagatggacaacccaaacgattgcattgcaaagacattcaagaacaaacgaacttcgattggatcaacaatttcaaggaggtgtggtccggggggggggggggggagcttcaagttttttattttctgaaatcggaattccgaccccataaacgtcgtaagtcggaaatttttgaaaatttccgaattttatcaaaatttcggaaatccgaattctgtgccatccctgctggtttggctccacatttttggcaaatgactgattgttgttttccaatcaaattgtttagcattttctccgtgccaatgccatttcttccgtctgttaccaaattcatttttctgttcatgtgccgtcaatgcaagtgccatttgaattgcttaacgaatggacaaaggaaaagctgacattgaccaaagcaaatgaattggacaacagttggataatgaagcgttgtaaaattattggggagtccgcggcggttcagcagcagaagaaagatgataattgggacaacaattgtaacaatgtgttcttttggcttgttgctggcactaattgcattgggtgagcaattaaaaaaagcatttgatttttatccgaatttgaattgcgcttaatttttgccattgccgccaccggaagaagtggaagaagaagcgggacaaagcatcacaaaagggacgtcttctgctgacaatgagtgacggataaaagaacaaaatcaatgagcagacgcagaagaaatgaatattaattgaaaatgaccgagcataattcatcagtgatcaaatgtattttatgaagaaaatcctctcaatttcggtaaataaatcggacgcataaaaatggcaaaaaagtcactcttattgaattttcgttgcacttttttcaaaacattttttgatgagttaaggactggcggtgtcaaaacgccagttttaccaagaatgtttttaatttggtcgaccttaacaaaagttatgacatttttttgtcgaaaaacagtacgagttggagcagtacgagttggagcagtacgagttggagcagtacgagttggagcagtacgagttggagcagtacgagttggagcagtacgagttggagcagtacgagttggagcagtacgcgttggagcagtacgagttggagcagtacgagttggagcagtacgcgttggagcagtacgagttggagcagtacgcgttggagcagtacgcgttggagcagtacgagttggagcagtacgagttgggtgtcgtccgtttcaggcatcccactgtccaggaaaaaaaatatggatttccatataattcccagcccaagtcataacttttcaaggagaaattcatacattcgatagatagcaaaaatttttgtgttatgcgtgggttgttaaactctgtaaaatttatagccggagcatatagcctgtgttccgcaaatcccattcaatgatttttgaaaaaatcattgaatttcccagggaatttcggcaaatttcaaacaatcgtattgaaaatagggcttatatttttagggttttgccctatttttttcctgagcttccagtgcaatgaaacgcataaaaaacaagttgtttttttttgttgttcattattttgtgcaaatctaagttgttatgttttcgtacattttttgccatttttatgcgtccgatttatttaccgaaattgagaggtttttcttcataaaatgcacttgatcactgatgaattatgatcgtccggtcattttcaattaatattcacttcttctgcgtctgatcattgattttgttcttttgtccgtcactcatttgtcagcagaagacgtcccttttgtgatgctttgtcccgtttgttcttccacttcttccggtggcgtagacaatggcctaaattaagcgcaaaattcaaattcggataaaaatcaaatgctttttttaattgctcacccaatgcaattagtgtcactatcaagccaaaagtacacatagtgacaattgttgtcccaatttttatctttctgctgcttctcctctttctccccaataattttacaacgtttcattatccaatgatcatcatcggtaaagcgcaaacagcgaatgtttgtcgaaaaaattggccaaatttcacgaccaaaaatgtcccaaatccgctggccatccgtgctgtttgaataagtaatccacaaatgtaaatcgatgcctcttttatcaaaaatttggtgatttgaacgaagaaaagcgatgacgaagtgatcaatgtaactgtgaaaatggaaggaatgcttttattgccataaagctttgatttttaattactaaatctcaaggctcttaaagcgaattttgctgggcagcggacggtcgggcaatggaaattccacaaatttgttagatttgtcatccatccgcacagatagtttcgtttctggtcctttgtccttgcgacgaatttcgattggtctccaaattgtcaattcgcttttgccatcaaaatgtttgtccaccaacgcattgaaacgtggcgaaagaagtgccaatttgaggccgagttgggcatggtcaaaggatgggaaaatgtccatccaaacgtcattgcaaatccaactgaaatgggaaaacagtttagtgaaataaatgaagaatttgtgacttttcaaaaatgccttaccgtcggttcattttttggcaattagcacaattgggccgagaatgatgactagggaacggatttttaagcgcgaaaaagtccaaactaaggccttaaataaggtaaaaggttagaaattttctttgtcaaccaaatccaacatttgttggtagcaaaaatgngagaaacaagggaa

SEQ ID NO: 6037 - DNA, 3068 bp, Heterodera glycines
  unsure (1)..(3068): unsure at all n locations
taaancaatttgattgggaaaaacaaaaatcacaaaaatgttgggccccacctccttgaaattgttgatccaatcgaagttcgtttgttctttaatgtctttgcaatgcaatcgcttgggttggccatcttttctcggtgtgtgcaaccatttggacaatgcttggccagcagaaattgtttcatttggcacattaaaacaatcaccaatcgcagcgggcaacaaagcaccggaatggattgaagtcaactgatcaagatcggtgagaattgtcggcgaagtgcgacgaagcaaattgtccaaatgatcaccaccggtaaagcgcaaacagcgaatgtttgtcgaaaaaattggccaaatttcacgaccaaaaatgtcccaaatccggtggccatccgtggtgtttgaataaggaatacacaaatgtaaatcgatgcctcttttgtcaaaaatttggtgatttgaacgaagaaaagcgatgacggagtgatcgatgtacctgaaaatgggatgaatgcttttattgtcataaagctttgatttttaattactcaatccgaaggcgcttaaaacggattttgctgggcaacagacggtcgggcaatggaaatggcacaaatttgtaatcgaaccatacaaacagcttcgtttctggtcctttgtccttgcgacgaatttcgattggtctccaaattgtcaattcgcttttgccatcgaaatgtttgtccaccaacgcatcgaaacgtggcgaaagaagtgccaatttgaggccgagttgaggacggtcaaaacaaggcaaaatgtccatccaaacgtcgttgcaaatccaactgaaattatggaaaacagtttattgttagtgaaataaatgaagaatttgtgacttttcaaatgccttaccgtcggttcattttttggcaattagcacaattgggccgagtccgaatgatgagacacaaatagcagaagaatgaattgcgttggataaagcctggatttttacggtttcctattttttacggattgtactttggatgaaagaagcacgaaaatcaattttatccaaaaaatttttgaattttgttcgtcttaaattgttgccaatgggaggcgaaaagccattgccaaaaacggaaggcgcggaaacattttggcataaaatgacgacggattggaagaaaaagggaaccgcaacagaggagaatattttgcaaaatgatgactagggaacggatttttaagcgcgaaaaagtccaaactaaggccttaaataagggcgaaaaaaccaaaatttggtcaatgaaaaaataaatttatgtggaaaattttttgaaaatttgcaaaaatgtgatctcgtcaagaaaaattttcgaataaatgcgtcaaagcgaagaatttccgagcgaaaaatgtgtttttcgtgcatttctcgtcgagttaaagccgcagaaaaataagcaaaaacttaaaaatccgatccctaatgatgacatttgccgggcgttttaccttatccccaaatcaatcaattcgatggataatttttatccaactttcatttgtaaaaggttagaaattttcttcgaaaagtaccgatattgttagatttggcttacgaagaaaaaagtgaatagttcaaagctccaaaacatgccaacggctgacggattccgatgcattcataagcagcgaaaacaaaacaaaataaacaaattagatttttcattttcaaaccaacaaaaaacaaatcgaatcaaaacgaaatcgtgacaaaaaaaaggccatttattcaatcccaagtctccatccatcgtccgggttggtcgtgttcaaagagaatccggcacttccactcccgtgttgatcagatctaagcgacagtgacgactccgcttttattggggcaaatgctttcgcagccaatgcctttctgcgacgcctccgtataaagcacagcgtaagcacagcaagtccaatggcagcagcgatgagaagaataatagtaaagtttatccctccctccttttttcgaaaaaaaatgagaaatgcggatcaggcgccgttttcacgagttttggaactttaacttttttcattgtctaacaaatccaacaatcatggtagcattggatggcactagatgtcctctattagcctgcaaaatttcaaaatttttttgttaggtttcaaaacagttatggccaaaaatgtttgggcaaccagtttcttgaatttcttctggccacaacttttttgaaccttaatgaaatttttcgaaatttgcaggctaatagaggacacttagggctatcgaatgatacaaaaattgttggatttggttgacaatgaaacaaggcaaagttcaaaactcggccacacgaaaaaaagaaatgcaactgaccagcacaacaccacaatagcagtgccccattcgcttaacattattataaccgttttttggtcctttttatggcattttgtgattagttcactttttacgaagaattttttccaaaaaaatgaccatttaaaaatttttatttacatattttcgtatatatttgggagttttagtacatatttaatacatatttagcatttttcatacatattttatgtacatatttcgcgatttttcttacataaaaaaagaatccctaataattaatattagggttcgagcgccgtgggcgggggtggcttttcgcgagggcgagggttggcggcactatgggtactagagtccggtccgggagcgggatcgggagtttaaaattttccggtacgggagtcccgaacgggaatcccgtccatttttaactggagtcccgggcgggagcgggagtaattcgaaaatttataaaaaatcacaaaaatatttttaatgcacaaattggaaggacacaatccttttataaagaaaaatatacagaaaaattttgcaagcggtcgaaaatcagaaaaatttttcaaattgcttcaaataaatattttttataatttattcgaacaaaaaatttattaactttatatattgggactccctttattaattttaacaacttttt

SEQ ID NO: 6038 - DNA, 6695 bp, Heterodera glycines
atggaagagcgagagcgatgatggctcatcgattagccgaaagtgaatttatgctaaggagtttttaaatgataatagaaaatgaggactatgcaaataatatttaaatgcgtgattttgcgggattaagccccggcgggatctcgtctagcaaaaactttaacgccaatcccgcagcagggacccgcaaatttgaaattttcaggatctaatttctaccggcagttgagtttgccggtgtttgctggtgcagctgcggtgtattagccgccgaaaatgcggcaaaatcacggtgcagtgaagagcgaggcccgcgcacacagtccgtcactttggcacgctttcgacgaggggagctgaaaaaaatggtggataattattattaaagtaaaaaatccaaaaagggatactgtaatccttgtacagtttgattggcctttctacccatccatataagtatgatcaatatagctaaaaaaaacaactcttaatgatcagcaagtagtgtcatacgttatatatgtaaccaggtcgctgtactttttaattttttgtgccggaattcaaggtttcgaaaaattttaatgacagaattttacggcaaaattttaatgacagaattttacggcaaaattttaatgacagaattttacggcaaaattttaatgacagaattttacggcaaaattttaatgacagaattttacggcaaaattttgagccttcggttagaaaacaattctattagcttttgtacgcactcatcacaatctgccgatgatcgatggcttaagcgtaacgggtaattgttgtgctgttgcgattgtttgtgatgataataatgcccatttgtaggagaacattgtgccgaaattgcggaatttctaaaaaaaataattaattattttccattttaaatctacattgattatggtttcattggtgatgttaattaattaattcttagaaagaattattggagtacaaataattcgtaaaatgattagcaaattcaattttaattactcggtaattaaattcattaattaaaaaaaatgattttaattatttcgtgccggcaaataaaaacactactgtatgatacagtcaaatgtccgtacaaattctgttggtccgacattaagttgtgagcggcggcggcagccattgtggactgagttggcacgggcggaggcggaaaaataccacttccgccccgggaagttggtgccacggtcgattgtgccgcggcatttgccaaaaaagctccaatcgcagtggaaaagaacggattctgctgagcggcactgaattttgtaatttattttaatatgtgtaaaattttttttgaatattttcttacgcgaataatgtcgcaacagctgctgaattcattgtttgcattgttggcacggaaaaccatggaaaagtctaaagaaaaaattttgataaggcaaattttggaaaattcggacccgttttgggggaaactccaactcgagattcccggccaatccagttattcccggctaattatcggcgatcaaaaactatttttataaccaagccgatcacaatcccaaaaagttaattaattattaaccgagtttggcaattgcgccattccgccacccccacgcattgtgcacgatggcaccaccattgacgatgccaatgaaaagggtggttgtgatgcaggtggtcggcatgtgccagctgcggctggcacaaattgcggttgctgttggtcgggcagtaattggtgctgctgctgctgctgttgttgctgtctagtggcggctaatgccaacgcggctgtccataaacgggcctgaattggccagaaaaaaatactatttttgggggattgtcaatttattagacctgaatttttttttttgaaaaaattttgtgattttaggggaggtctatttattaaaatttaattttttgtattcaattttaaattggctgttcggaatatggaagattttgaagggtgctatttcattctctccttaattctcgggaaattaacccaatttacttaaaaatttattttaacaattaaatgtaaagggacaggaaaaagcatacaaatgcaaaattgattaatcaggaaaaagatgtcgcttcttcttcacccccaattgagtgagcggtgcgccttttatagaggagcacccgcaggggaagggaggggcgggatgaatcatcacatgaatttaaggaaaaatgatttcaaaataaattgatcaaatggatcaatttgggtcgctttggcccatgagataattattaaaatttaattttattttcgtctctttttaaattcacaattcgaaatttggaagattttaaaggccgctattttcctcccccgggcataaaaattttattacgctaattagggcgcttgcaattttcctgttattaactgactttacctgaactgcttgaaattgttgttgttgaaccgcattctggtgttgttgctgctggcattgttgcgcgtactgttcgtcaacatggtcacggttattgtccactgacgaaccgttggaagcggatgaggaggatgaagttgtagaaaagtcaccgaccacctgagcgattaaaaataaattgaaattaaaaaacaaaaaaaaaaaattatttgtgtcgccacgctcactttgtccacggcaccggcacaggccccggccaactcagttttcaaaaatcgcgcaaaatagccaaggttattgtactgtagctttttttcgcgcactgacgcatcatcctcatcaccatcatctttttgaagttgaccatctgctgatgactcctcctcatcagctaaatttgctaatgaatgttgtcaaattaaacggtgaatttttcgagattgatacaattttatgcgccaacattgtgaccaaaaactggactctaactcaagattaaatcgagacataatttttccatatgcttaatactaattaatactcgagactcttctcagagctttaaatttaattcatgccttcaagcgggaacaactgtggtgggaaatgtgtgaacgcattcagcggtgttgtgctgctgaggattgtcatattgttgttgtccataaacaaattcaccttaaaaaaatattaaaatgaaaaaaaaagtttaaaaaattgaaaaatgattttcttactttgttgttcatttgctgccgattgatcggacccatttgttcatcatccgctccttcttcgccttcgtcatgacgcttgttgaacgctgaattgacaaaatatgatgtctctcttgatctgattacgggctattgatcagaatcagagaaaatgctaattgaattatccctgagttaagtgatcggacaatactgattgccaaagactaacaaacacataaaactacaatgatcagcagcgatttagacggatcagattagcttagggaaataaattaactatctagcagataagataaattgactaatcagtcgctaattaaggctgaatgatcagattaagcggcatacaaatgataatggtttaaaaattcattaatcaatctaaatttgattatttctctgccccaccttgagaatgttgtttttgttgctgttgttcaacagcagcagttgtttctgctccagctacatgttcttggccatcattttctgtctgcataggctcctctttgattcggaccggattaaagctttttcgacgtgccgacgatgaagcggatgccgaagtggaggaaagtgcccaattgttattgcttttgcaaatttttggctgttcgttagcaactacaacaatgacattggcaccaccattcaaaattggcgacggttggcacgatgccaaagcaattgccatttccttctcttttaaaataataaattcttgtttttgggctaatttaaaataattttggtttgacgctgcaaattttgaatcccgaaaatcttttacccattttcccgagaaaattactggccagttttttttatcactctaccgtatccgtcagcagtacagtgtcgtccatttgactgctgttgggcattgctgttattttcaaaactgtccatttccgccaatttggcgatctgttcgaacaaacattcgccattctgttgctgtttttgttgttgtacatcattgtcttcactgtgttgttcaccatctccatcgccatgagcagatgcaacagatgatgatgaatatgaagcatttgaagaaactgaagtgatgattggcagcggctgagaccagcagacgaatgatggcggaaaatggaggtccttaaggggtcaaaaaattaattaattaattaattatgtcactaattaatcgccccggcaaaaaaaaacgctcccaacgccgaaacggtcccgactctcagaaaattttccttgggggggtgagggtataaacgggggggggggcggggttgagtgaattttcggaaaatttttccatggaggcgaagtttaaaaggggaggggcggagtgtgtaagacctgtccttgtttaaaattagtagtttgacaaaaaattatcgtcatcccctcactctgatcactctcaaagccccagatcccgagattctcgaggcaattaaaaaacacataaaaaggatacctcctccccaatttgttctaccgttttgtcctcgtcttctccatgctcattagtgacaggttgccgttctccctcatcttccccctcctcctcaattgttacaccatttttgtgagaccaaatttgttgtagggtaatgatgattcatcattacacaaagacattttttcagggaattttctgtcgctgtaataattaattagggaattaattagaacgttcaacattcacggtattaccggcccgtaattttcagccatttttaattagaaattcattagatcggccaatattcggggtacccaggaagttgcaaattaatgtattatatgacaccgacacatctcggaaatgggattgttgggtgggcatgtcgggatcagggtaaacccaaataaaggtcgggaatcgggttaaaagcgcgaatggtcagggatggaagaggggtcgagaccaacgagatcaaacacagttcaacgcattaggtgttcaacaaaaaaagaattgtgatggtttctttctcaactgtctgggactcaatttcagacccgaaatttcccaccgattttattagaaattaattggccgatatctcgggaattaaaaatgggtcgagagcaaacatcgtttaacgcatttgactattctacaaaaatttcttcctcaattatctgagactcaaatgtcggcctctacattttccaccgttttttaaaatttttttgcaaataaattcatttttttggatatgaattgtttttcctttttttaaaagaaagaagcacagttattattcgttcattcattcattatttcatttattctgcagatcatccatcgtttaagtggtggtcgtttttttcttcgatgattatttatgcaaatgagctaaaatagggtgctgaagacgaagaagaagaagaagaagtgggagaacttcttacacttacttatgtatgttgtgtaagtgtgtcaatgtgaaaagaaaaaattgtccaatccaatgtaattaatgccaacaattagcactcggaattcattaagttttttgacatgttcaaatttttcatcatttttaattataaaaaaaatttcttcttttcaaaaaagataattaaaaatgaattttctggtgatccgcggatcagggtaaaatcaatcaaacaagcgcggctaatggcttcattaaatagagccgttctataataatttgtttttaagacaatttgatattagaaaaatatgaatggattgcaaaagaaacttgttatgattttagtttacccaccaaaaacattgtctaaacaatctttcggttatttaccggcaagtttaatccttaaattatggacccaaagaaatgcaaaaactaaaataaatttaaacaaaattaatgaatggtaaagaaaaaaaatgatccgtggatcataaatttaaacaaaattaatgaatggtaaagaaaaaaatgatccgtggatcgggtcaggtcaaagaaaaagcaaatagcataggggtcgctgaatccggtctttatgcatacgggttttggtccgcggatttgggctcgagatccctgtctcggtatagtccccgccaaaatactcggcatcccaacaaatcccagttgcggtaccttcaacaacactggattcggaatctcggggaaatcccggtcgggatctaaagccctcctccctccattacaaccccctctccataaagttccccctttctctgggtattgaaaaagagccccaggagcggagtatatgccaaatttcataataattttagacaattttatttcttatactgattgctctgctctgatcacttccctcacccatttctcacaatcagcaacaaacaccagcagattaggaaagattgtgtggaaagaaaacacatagaagatggagacgattttgtgtcggtgcggtggtgcggcgattattatgggattaggcgcgtagcgccgcgggggcaaccaacaacaacggagggcggcggcgtattgtattcgaggggaggcgggggcggggggag

SEQ ID NO: 6039 - DNA, 2629 bp, Heterodera glycines
ttatttatttttagaaggaatacaaaaaacatttgcttttgaaattccttcatcgatagcgaaattaatggatttttagaagaaaattgcactgccctttctgttgctcggcctaattacccttatcctttcacaaaaatggggtgacttttgttttattgcatataattaagggacggacggagggaaagcgaaaagaaaatgcatttaaaataaatgatttgaaaaagttttttccaatatttaattgtgtaatgcgttttaattgctttgtgctttgttctttaattaatcccccgcccgcccccaattttaccccatttatttgttcatttttgaacagaaacaaaaagcattaaaaatcaaaatccattttattcgatcagcaacattaacgcaacaactcgctaaagctaaaccaattaacaaaaaagcacacaattaaagaaaaggagcggagaaattggcgaagagaagcaaaaattaattgggaggaaaagaaaaaagttgaaaaaaagcgaaaaagaacattaattgattctgtggtaaattgaaaatgggaggaggtacaaaagcgaagccatgccattcattccatctgctgaccatggccaattccgtctgatcaggcatattttaatggccataacttttttttctaaatagaaccaaattctgctgacattatttgaaagttcaattaaccattaaaagaaaaaaattgttttaaccaaatgaaaaagaattaaaaaaaacatggatatcaagttaatttttttttgagttacatattaatcacttcatgcgcatttattagcgattgtttatttactttgtttttgctatgtaaagatggggaacatttgttcacattcctccccaccgtacgccgatgaaaataataatcaaatttaattgctatgaatgggcaaaattaatttgggcctatgaaattataataataaatctgccgttgggtgtgcccgagggtatgccgaaatgagtgaaatggagtaaggggggggggggggggaatgttgtggttgtggtgaggccaaggaattattaataaaagctcttccgccgaccgttggtaatgaaatccatgcgatgagcaatcatcagagaagaagcagaagcacacccattcattcattcaacagtttttttgtggatctttttccgatcaaaacactaataattaacataattaacacattaattacccaatcaattaattataggtgggtgatccggtttaggaggtgagtgagtgagtgaagtactttaagtgcataatatagtaggaatccaagcaataaaaatttttgtatttgatgtcagcattattttattaattgctacagctgtttgctgattagtataataacagactgatgtgatttgggagtaaaactgattaaagccatggctcaattatcgaaattgccatatccggcagatcaattgatgaaagttcagtaattaagtgatcaacagcagatgttcatttttacattcaatgttttctgattaaaatgataagagctaattttggggagagctttaaacgatcaattgaatcgaacagaaatcctaattagagttaagaaatgtatcaaatgaatagtgatcaggaattaaaaactgaaaagtgatcggggaagaattttaagaaatttaatagctctcgttgcagcaaaagaccattcacttatttatttattataaacaaaaatgtcattttcatcgtcatttgcttgtcccccccccctcacattttctgctgctgactgttctgttggttctttattatttgttggagcagcaaaaattggcggaacggacggacggacaaacgggacggaatgccacccatttccgttacttctccgtcgttttggtaaaaaaaaatatcccaaacaaaaaattacccactccaagcaatttggatagatgaaattatcattttcacactaaaaacaacaatttttcatattttttcatttgtgcggtaaagtaaattgcgaccaaaaaataatttggattttcgtcaaaaattttggataaaattttggcattttgtaggtttgactaccccaaagaggttttttttgtataaatatttgttaattctttgtgaaaattcataaataaattatttaaatagaaaaaaatatatataatcatttgagagaaaagccaccataaactcagttaaacattaaaattctaattttttttataaaattagcaagtagaaaaggtaaaaattgcttcaaagattgtttaaaagtgaaagttttctcacttaaattccattataagccaaaggaatttttctgccgcaaaaaatgaagaaaaagccgccgttgaattgtgtgaatgtgtgtggccgacggtgaacacaaaaaaatgggggagagactttcttaatcataccacaattttactgatctgatcgctgtcggagataaaggaaaaatgcggaaaattggaagagacaatcactgacattgatcattgaatggttcataaaatggacggtttaaggcgaagaaagtgattgatagggggggggggatagatagatgtaaaaaggtgaattttaaaattaaaaaaaaataaa

SEQ ID NO: 6040 - DNA, 1614 bp, Heterodera glycines
  unsure (1)..(1614): unsure at all n locations
taatgaaatccatgcgatgagcaatcatcagagaagaagcagaagcacacacncattcattcattcaacagttttnttgtggataaattagtctttttccgatcaaaacactaataattaacataattaacacattaattacccaatcaattaattataattaattcataattttctttgtctgcagtcttttctcgctctcttttccaatacataagtatgatatgaccaaatcgtccttcctccgaatcggtcgaaacactggtcaatatcaggcgattatttcgtgcattaatctcacaaatcgccgcggattaatcagtctcccctcccccggccgattaatccatcggcggacagtgaaaaaagaaagtgacggacgaataatgaaataaatgcatgacaaaatgcaaatggacacaccagtaaatttgtatgcacttatatcattattttttatcatttaatcattaacattttgaaaattcattttgcttttgcttcttaaaataattcatattttattaaatcaaattaaaaacagaaattgtaaaaatgcattggattgattccctttttcccttattatttccttttttttgctctgatttgtgaggtctttcgtttgcctttgcttttgcctttctccgttataaaatgtttgaaaatgcttcgccaatgccattttattttcatttcattgaatgttccgtcttttcccatttctcctcatttattactttcgtttctttcttatcactttcggcagattatgcccatttccctattttccccacttccttttcacttttcagaatcttttgttatttttggaaattatgcaaattttgttgatgattgccattttggcaaatcgttccaaaaatgggcggctaattggctacgggggggggggcggcataccccgcaaatgacaagagcaatttggccaattcggacagatccattcaaaactttcacgtgccatgatggtcattcgcgttgcccattaccaaaatgccatgtcggcacatttcctcccgtccggtacttccaatttcactttcattgccccgggcgggacaaaacatccccaaattggcagattcactcattcattcattctcaatccaagtggcttcatcgagaatggtcacccgtcggtcataatatgcgagggactgagcgagcggcggagtcgccccgccgggggggggtggagggaggagaagctaacaaaacacgcagtaaaagggagggagcggagcaaaggatgctgccgctgctgttgagtgtctctgtccgccttccaatctctcgctttagcttatctatcgtcttcctctctctctctctcactctctctcaattcctttctctctctttttccctgcggggatttgcctgctgtcgtcgcttctttctcttctctagcaaaaccattcgataatacaaacatccgccggccgcccaatgtgcacaacgcacaattgacggcgttcctattacaatttaataattggaaagtgcaagacgacaaaacaaacaattaaaataaaattatatccataatagtattataatgttaattaattacctaatttcctaaatttt

SEQ ID NO: 6041 - DNA, 1192 bp, Heterodera glycines
gggacgcgtaaaatgtcacgggacgtcgtacaatttcacgggacgcgtaaaatgtcacgggacgcgtaaaacgtcatgggacgcgtaaaatgtcacgggacgcgtaaaatgtcacgggacgcgtaaaatgccacgggacgcgtaaaatgtcacgggacgcgtaaaacgtcatgggacgcgtaaaatgtcacgggacgcataaaatgtcacgggacgcgtaaaatgtcacgggacgcgtaaaatgtcacgggacgcgtaaaatgtcacgggacgcgtaaaatgtcacgggacgcgtaaaatgtcacgggacgcgtaaaatgtcatgggacgcgtaaaatgtcatgggacgcgtaaaatgtcacgggacgcgtaaaacgtcatgggacgcgtaaaatgtcacgggacgcataaaatgtcacgggacgcgtaaaatgtcacgggacgcgtaaaatgtcatgggatgcgtaaaatgtcatgggacgcgtaaaatgtcatgggacgcgtaaaatgtcatgggacgcgtaaaatgtcatgggatgcgtaaaatgtcatgggacgcgtaaaatgtcatgggacgcgtaaaatgtcacgggacgcgtaaaatgtcacgggacgcgtaaaatgtcacgggacgcgtaaaatgtcatgggacgcgtaaaatgtcacgggacgcgtaaaatgtcatgggacgcgtaaaatgtcacgggacgcgtaaaatgtcacgggacgcgtaaaatgtcacgggacgcgtaaaatgtcacgggacgcgtaaaacgtcatgggacgcgtaaaatgtcacgggacgcgtaaaatgtcacgggacgcgtaaaatgtcacgggacgcgtaaaatgtcatgggacgcgtaaaatgtcatgggacgcgtaaaatgtcacgggacgcgtaaaatgtcacgggacgcgtaaaatgtcacgggacgcgtaaaatgtcacgggacgcgtaaaacgtcatgggacgcgtaaaatgtcacgggacgcgtaaaatgtcacgggacgcgtaaaatgtcacgggacgcgtataatgtcacgggacgcgtaaaatgtcatgtgacgcgtacgatgtcatgtgacgcgtaaaatgtcacgtgacgcgtaagatgtcatgggacgcgtacaatgtcactggacgcgtaaatgtcatgggacgcgtaaaatgtcacgtgacgcgtaaaat

SEQ ID NO: 6042 - DNA, 1036 bp, Heterodera glycines
cgtaaaatgtcacgggacgcgtaaaatgtcatgggatgcgtaaaatgtcatgggacgcgtaaaatgtcatgggacgcgtaaaatgtcatgggacgcgtaaaatgtcacgggacgcgtaaaatgtcacgggacgcgtaaaatgtcatgggacgcgtaaaatgtcacgggacgcgtaaaatgtcacgggacgcgtaaaatgtcacgggacgcgtaaaatgtcacgggacgcgtaaaatgtcacgggacgcgtaaaatgtcacgggacgcgtaaaatgtcacgggacgcgtaaaatgtcacgggacgcgtaaaatgtcacgggacgcgtaaaatgtcacgggacgcgtaaaatgtcatgggacgcgtaaaatgtcacgggacgcgtaaaatgtcacgggacgcgtaaaatgtcacgggacgcgtaaaatgtcacgggacgcgtaaaatgtcacgggacgcgtaaaatgtcacgggacgcgtaaaatgtcatgggacgcgtaaaatgtcacgggacgcgtaaaacgtcatgggacgcgtaaaatgtcacgggacgcgtaaaatgtcacgggacgcgtaaaatgtcacgggacgcgtaaaatgtcacgggacgcgtaaaatgtcacgggacgcgtaaaatgtcacgggacgcgtaaaatgtcacgggacgcgtaaaatgtcacgggacgcgtaaaatgtcatgggacgcgtaaaatgtcacgggacgcgtaaaatgtcacgggacgcgtaaaatgtcatgggacgcgtaaaatgtcacgggacgcgtaaaatgtcacgggacgcgtaaaatgtcacgggacgcgtaaaatgtcatgggacgcgtaaaatgtcacgggacgcgtaaaacgtcatgggacgcgtaaaatgtcacgggacgcataaaatgtcacgggacgcgtaaaatgtcacgggacgcgtaaaatgtcacgggacgcgtaaaatgtcacgggacgcgtaaaatgtcacgggacgcgtaaaatgtcacgggacgcgtagaatgtcatgccacgcgcgtaaaat

SEQ ID NO: 6043 - DNA, 1168 bp, Heterodera glycines
acgcgtaaaatgtcatgggacgcgtaaaatgtcacgggacgcgtaaaatgtcacgggacgcgtaaaatgtcacgggacgcgtaaaatgtcacgggacgcgtaaaatgtcacgggacgcgtaaaatgtcacgggacgcgtaaaatgtcacgggacgcgtaaaatgtcacgggacgcgtaaaatgtcacgggacgcgtaaaatgtcatgggacgcgtaaaatgtcacgggacgcgtaaaatgtcatgggacgcgtaaaatgtcacgggacgcgtaaaatgtcacgggacgcgtaaaatgtcacgggacgcgtaaaatgtcacgggacgcgtaaaatgtcatgggacgcgtaaaatgtcacgggacgcgtaaaacgtcatgggacgcgtaaaatgtcacgggacgcgtaaaatgtcacgggacgcgtaaaatgtcacgggacgcgtaaaatgtcacgggacgcgtaaaatgtcacgggacgcgtaaaatgtcacgggacgcgtaaaatgtcacgggacgcgtaaaatgtcacgggacgcgtaaaatgtcatgggacgcgtaaaatgtcacgggacgcgtaaaatgtcacgggacgcgtaaaatgtcacgggacgcgtaaaatgtcacgggacgcgtaaaatgtcacgggacgcgtaaaatgtcacgggacgcgtaaaatgtcatgggacgcgtaaaatgtcacgggacgcgtaaaatgtcacgggacgcgtaaaatgtcacgggacgcgtaaaatgtcacgggacgcgtaaaatgtcatgggacgcgtaaaatgtcacgggacgcgtaaaacgtcatgggacgcgtaaaatgtcacgggacgcgtaaaatgtcacgggacgcgtaaaatgtcacgggacgcgtaaaatgtcacgggacgcgtaaaacgtcatgggacgcgtaaaatgtcacgggacgcgtaaaacgtcatgggacgcgtaaaatgtcacgggacgcgtaaaatgtcacgggacgcgtaaaatgtcacgggacgcgtaaaatgtcatgggacgcgtaaatgtcacgggacgcttaaatgtcacgggacgcgtaaaatgtcatgggacgcgtaaaatgtcatgggacgcgtaaaatgtcacgggacgcctaaaatgtcacgggacgcctaaaaatgtcacggggacgcgtaaa

SEQ ID NO: 6044 - DNA, 3823 bp, Heterodera glycines
agaaataattaaaacgagaaaacacgaaacacacctttttttgagaatattcatggataattttttgtctgttgcttttagcctaaatttaggtatataaattctatagactttaagctttcgtttgatatcaagaatataggtaaccgaatagatagactaaagaatgagaagaaaaagggtaaaattgaaaaaatacgcacaacgtacagaatcatttttgaaggtattgtcagggaaaaagtcatgacgaatggaaaataatgaaaagtggcggaggagcaatcacttttatatgaatttactgattttactgtcttttcaatttaggtagtatacggtttgcattttccaattttcttgcgacgataaaagcaaattcactcatttttcgggtcggggtcacttcggcgcggccatactttgaaagaaaatgccaaaagttatgcacaatgaaagcgcaaattaacacttttttaattttttggggtttctaaacattggcgcctaaatatgcgcattttgcgcttcttcattatccctactttcaacttactgtatgggttttcttttttccttttctgatttggtttatctatgtccctttttaatgaaattttgccgccgatttgacgaacatttcaaaacgcgcaaatgtacatcagggatggagttccgaggcactaaaaattttcggaagtcggaagtcggaatttttcaaaaaaaataaaatataataaattttttttttaaatatttaataggctaaatttttaattttgtaatttttaatgtaaattgttaacaaattttgtccaaaaaatggaaaatttagcgattttgagcaaattttcaagaaaattaagtttttttgagtccggcagtgccgataggtgccgtcggaaaaaaaaatgaaaatttctatgcaatttattaacataaattgtacaaaaattgctaattttttgaaaaaaaaactcaaaaaaattccgacttttcatcaaaaatttcggaagtcggaagtcgggattccgaggccccaaaaattttcggaagtcggaagtcggaattccgaccccaaaaatgtcggaagtcggaactcggaagtcggaattccgtgccatccctgatacacaccatcccagaaatgagctcctttaccggaaaagatttgcatgtgtggcttagtggtttttgtaagatagtaaagggacaaagggtggtggttcgagtccgttgtgcaacatgaatattttcatttatttttgtccaaaatattaaaaaatgacgatatttgggaattatttttgaaggtttttgccaaccaaattggtccattgtattaattaaatttagttattttggctacaaaagcggatctcgattggggattttctctttgtttttcagaaattagtttttgctctcctcgcaacactgaaaatacgagattatgttggaaatcgttgtttttcagtttttggaattaaaatgagcttaaactgtgcaaaattatttgctgttatttgctatttaaataattaaagattaatataaattttaattatatagcgaatatttgaaataatatatattaaatacaatctttttgttattaatttttaatttttagtcataactttcttgaaatttaacgaaactttttgaaattttttaggctaatagaaaacacttagtgctatctaatacccgcgattctggcaaaattttaattgtggaatcgactctaaatatcgtttatagttttatttaatttaataatgctgtcaaatttacattttatatctactttttctcatctttctcctcctcccatcccatcattttatttactttttttttgggtcagcattttgcctaattaagaaaatgaaggagatgcaaattttatgagttttctgccctctgcttcgccatttgggtcatccatcattttgccattaaatatttgaacgaaaatccttcacagcaggaatgttttttacaataaaaaaatgcaaggacgtccttggacgaatgacgctttgaacggttctgaatattcatgtccaagggcggcattgaaacgtttgcggtacttttccctttagtgacctactccagaaattttttttagattttttctcggataatttaggattgaaaaaaacgcatctgctgtttattttaaggtaacgtacaagcagcagatgcatttttagcgcctcaaattaccgaagaaaaaaatattaaatttttttagggaggggggcacaaaagggataagtgccacgattgcttttcaacttattgtattttggaattttttatctattaatgaagtaatattctaaataaatttttgtgtgtcctttaaaagggattttttgttccattctaaacttttcttctttgacatgtttctcatttccatcccattttacttttttaggtcaacgatttgcttaatcctaaaataataataataattgtaataaaagaaaacgaatgaggaagttatgtgaagaaaagttttttgtccatctgttctccacccattttgaggtcatcactcagaaagtttaatgtttctccccacaaataagcaaaaaaataaaattgttaatattatttttgttaaataattcgtaaaaactttttcccaggattttggagtccctgatcacgaatttgatatttattttgaccatttctaatccccaacccgaactttaacaaaaattcaatttcttcatagcgtcgatttttgataaatcgaatgtcactttcgatcggtagcagttcatctgaggacgatttcacatctgatcaaccagaaataactgctgaaggtttaacaaaaaaaaatagaaaaacaaagatgaaaggcttagaaaattaaaaatccgtacgaaatttaatttaattcataatttcacaagttaatggcccatcaattacctcatggacaatcataactgataatcctacgacggagatggactgttcggcacaacagcagcagcggcagatgatgagaacgttggcattatcgccacggagaagccaagcagcaaaaatttcaacgccaaataaaggtggaagagggagaaaaaaagcaattaatatcattttttaaaatttaatggtactttcatagtttacaggctacttttagcatacattttcaaatgcatataaatgtgttttaaaatttaatgaaaataaatttttaaggggtttttgaggtcgctgatcacgaatccgggctcagatcagcgctacctttcactacatgagctgtacaggaacaaagaattgataggcttcctgtaccaataataccctcattggaaaaatgcccataagggaccatacataccattttcgaattgtatatttcctgatacagagttaccctgctgatgggtaagatgtcaatgacgatatcatgaggacattagttatatgattgttcgaatattcgtcagggtgtcaaagatttcaaaagatgcgtggtagtgttttcattcatctgctgctagattttatgtgaacaaaatttaactcattatgactgaatttgagcgccggtttttcccccccgaggttaattatggggtcggaccataattaaagttttgcaattaggtttaataaattctttgaaattttattgaatcatagaaaaacaaatacttttagcgatcaaaattatcaacattttcaaatctgataaaaagtcaaattttttcgctttcaaaaattaattacctccagaccaagggcgtaacccaatccttggcttcgggggggggggggg

SEQ ID NO: 6045 - DNA, 932 bp, Heterodera glycines
aggggttttcgaggtcgctgatcacgaatccgggctctttcagcgctaacgttcgctacatgagctgcacagggacaacaaatttactgtcatactgtatcaataataccctcattggcaagatgcccatgaggataccatccatacaattttcgaattttatgtttcctgtaccagggttaccctcatgggtaagatgccaatgaggatatcatccatacaaattttttatttttgttcgagttcgggtcaggggttcgaaattggcaaaaatgggtgttgtattcgtgatcagcgacctcaaaaaccccttaaaaattattttcattaatttctaaaacacatttataggaatctgaaaatgtatgttaaaagtagcctgtaaactaggaaagtaccaatttaattcacatcatcgaaagtttaagaatgaatcttttttaaattttataccaaatttcttctttttaacagaaaatgacaattggtgaagaaatgaagcagcaaaaagtgatggcacaacacattttattgttgcaggagaaagttgccaaaatggagcaggaaaaagagcaacagaagaagaagaaggaaaatgagaaatacggtaggatggattggattactgtaaaaaataattactgttcaatgaaccgttaatattttaattatttgaaagtgatttaaatttgtaaggtttcagtcgatcaattcatcaaaatgcaaaatgatcactttgctattttggaacgcatcagtgaattggaaaagcagcaactgaaagaacaaaaacagcaagacgagaatgggaaaggaaaatacggtaatgcatacggtaacagtgttaaaattaatataatttatttatttaatattaaaatcatttttagcttccgatcaattcacaaagttacaagatgatcagcagcaga

SEQ ID NO: 6046 - DNA, 2096 bp, Heterodera glycines
gacgggaaaatgaattttttttattaaaaattcaattttataaattttacttcgggttgctctccgactctatccgtagaattgttaatgtcatctgctgctgttctccgaatcggatgagagtgtttttttctcaactttatgaaaaatttcttccctggttgctccactgcattttttaaattctccagccatccccgacaaattatcggggaatttcctccccgatcctcggtttcgcccactcccggaggaccagaaattgcctatttaatttgcatttcttaaaaatttctcaatcattacaattgttttttaaattttccaaaaatttgagaaaaatgaatcaatgaaaatgatttttaaaaatacagcttacaaacggttgggatgccaatttctgtcacagtgacctcgaaataattggcaacgaatgtttgacggtccatcacattggggatgcagttcatggtaagttttcttattttgtattaaaatattagagattgaaatttgaaaaaatattggattttgtgaattgcgcttgaaatacttttttttggattactaatccggttccgaaatgcgcttagatccaagaaaaaagaccaaaaataatttagtgtctaaaagtaaaattttattaaaaaatttttttttagtatacatcaaaaatttggagagagaaacggaaagatttttgaaaatcattttacaataattcatttcaaattttttgtcaaaagagaggttaggcacttccgagaaatatttttttatttgctataattttcaacattaatttaatccaagaatgaaatcccggatatttatgtgaaaaataatcaagaaaacaatgacaggacacaattctcttgtccgagctctaatgattaatttacacatatatataaagcatttttcttcacaaaaggacaccgctccgtctatgcaaaacatccgatttttctgctgaaaaattatcaaaatgactcggccaacagtttttattttgaaatttcgatcaaaaaaatgaaaaagtaagaccaaagactgttcatttgttagctttaccttttctctaataattttcagttgtgccgctgtaggatttaccgcccataggcaagtgccatcgaatgcgtacctttacgctctcaacggcacttatgcgtacgttagcgatggcgttttgtggaaaaacggttccttcaccactggcactcacagtaaatgttcatacggtgctggcgatacggtcggatgtggcattgatttggccactcggaaaattttcttcaccaaaaatggcattcgtttgggtacgaacaaataaattacaatcacgttgttaagcacagggtcagacgatgtcggaatttcggaaatagagtaaaaaaaaaactaatttcaaaaattttttttattaacccaattaaaattaaaatctttattctttgaccaaattagccatcttgagaatttttgctttaaattttcaaacatttctatggaaaatgaagcccaattgaataactacataaattcagagtctcatttattaaatttatttacatgtttagttcacttaattaatcaattagtaaattttcagatagcgtcgatttgcgcctttatctttccattccgtctgatgttggccaactgttcccattcgtttcattgtgtgactctgatgacaaaattgagacgaactttagcaccaatttcatggccatcactccgacgacgattaacaaaatgtggtcgtccataattcatgaacttagtttccgcattccgacgacgagtccgctgatagatcttactggatttcttatcgttatctttttggcttttgcgcttggtctttttttaagtctttttttttgcaatttttactaaaaaaacatttcttctaaccattctcagttcaccgttttcatgtaatgttacgacattttttcttgttaaataataaaatgatggacctaagagattttccaaaattgtttagggggaatgttttgaatttgctagttcatgaatgggtttacccagaaaataaaaaggataaaaaaagtaatcgttgggcc

SEQ ID NO: 6047 - DNA, 8328 bp, Heterodera glycines
cgtaaattctgtttaattttttgaaaaaatgcaatttgttcagctcattgtcagctcagccaactcggcgacaaaatgaccaaataagcgaaaacgggcgacatcaaaacgggggacaatgcgtaaggggagaggaaaaggccggacaaaaatttgggagagaaaatttgcggggttagcaccaacggggagagcacaatgggcgacatcattgacgggttcagaagggccggggtcagcaccagcggggacagaatggcggggtggaagaaatgggaggacattatttgcggatttaagatgaacggactcaaaatctgggcaaaaatggaaaatatgggttttcaaattaaaaagaaacttacgatactgttcaaaaatcctaaaaaataaatttaattattttttaattacatttttaatcgacctggcgacaaaatgaatggctgcataattattggagtcagaataatggatgagaagataaacggagacaacaccaggggcgtcattatacgaggcgacaaaatccaaaatgattaggcaattaaacataattaaaaggtgaatgaattaacgcgaaccggaggagagaaaaagcgaggcgacaaaattgcaggtcaaaagatgtgaaaataataaataaaagcaattagacaattaagccaaaatagtaccccataatggtcggagacaaaatggtcggagagaagacaagcggagagagcacaagcgaattaccaattctatgaagcattagctaattaattttttttaattattatttttcctaccttggctttttgatacccggtttaaacacactcggggaaagctgaaaatagaaaaaaaggaatggacgattcaattgctaattttagccagcaaaaacaacagatatcggaatcaatcatttcatagtttagctccccgttccccaatattaaacagaccacgtcattttgtcggagatcaaatgaggccatttcagacagccgacgaatgtcggcttcgatcatctgcaaaaagcaaatatttttttatcaatttaattatttccatgaattctatccatttatttatgcccaataatttgtttgtttggcccactttgctgacggaagtgccgttcttcacaattggcagtaatcgccgcagagtttgcgagtcgttgaagggcgaactcggcccgtaaatcagacggagctgttcggcactcatcgacacaacgcccgtcctgttcatttctgccaacttggaatggaaattaaatataaatgcttttaattaattaatttattttgtttttcattttacttgctctttgctcaaattttgcaccaatttttcccatgtgtccgattttcgttgttcgttctgtccatacatttcgcgcacctttcaaatcaacgagtgaacaattgtccattttgcccatttgctcctcacattttccttcgtcagataaaggccatcaaattcgcgtttgtatcgtttctccacttttttggcaatctcatcatcagtgccgtacccatcatcagcagaggacaacaaatgctgagaattgaaaatcattgctaattctggtgaaaattattttcttttaattggaggaggtttcagccaaatggacgacttaagttatatccagggctcccagatctgaggctttagcctcattttgtggttttttgataggtcaatgaggctaaattttcaaaatgaggctttttgacccaaaatgaggcttttttgcctgccaaatgaggcttttgaaaattttgatctgggagccctggttatatccaaaaattgtaattaataaaaagctaaatagaattacaaaacaagctaaaggtttgctaggggagatgagctagttggggaattcaaaataaatgatagttctggggcattggaaaatgaaaaattgtttttgcattattcttccatccaccttcactgtgtccacttgctcgttgacccccgatgcttccatgatcagattaagccattcgttttggtctcggtccactaaatggacccccttcttcatcaaatttggcaaactcatttgcctttcaaggccatgcccttttgtgtgcaggctgaacagtgatggggacagaaaattagcctaaaacaagaaaaataaaaataaaaattttctattttcgaattatatataacattccaatagtttttcaggaatttgggtgaaagggggcctcctgctgggcagcaggggatcaactcagtcccatcaacccgaactagctgagtacagtgtcttaaaccgtttgggactgagttggccggggaccgtgttgtcgcgtttcgtccctgtcccgccccttctgatccgcgttggctgatcaattatctgccaaaattaggcacctttcccctcgacttgctggccgtaacgctcataaaccgtggcgataaaacgtcaaccaatcggcccgcttccattgcttttgctctcgccgcttctccgccctttgccctccgttcgccgcttttaccgtattcctcgctctgttccctaccgtactcctccccctccatttcttcgtcataatttgccatttcatttcttttctctccgttaaattcgtccgattttgaatattcgattgactttgactttctttccaactccgccaatcgcatgccgactttgatgccgtcattgaccaatttggcaatttgcgcttccaatttgcccactttgctaccgtaagccgttgtttcatcggccgaattcattttcagcagtgtttttttgtcatattttttatttgttgcaattgccgattttatgggctgaataaagcaaaagttattattcttttaataacaacaaattaccatttctttaagcgcataatccttccattttttttcttctcttttcaactgattgtgcgccttttttgccttttgtatttgtgaaattgtttcttgccaacttaaaataataattttaatttgttttattatttactatattaatttgaattatagtattccttttacggtattgtccgtgttttgttcttccttcccaatatgccgctcatcaaaaggcgtgccaatcctccaatgagactgaggccaagtgttcgttttgcctccagcaaattgtatgaatgacttttcaaaattgcaacatttttgcgttttcttgccaaaaagtctttgtctaaatgccgttggtctctggcaaaaactgcttcccttttccgcatttcggcaacttcaaattttggctttgcgctgtaataatcggttttacttgtacctaaataatgccggaaattaaaaaaagataaagctctcaattggaagtgataattaacgggcacagaattcgctcaatttttggcactttttaggctaattatgagtcaaaaatcccatacccctaattatacaatgatacattattaaatttgcgaaaatttcatttaaagaaattcattcccattattcggcattttacttaccattcacagtttctttttctactgctgaattgctttcgtgtcctttttctgcctttttcttctgatgttccgtttgtccgttttcttcggcactttcgctttcgattcgaatttgtcccacccaattttcgcttttcaccaaatttttggtgccagcaacaattttggcatttttgagctcaacttcgaattcgttgttcaacagccgaacgatgcatttggccatccgtggcactgtctgtgcgccaaaataacattcgttgaatttgtccggcactacgtctaattggtctttgttggaatgcctttaaaatatatttttaaagttttaataattaaattccatttaaagagcacaaataacagaaacgaacttttcttgcaaaaatactgacagaacagaggcaaatgcttgggttgtccaatgttcgtaaatctaaacacacacaaaaattaatttaatcaatttaaataattaaaaaaagtattaaatttatttacccgatatccctcctctgtggtcatttgaattgtggtgactttgggagaagaatggtgctgtacagcggagactgaagctgatgaagaagtaagcaaaaagagaaaagcgaatgccaacattgacagacaaataaaataataatttaatcttaaaataatcgcttattaatttcaaaaggaaataattcaaatctctaaattttttcttcatttaattacatttgacagattaatttttcataaattatgttgtactttagagggagggagtaaaagtggcggggcggcatttttgggcaaacaaacaaacaattagtggttgagttgcgctgatgcccctgcccgctaattaatctgccgttttgctgctaacagccgatccggctcgtgccgttggtttctgaccgatggtctctcattcccgacatttttcatcggaaaacactgaaaaaagttgatgaattgcgcctcccgtcaaaagattattaattgattctgctttctttcccatttaagattgatatgaaaagcgccgttaaaataataaatcataagctaacaacaccaccagcaatttgtgttatttcccagcaatttgtttaatttaatggaaaactttaaaataattagcgaaaagcacaaaaaatgtttttatccattaaataaatttaatttcaatttaataattgcctcattaattattgagagtacaataatttgtttggttttcaagaattcaaaaaatgctaagaattggtttgcattgaaaagggcaaattcggcggggcatggaaatgcttaataattcgttgtacttgaagttgttcggtgggcaaatatttgatcaaaaaaggtgggctgaaaagcacgcgaacggagtgatgagtttgaagcggtcatcagaaaagtgcaagaacaattcactgaaatgcttaacaattattaatgttagtggggagaattaaatttgaatgtttcgcgtgtcggtgaaagcgaaaaaaaatgttttaagctttacctttttaagccacaattagcaaccgtaccccataaatcacgcgataaaattgcttcaactgaatgacagtttaaaatacaatttgtacaatggcatgaaatgaacttgaacaaaagttgcactttcatttttggcatttgtcacgaaaactcatttgcatatagaaagtgccgtgtttcaattcacaattcacactttaatttctaaacaaaagaataggaattggcacatgaataagctcaaaatggcaagtttaacagtggaagggttcaaatagtgattctttcgagcagagaaaatttagtaataattttaaaattttatgattaaaaattcgagaaaaattagtgggccaattttcaattttggcatggtcgggaaaaaaggcagaaaaatctatcaatcaaataaaaagtgaaacgatagtaagatataaaagaggacaccatgaagaacaaaataaaaaagaatcatttaaataggcgcagaaataacggagttatgaatttttaaaaattggaaaaaatttgggtatcaaaaattatgttccaccctaagtaaatataaaaacaaatttttttgaaaaatttaatgtgaattagaaaatttaatggaaaattttttattataataaaaaattaatttacttttttaattagtaaaataatgattattttataatatatttaattattttaattttttaggccatattgccgaattatttacaaaatattcataatgaatttccaaaattattccatggccaatgcggcgttcgatcgtttcggcgttggcactttctcaatggaattgtttctgtcgcattcgttccgttggctcatttcgctgcccggtttattgtttaatgccgcccttttgaacacaatcattcgcgaaaagtgataataaatattatctttttttattatagtaataaaattttaagaaatattttcggtaaaaaattattaatttttcaattaaaaaatccgaatgaaattccaaattaattaattcctttttctgtgcttttaggagtgtccatggcacttgtgccacccttttggccattggctcctccgttgactttgtctttttgctttcattttctgtcccttttgccatttcgttggttggtcgcaacatgatcagcaatttcgactgctttttcctccaattcgtgccaaaccttggcctattctcctccgtttcgatcgttttcttcgttggcatcgatcgactgatttccgtccttttcccattatggtaaaagttattagccgcaattagtcgagacactaattcctataatttaatcatttgccaagttcagtaaagtccattttggtttccgctagtcaaaaattgtaaaatgctctgccgttacttaggtactgtcttcttgagcggcactttttcatttacattttcccaatgcttacggtaacctttggctacagtatctatgttctgattgaagcggcacaattggtactctttgtgtacccagattggtaaaaatgtttttattgaaaacatttttagtttctttttcggatttatgcttttagggctgttctatgcaccaacggcgacatgttcagctttggcatgtccgcaatggtgctgagaaatggcctggtgatcaacggtgtctctttcttttgctatttatttgtcgggttggcaatttttcgctgtcggaagcaaagttggacggacaaatgaatataaaatagttaatgtttcacaatgtcaaaatggttcaccttctgttttagatccgaatgccatggtcagacattgaattttcaagtccctcgctgccattatggctttgttggttggcacttacttttccatttgcttcatccttttgttgtttcgctctgtcaaagacccatttttcaattttcacattttgtcttccatcagcgcactgttcacagtcacagcggccagctccaacggactcattctatttatatttaggtaaaaaacaaaaacaaatattgccaaattaaataatagtaattattttttaaatatattttaaaaataattcaatttatttggataaattagcagcgaatatcagctggcgttccacaaacatctcaaaggatggcccctgattggcctgtgcttaagccgaatcggacaacaagtacccgtaaatgttattgtggtcaccaatttcaacatcgctgctaatcaaccgcgcactgttagccgccaatgtgggcaaatgacgacaaaaagagatggatgaaaatgaaatggaacgaattatttgtaatatttccttaaatattcatggaaaattcggtctaattgacacataatacccaacttttgaaactcctcaccaaaactgtcttaaaaattaatcatttgtcctgaattgtgttatttgtggtaatacccttttattaggtgtttctggtgcgacacattttgtgttttcagaacagaaacttttggacggagccaaaaagccgaaaattatcagtagcaaatcaaccatactctgctctacatgaccaaagcaatttttttaatgtgattgggcagcggatattgttcatcagttagaattcgaagagaataatcacgaaaaaaaaatatattaaaagcattttaacaacacttagaatataatacaataaagcattctctttttatcatctctcaaaaagttcgttcagctttgttctcgaccgaagatcactctggattttacaattttaactgatcaattattgatcgatcacccaccaatctgatcggattttgatcaatgcattccagcgcaatttttgcggccaaatcgaactcaattgcccacccggaagaaacaaacaatggcacatgggaagtgcttgaacgcagaatggccaaatcgggaagttgttgttggtcagcattttgcatgacaaacattgccgccccgtccactgttttgcattgctcttccgccgatttcaatgcctaaggcaattttcatttttaaacggatttttaaatttgataatccttctaaggaagcacacatttgggccctgctggtggtgtcaaaaaggagaaaacttacgttcgattgagtgcctttgaaccattttctgtaattttcggagtccgcattttttgacgcaaccaacaaaagaacaaataatgcaaaatgaatatttgtttttcaataattaattcacttcaactggcaattggccaagcttcagcagaggagcgggcgcaaaattctttgccattccaacggtggcaacattcaaa

SEQ ID NO: 6048 - DNA, 2704 bp, Heterodera glycines
aaaagaggcagaacgtgtgattatgcattgtgaatggaaagggtacagcgctcgctccaatagttggattcccgcaaattcaattagcgagaaaaatatataaaaagcattatttaataaaatttataaaaaaaaaatgccttcaaattctttttatgttgttcttccgtcaaacaccaatattgaaggaaataggacaaattctttccgagtgcgtttaccgcgcaaattgcaatttaattcggaatgggaggtgggtcttgccgttattgtatacccccactcttggccttccataggcaccgtggagcaacaatttgttcagattgagtggcagacggggaatacggtacgtatcgaagttccaccatcaaatgtcacaaacccccatgagcttagcaaaaatttatataggctcctgggtgagggaagtgatccgttggcaaaaaaggtacgatcaacacagaattctttcatgcttttgataaacaaggctcggcgatgggccagagaagagtacattaagcgaaagactaaagaaaaacggagcgtccgtgacgaagagctgctcctacaggccctgttgacagatactggaacattggttgacctcaacagcgtggcccaaggctttctgacacgggaaaagcgtgcggaaaccagcaatatagcgttgagaatcccagctgacgataatgattcatatcaacaaaaattggatgaatacttttctaaattaagtgagaaaaatttgagcattcttgatgaattgggcatgacaaaattgaccgccgaaatcaaaaatttgagcgaagaggaacgtgcgatccttgaagccacaaaggaaatgggaacggaagcatggattcaggcgtaccgtgagatacgtcttgtttgccaatttaactatgacgtccatagaaatcgttttgtcctgaacaccgacccacggtacgttaaaaaggtcaaagtctcgcctcagctcgcttacattctcggtttcaacaacacggagtttattcaatctgaaaacgaggcaagattcatgccggacatgagcggtggagtgtcatccttccacgtttacacgccggatcttattgaaccaatgatgattggtgacgtcacggccccagtgttgctcatagtgaccatacgcggaaaccccgaccaagtagttgaagaacaattttttgccatacagtatcataaacttttattaaaggagttttctgaaattctgattgagatacgtaccaatagcggcatcttgatgccattccaatacggaacatgtacattaacattacactttagaaaaatgtcctatttttaaatgatgaacacgttggaaattaacaaaacattgacaagaaacaacgtgactcgccactactatattggctgttttgcagcagatcaaatacccgccggtgcaattgtcaaatttccccactgtatggtggttaatcttgaccccagcacatcacatggttctcattgggtgggcatatattgcgcttctcctttgcatttggagtattatgactcattggggttgtggccaccgcccagtgttcacattgtgaatcatttgtcacgctacaaacaaattcaatataattctcttccccttcagtctgccaactcaagtgcgtgtggtcgacatgtcattttctttttgtattgtcgatgtgttggaatgacctttgaaaaaattgtcagctttttgcactttggaaagatgcaaccggatacgctcgtaaacaattttgtaaaaagcataattttcaaagaatataaataatgtaaaaacgtcaaattaaaaaaaaaatgcatgttgattttgatcctctacaagtggattggtccacattctcgtccgagtatgtgcaatttggtggatacaacatttatcgggggttgccctatcagcgtggagcgggagttggcgcagtgttcagaagtcttatgagatatttgctgccgattggaaagcaaattggctccgcaattggacgtcagggaatggaaaccggaaatcgagtactcaccaatgtgctggagggaaaaaacctcaaagagtctctcgttagtgagagtaaggcaggactaaagaatcttctcgaaaaagcagccaacaacataaacactcagaagggtcaaggttttcattttaagcgatacaaaaaagactcggctcccaaaattggaaaaataaggcgaaaaaatataaataaacttcaatcgtcaatcgggccaccaatggttgataagaccaaaaataaacgtctgcgtgttgactcattaggaacctattaaaaaatgacttgcccacaaaaaatcagcgacagcagtccactagcaattaacagtggtctgaacattttctcagttccaccgaccaatgtgtctgttgtgcgttctttctttcgtcaggtgcttccgctagcaacaatcacgcaagaatcaccgtacctgtttcgactgtacagtgacaatttgtggactgatttatctcggatatatctttatctcgaactgtccattgaaaaaccgggagcaaacgataaatgggttgcgatagatgatgcggatactagtgtttctaccattcaagggattggtcaaacatttgtccagcaactaaaagttacggttgacaatacggaagtatacgatagcggaaacctatacccattca

SEQ ID NO: 6049 - DNA, 3222 bp, Heterodera glycines
ctatcagcgtggagcgggagttggcgcagtgttcaggagtcttatgagatacttgctgccgataggaaagcaaattggatctgcaattggacgtcagggaatggaaagtggaaaccgcgtcctcaccaatgtgttggagggaaaagacctcaaagattcgctcgttagtgagagtaaggcaggactaaagaatcttctcgaaaaagcagccaacaacataaacactcagaagggccaaggttttgattttaagcgatacaaaaacgactcggctcccaaaattggaaaaattaggcgaaaaaatataaataaactgcagtcatcaatcgggccacctatggttgctaagaccaaaaataaacgtctgcgtgttgactcattaggaacctattaaaaatgacttgcccacaaaaaatcagcgacagcagtcccctagcaattaacagtggcctaaacattttctcagttccacctaccaatgtgtctgttgttcgttcattctttcgtcaagtgcttccgctagcaacaatcacgcaagaatcgccttacctatttcggctttacagtgacaatttgtggaccgatttatcgcgggtctatctttatctcgagctgtccattgaaaaaccgggagcaaacgataaatgggttgcgatagatgatgcggatactagtgtctctgccattcaagggattggtcaaacatttgtccagcaactaaaagttacggttggcaatacggaagtatacgatagcggaaacctatacacattcaaggcttatatcaccaatgagttaagctttccaataaatgccaagaaaaattttcttggttcaacagggtattatcacaccgtaaaccaagatgactcaacagacgatgggttcaaagagcgttgtaaaattttcaagggtggaaaaaatgcgcaattcctctcccgtctcgactttgatctgggaaaccaagagctttatctcttaaataatttggacttgctcttcacaatttacaaggccaaagatgtctttcttttgcaaacattaaaagcaaatgattctaccaaatatcgtttgacagttcacgatgtcaagatttatgcaaaaatggttgaggtccaaccctcactaaacatgagcctttacaaaacccttgaaaaacaacccgccacatacgcagtacgcaagaccgaaatcaagtcgtcattcatcagtgttggtcgatacgaatttgagtacaatgtattcagtgcaaccattcctcgacgtgtgacaatagcgttggttggaaattcagcatttcatggtgactacaaactgagtcccttcatgtttgagccgtttgatttgcgtgagatttcggtacatgctggtggcgtagtttacccagctgttccttataaactaaatttttcaaatgatcactttgtcagcgcttttgttgacatgtatgaggcactcggaatggctaactcggaacgttcatttgacatttcaatggcccagttcaaaaaagggtggaccttttttgtcattccattgacttccacgcttgacgacagctgtggatttgagctgttgagaaacggtacgacaaacgtacgagcaacattcaattcaccaattccgcatggtggtgtagagatgattgtcttgggtgaattcgatcaaatgattatggttgattataaccggcacattgtgaccgactcaaagcttgggtaaattataaataaatacataaatattattacataatgttaaaatgaataacaccaacacaacgaaaccggccatacaaattttgaattccccagaagagcctaatgaaactcttttgcatgtactgcttttttctcattatcttcttgcatttcctgtgtttttgcttttttggttcgttttaattaggtggcttaaaagtcacgggcacctctcgcccagcgaggccgagacagtaatggaagagatgaaaaatatacctcgacaaccaccaatatttttcgcaacaaaatgatgcaaaggttagagaaaacagacaatgaactcgctcttcattatgacaaaatcgataatgacgcatgctggcggtgcattctcaaaactactcattcttttcatcattcattttacaaaaaatgtctccaaatgaattttctgaccgtccctttcaacaacccgacaatgttcaaactgttcaactgccgcatcaacaaccggatccagaagcagagttgcgggcacaaattgaagacgcggaggaggatttgctcttgaactggtggcgtgaagacccgacaatcgtaagcttgtttttcaatttatcatttttttaaatttcatcacattttttcagattcgttttctatttggacaccgtcgagcacctaccatcgaagccgcgcttcttcagcgcgccgaacgcgaggccgagattttgcgccaatatgccgagaaccatcaatgaaaagggaggaccaatcagttatcattttcgtatgtgtttttttttcatttttgcaattttaattatgataaaattttttttaaagtgtttagcaaagtacagaactgggggtgggggtgtctgagagctaaaactcgcatagcccttgtccgattgacttcaaatttcataggccgtcattccaccaccacctaagctgaacggcgaaagaatttcgcctctggcaccagtttgagcgaaattttttcccgacgccccgccccctcgcgcatgcgcagcaaaactagcgcaccccttgtccgattgacttcaaattttacaggccatcattccaacatctcctaagctgaacggcgaaagaatttcgcctctggcaccattttgagcggagtttcccgacgccccgccccctcgcgcacccctcccccatgcgtagcaaaactcgcgcacctcttgtccgattgacttcaaatttcataggccgtcattccaccaccacctaagctgaacggcgaaagaatttcgcctctagcaccatttcgagcagtactttcccgacgccccgccccctccccccatgcgcagcaaaactcgcgcaccacttgtccgattgacttcaaacttcacaggccgtcattccaccatctcctaagctgaacggcgaaagaatttcgcctctggcgccatttcaagcagaacaatccccgaacgccccgccccctcccccatgcgcagcaaaactcgcgcgccccttgtcc

SEQ ID NO: 6050 - DNA, 1100 bp, Heterodera glycines
ctcttcagattgatgcaatccgcatgggacatcgctttcgagtacgcccattcgcggattgcgttcggcaatccgatcggcaatgttcaggtactgttttgacttgtgctgctgttttgcgatacccgcatcccacacccccaaatcccgaccccactccatcccgcgcaccagcccccatcccgaacccacctttcccgacgcacccccccaccccaccccattcccgtcagagacgcacacacaaccacccaataggcacggacccgcccagctgatcctctctcccttcagtggagaaaatcaatcgataattcaagtagtcttaccatgtagtaaaagtttattttgaaaaaaagactttacaaaataatacccctgggagaagggagtgggaaacatgatttcaaaattttcaattttttctagtctaatctactcaaaacggttcagaattcaataaaaataatattcacggtgcgaaaaatggggtttgaaaagtttattttgaaaaaaagactttacaaaataatacccctgggagaagggagtgggaaacatgatttcaaaattttcaattttttctagtctaatctactcaaaacggttcagaattcaataaaaataacattcacggtgcgaaaaatggggtttgaaaagtttattttgaaaaaaagactttacaaaataatacccctgggagaagggagtgggaaacatgatttcaaaattttcaattttttctagtctaatctactcaaaacggttcagaattcaataaaaataacattcacggtgcgaaaaatggggtttgaaaagtttattttgaaaaaaagactttacaaaataatacccctgggagaagggagtgggaaacatgatttcaaaattttcaattttttctagtctaatctactcaaaacggttcagaattcaataaaaataacattcacggtgcgaaaaatggggtttgaaaagtttattttgaaaaaaagactttacaaaataatacccctgggagaagggagtgggaaacatgatttcaaaattttcaattttttctagtctaatctactcaaaacggttcagaattcaataaa

SEQ ID NO: 6051 - DNA, 1958 bp, Heterodera glycines
  unsure (1)..(1958): unsure at all n locations
cctcatttagtttggtctgcttcgccagctcctctctcgcgtatatgtccgggtagtgggagacttggaaggccttttccaattcggccaattgttcttggctgaacgttgtccgatgacgacgacttaactaagcaaattacgtgaatgtgttaaactttgatattggtgccaatttgttaggtatttttgtgttaaatatgaaagtgcggaattgccaagattgtctgtcagccgaatttcggcactttccccccccccccttaggagggtgacacttatttaataaggtcttttgactttggctgctgtttccaaaccccaaaatcgaagtgttttccaatgcgaattaaggaatttctccttctgactttggcatgggactaaccgagctggtgcggatggatacgaagaagagtgactgaacagggaacttcctcccgtgccaatggatggcgtcggccgaggttcggctttgatgcgttttaaggccgattgttggtgagcagcaacagacaaagcggacgacgaattggacgtggacgattcttagggggggggggggggggattgaagacaaatggggtgaaagagggattttggtaaaaggaatttggaaaatattttgtggctcaactccctcaagttgggagtgagtttctttcttccttggccacatgaatccaaatggaaatgtgctcaaatatcaaaaaaattaaataaaatggacttttgaatgtttttggattgccaatattttcgaatgccgatttcgctttcatttcgaatgccgatttcgctttcatttcaaatgccaaattcgttttgtctcgtgcccttctcacccaatgtatgtccattgatcgcttgtcccagcccacaattgaccgccgtcgtagcagctgataaaacgttgtgcccatcgagaatcggtcgcaaattggcggcggaagcgtagtgattgtattgggaaaagtcgggcaaagtggccggctttaattcctcaaaagaattgcttaaaggagtgaaaagtgaggggaaagggcagccaatgatcggccgcggaaaggccaagcgaatgaatccttccgaagcggcggcggaaagatactcaaaaggcctctaagcggccaagctcttcctgtcaaaatcaaatttggtgttttgtacaaattggacaaaactcaatttggtgccagtgaattatgaaaatgcgtttatgcgcccttccgccactcctgcncgggggctgctcccattcctctcaaactcccccggctgacatgcgacccatcttgtaacgacttccatttgcatcgacgtgccacgccatttgaacacaagctcgcccaggacagtaagggggacgttttgggcatttccagtattcccagccttgctcgattcgagagtcgctctcataagcatattcgaacacaagacgagaaaggagaattttgccacggttggatttcgcttcttcaaatcgaacaagagccatttttggttgcagtaaacgaatgaattttcatatcgttcatttttatgcattgaaaaaactagataaggactaaacaaatatgcaaataggcaggcactcgagaacgcatgggaacgatggcgagataagaagtttgagaagtaaatttactaataatattcaacagttttaaagtacaatttcttttatgtaaatcatttattaaagtacaaataatcacttattttatctagagttaccatacgcaaaaagcgataaatactgtattaaagaatttgataaaaatgaaaaaattttaattttatggatccactgacgaaaatattcactgccgaattggaacactgacgaaaaaaatggaaaacagcaaaataaataaaaagtagtacactgacgaaaatgttcactgacgaaattatccgctgacgaaaatcactgacgaaaatattaaccacga

SEQ ID NO: 6052 - DNA, 2113 bp, Heterodera glycines
tccccctcccccgcttctcccccagtttttccctcccccgcttctccccctcccccgcttctcccccagtttttccctccccccttttttgctcttttgccaataatcaccccctccccttcattctttctgcaataacactgctcttgagaatatttgccgttcaaaatgaacacaaaaggcaaagcgcggcacttgaccaaacgccgcagggaaaatgcagcagagatttggacgatactcaaaatacaataatattagaagaacaaattacaaaagaagaaaaaacagtcgacccaacataaatttacaattttattagaagaaaactcttttgacaccaaaattgacctttttctccaccctttaatttcatagtaaatcctccataataattgatttaatcatctatgaaatccatattttaattaagcataatcccttaattaattgacttgtaaacatccaacaaaacacattcatttagtccgatttgattgtacaaaaatattaataacagtggaccattcgaaatgacattcatttgcaagtgccaaattggctcttttgttgccatttgcccgttcgtcgtctttcctctcgcattcgcttctcctttctccacttttcgcttcgttcaccgtcttccgaacctcaacggacgtgggccgaggcttccccgttttgtgtcgtccatttgtctggaggacaatttgcttagccaaattagccatgccattggctgtccaaccttttcacttccactgggaaaagaaagtgcggaaaggatgagaattgcaatcgctgcgtttggacttctccgccccttccgtttccgtcccattcgcttttcaattgttgcgaattgtcactgatttgatcaaatggaaaaggttcgaccatttgcagttcgggcagcacattagccactgaatttgagcaattaacaaatgaaaaatcatttaactttttgattgaccaatttgtgccgaagtgccaatttttccaaacatttgccgactttgggagggcatttgttggaggggaaaagaggagcaaaatgagcaaaggatggcgaggaaaacagagaacaccagcagagataaggattggccggaggacatttgggacgacacggagagtaattagctaataaaaagcaaaaattgaaaaatgcaaagtaacggaatgaatgggtgggacgagaaatcggccgttttattcaaaatatgacggaaatgaagaaacaaaaagggcaaattggcatttgacaaagggcgcaattcgaattcaattcatcacacagaacagggggggggggaggaatcatcagaaaaagcggcggaatgtttgagaagtgccgtcatccattgaccatggccggcggaaatggcgaagaaagggccgtaaatgcaaaatgcgatggaaaatgaaatcattcgcctttttcatggcacgcaaaatgcttcagaaatgaacaaaaaaatgagcccaactgcacaaacactgagcagagaatggagcacgattcggacaattgccttctcattttcgacctgaaaagaatttaaatcagacgaaagccatggtcaaagccaaaagggcacctgctcaattggccaattcaaataggggaaagagaagtccaacacgcgttcgcagtgctcgtacgtcccctcgggcattgcacaaaatcggagtacgccctgctcgccatcgcccttcagcagtcgtagtgaaagtggcaaaagttcttcattctttgtgcggtacggataatgaaaggtcgttcgatttggacgattggcccaacagaaaatggaaaaggagcaaacggagatcaaagaagtggccaaagcaaaaccgacttaaaagcaaaatttgatcggaaattgaagggagagggagaggagaggggcgggagaaagagagatagagaaagagggggagaggaatgggaggagagagagagagagaggggtgtaagagaatggagtggagaggagggaaaggaagagaatgagaaacaaagcaaaccaatggccaaaaactgccgaaatgcgaatttgcccgaatgggacgtcctgctgctgggaagaagagcaaagatcag

SEQ ID NO: 6053 - DNA, 2852 bp, Heterodera glycines
  unsure (1)..(2852): unsure at all n locations
ctgctgctgggaaaagagcaaagatcagcgagccataaaaggagagggacaangnaagngaagaaaaggggggccctataaagggaaatgatcagagaaagaagcaaaatgacaagagctaattgggaaaagaagtgcatgaaaagaaattgagaaaatcaccaaaaaggcaaagccaatgtgaggaagtgaggcggaatctaaacgaacggcacaacaaattgccaattaaattaaaccaagccaaaatcaaaaccgatcggaacgcgcactgtaactgaaaagaatgatgccagaaaagaactgagcgatggcacaaaatgtgatgagagaggagacgaagagacgagccgaatggagggactgctccaccggggcgggactgaccttctgcacaagataaacttgcaaatggcccaaaatgcgatcgcattgcatctgaagagcaaagggaaaggaccaatcggaaggagaggagagaaacaaaggacttggtttggggtgctgcgattcagcaagccggcacagaagctgagctgaccagcacgagcatggactaattaatgggaaaagtgagcaatcaagaacaattaatctgattgagtaatagtgtgaaatgaatggcaaacccctgcgaatgcacacattctcaaagagagccgtaagtgaaagacaaaaggcgaaaaaggcggacacaaattggaggaggagctcacacctgacaaatggaatcaaaaaacaaagacgaagtgatcgagtgcaaaaactaatgacataattaattagcttatacttatttggataatccaaaagaagggcatagactgaagtaattgcagcagaaatgccggaccaaaagctcagatagaaatgggcgaagggaaggcagaaaaacacgtgggcaagcccaacaatgaactccaactaaattaagaattgagaggaatggggaatcagggatgtgcgaaaatcacaaaaaaaaattttcgtatacgaaaacgaaacgaaaaagggcattcgacacgaaaacgaaacacgaaacgaaaaaagaaattttgaaaaccgaaaacgaaacacgaaacgaaaaaattttgacggacgaaaacgaaacacgaaaacgaaaaaatagccattttcgtacgaaacgaaaaaaccgaaaattttttaaatatattcaattttaattaagaactttaaaattgtatcctctaactgaggaaattaagatcctagtaggtggaaaagcggatgtggctctaggacaggggtatgaccgaaaaattttcaaaataagaacatcaaggacaaaaaattattgaaaaattttacgaaattggaaaaaaatgttttttgtgataaaaactcaaaatttttacgattttgaatagcatttcgttcaattttttatgaaattctatttaatttccaattagtaaatttcataaaatatggttttattgattaaaaaacatttcaaaaaaccctgatccgtatacgggtccgtatttttcctgcatacggacttatacggagtaagggtcttccgggtttttagtccgtaagtctgtagtccgtatggatgcctagtccgtagtcctgatccgtatttttgccgaatgtcgccgctctctagaaaaaattatcaacatttcaaactttacatacaatttcctggcagatttaatacaatacttcaagaaatatcttattttttcttaccaaaaaagtcattcttaagggtgtaaatattttcgtctttttcgtccaattttgctctgacgaaaacgaaacacgaaacgaaaatccaataaaaaccgaaaacgaaacacgaaacgaaaaacaaaattttgaaaaccgaaaacgaaacgaaaaaactttggtagacgaaaacgaaaacgaaactaaaaaagtgccgaaaatgtaggacgaaacgaaaacgaaacgaaatttcgtccatccctgattgcgatgataagccaccgatttgactatttcgttgacgaacatttcaaaacgcgcaaatggacattgggcaaaataaaaattctaaatggggcaaaagaaatgaaaattgtcaattattccaattgggaatcgctgccgatcccacaaaatccgttgccgaacaaagtcatcggattcggaagcattgttatctagtgaaaaattaaatttatagatgattttaagcattacatttaactgatcttcagctacttcgaccaaaatgtgctcacttttctccgccgtttttaccgtttcttcgcctcatgttcaacaacattgttcattcgcactgaaaatgtgcgaatttcggaattcattgtgctcaacatttggccaatgttcaaggacacgactattgtgttggattttgacggccgcaactttccgtcgaatgcgccaattggccccgtcaatgctcaacgaatgtccatcccttcatattattggtttcagttgagcattttaaccggatttttatctgacgacagtgccaatgcgtcggatgaccaagtgtttccaggggttttcggggccgcgatcatggatggatacgaactcgatttgacgcatttcgaaccgctaatcagaaattctaacattttttgaaaattttgttttaaaaatcggttttaaatataccaaaatgcttgctccatgattatccgatgtgttgcttatattaattgttcagacgaagcattgatgcatttattaattttaatataaatattatatttttttggagaaataattacagggctccagttggaagggacgattgactcgtcagaatgcacctcattcaaacacgaaatgcactctttttgcattcatctctgttctcc

SEQ ID NO: 6054 - DNA, 4432 bp, Heterodera glycines
tttgtattgtccccttttttggcgccgttttcgtccgatttcacccgaatttcgaattcttccgaagcttttttttgcccgtcctcataattcgaaggttcgaaatgaatgtcgagaaaatccctcgacacattgttcatattgatgccgaaaatgctgaccaatgaaatgagtaagcattaaaataattatggtaattaatcgtttttttgccattcattcacccattaagcgccacaaaagagttaagccaccacggaatgcacgcgttcactttctccttcaaaattgcgtccacgacacttttggcacactcttcaaccgtcagaaagggcaaccaactgattaattgtatggcatttgacattgacaatggcattttttttttgctttttttttgtcaccgtgccaccggacggagtccctttgaagtgaccatcggagtgcgaacataaaatgggtaaatggtcgtgcagagaatgtcctccagcccgcgttccctcagctccacccgaaggcattccatggcgccacgcaccgcaaattttgttggactgacacaaaattattttttaaaatattaaaaaaatatatctctaattacaaaaatacttttcatctttgcccattgaccacctgtacgccatttggaacacttcgccaaaatgtgaggcgattgagcccatcgcgacaatgtgccctttgccccgggcttccatttcgggcaaaaagacgcgaattgtctgacaaaaagccattagcaattgggaagagaatggaaaatgccaaattggaaaagggaaaaaggacaatttaaagcggggccgggactaccccgagaatttaaaagtcaaaatacatcactgattaaccggttgatcagtgctcacattaatggtgcccatcgcatttacatccatcgatcgctgaatgtccgcgtcgttcagctccaaaatgggcacaacgtaaagcaatgccgcgctgcacagaacaatgtccacgcgaccttttagctaatgattattattatcattatcattcagcctaatcttttcaaatccaaaatagtaaaaaaaatgataataatttaaacaaaatttcacaattttttaccaaaatttttttgtatttctgcggcacagcgccgaatttcgtttgcgtccgaaatatcgcatttccatctttcaatgtttaggtattatgttttaaattattcttcaattttaaatttacgcttttgccacgccgccgttttcgcatattttttcagttactttttttgcgctttcctaaattttaaggcattttactcttttaaatttttttatgttttaaatattttcatggtcgtgttaataatgaatttcgattgttttcccttaccaaattaatgtcaattatcgcaactttggcaccgaaagtccgcgggtcggccaaaagttccgcaattcgctggcccttccattttcattatttttcatttatttttttattttcttacaattcccgaccctccgcctgtattaccaccgtttgtcctttcaccttttttttccaccaacggaccaatcggatgaaatccttcacaaacatttaaatggcaacaaaatttaattgagattacttttggaattgcgacaagaaaaagttgaagcaaagcgccgaaaattgtcgccgccaattgccaacaattttcacgagaattgtttttgggacttttgctcatttaaaagagtattccttttttattaatacggtttatcaccaccaattaaaaacaaaataattaattaaacaagaattgccaaatttaaatatttaatttgttattggagggcgaacaaattaatgaatgaatgggcgggaaattgcggtatttactgctctttctctctctcaactcccataaacggaaataaaaactttaacaaaatgaactcgtggcaacgaattggtaattaattattatttgcgaatgatcgttttacccataaaacaaaattaaactatgaaaaatcagaatttgatcaaatggaagaggaggaggccgtaaacagcacaataaaaaaagcaaaaggaaataaataaattaaaaaaaaagaatattatttatttagtaattaaataattcaaacaaaaaaggaagcgagaaaagaggaaattatcaaagcacttttggcactttttcactaattgcaaataaaacaatggcatcgatcgcattaagcattttgtacgatctaaaggtgaaaaaagatcaattaaatcaaaaattaactttttctaaaatatatgtaaagtataaactatatgtccatcaaaaaaaagtgcgcaataaaacacagagatcggtcggacggagaaatcaatttgaaaataaaactgaaaaacgacaaattaacatcgtatcaatgaaaaatgaacgaattttaatatgtaaatttgcaaaaagtaaaaaggaattaaatggaaaagttatattttttttatatcaattatcacttggttcaatctgatgtcaagtcaattttttttctaatttctattttagaaaatttatattaaaattaaaaaaaaataattaaaaaagaagaaattaagcgatataagccccccccccatacccatcagcaggtgcttacaccactctctttgtgcgtaaattaaaaactcatatgaatctttaaataatttatatgcaaaaggggaataatcacccaaaaatgctgaatacacggaaaagcattcactttaatcttcattggcattggcaccgtttctgcccttccttggctctctgtccatttgctttatcgttcgttcgtttttctttttgtgcctttttttaactttttttaattttaagtcctttcactcattagcataagtctctttactctttaatgaacatcagtggtgccgttttgtcctttcattttgccaataattcgtcttcttcgcctgaggcgacccccgacactaccgtagccgctctgctggtgggcaccgtagtcgagctgcttgtctctgtcatgacggtgcccttctccaccattaatctcgtggtcattggcagatcgtcgttgctccaccccaacctgaagatggtcctcctatggcaaagtgccttcattttgctggtccgccattcctccgcccccaattagccaacaggacgggccgagttttgacactgattcccttttaagcggggcattgtccgtctgctgatcggtgtccacaaattggcactgattgatccctttggccccgaaatgttcgctccgtaccgtctcttccacgtgttcaccttcttcaaccgcaacttcatcgcccatgtgctgctcattgaacggttcatggccaccgcaatggtcaaaacgtacgaaacgcggcgcagttggctgttcacttctgtttggtgcactgccgtggtaagcaatcgcaaatggacaattgccacgggaatgtttgacactttgtgttgttgttagaccaatgctcaaaaatggttgacacaaaacataccgtagcagcggaatattgtgaaacagggtttcaacataatgcacactgtaatgggtgctacagtaaatattttctcacccaaaagttataaagcaaataaccattatttatttagcgaattccgtttaattttccgaggttttccctgacaaatttttgtttttttttcgacttttgagtattttcaattcaatcgtttgctgtccgattcaaaaactcgagacctgagactgaaaaacgcgagacttttttccgagtcgagattcacaacataataattactaattgtccctcaatttgttttctgttcgctgtgtccctttacaataccatcgaattgggccaaatgttcgccaccttcgccagccttctcaccgagtcattcatgcttttctttggcatcgccgaatggcttattttcgcccgactttggcgcttcaacgagcaaaggtacaaactgagcatcgcaaagagtgagcacaatctctcggaaaggtttcaggtaagaaaaaaagggggggggggaaattaaaaaatgaaaataattggggaaattggcattttatgcaaaaaataatttgcgaattcgttttaataatttaattttcagttgtccgaaaacattcggacgggcaaacagctgacgccaactttgtccttccatttttggatgctttttgccagtgttgtcactgctttttggagctatttcgactttccccgattcgaccaaatttacttggccataaatgttgcgaatggcgtcaccggactgatcatcgaaacactgatgatcacgtgggtctctcttaagtcatggtttggcccaccatttcattttgcttgacgtattccattgatcaaagcttatcgccgggatggaccattcccccccccccccccc

SEQ ID NO: 6055 - DNA, 865 bp, Heterodera glycines
ccgggatggaccattccccccccccccccccccctcccgaattgtgccagggatgaataaggaatttcgtttcattttttgattgtaaattgccaatgtgccgcaggtgccatcccttcctaaaacgcgatgctctcttcaccattcatcgaatttttgcgatcaaattgcaaaagaaccgcgtgcatgacgaaggacaagcgatgaaaagtgccgaaaaagagggcacaaaaagcattgcgatgcgcgatttgatcagcggaaagacaatgatcgactcatcgaagagccaaaccattcacttcgacgcacttcgaaagagttgggaggaggccaaatgaagcgaaacaaaaacaaataatataaaaatgacggatgcgtgatttgaatattttgccaaattgacaatggcacgggaaaaaggccgggtattttatggggggggggggaaatttggacggaccaatttaagcatggcatttaattattttgcgattgtacatattatatttacatatataactttgggaggtgccttcacttgtgttgccattcttcgaatttccgctgtctttgcgcgtcaaaattccctccggcggtgcttttgccgtggcggtgcctttcttttggcccttttcttacgacactttccctcttctccactctctctctcttctccccgtgtgctctttttctgcactttttctctgagttgcctctctctgcgctcttttctcctcagttttcgcgcaatgttcgccggcactttgtccgaaaatgactccccccatggcggcaaattcggctgctgttaattatggggagagggggggggggggatcataaactaattaaaatgctaatt

SEQ ID NO: 6056 - DNA, 2026 bp, Heterodera glycines
ttttggtaggtcaaccaccaaaaaaaggacttacgcccccgtcacgggcaatgcccgattctcccagtgccattgccattgtttgaccacctgaacttgccagccgagcagggcaaattggagcaaacagtacaactgcagagaaatgagacaaaatgcaaaaacaattggaaatgagaatggcacgcgaaagaaacaaaattaattttaataaaagttaataatgattaaaattgaatccgctcacaatgttccaaatggcaacggcgatggagaaacagcgaaggcaatggaaagggtcgtggcccacaacggcaacgaatcgctcgcggggataatgcaaattggcattcattaatagggcgaggatttttagtggcaaaaaatcccaaaataattaactaaatagtgacaaaaaaatggcaaaatagtggcaaaaatagtggcgaacaagatccaaatttaggggtgtaattttttaaataggctgttttttaatttgaaaataatttaaaataaggcaaacaactttttcactgattgcagttacaaaatattttcttagcaaatattgaacaagaaaaaaaaaatttgggggaagaatttttgtgaaaattttccaattcttaggggtgtatttttcgtttttattgcattttttgggaaattttccaaaaaatgccaaaatagtggcaaaaataatgacgaaacgccaaaatagtggcaaaaaattattttagtggccaacttccaaaataaattttttttagtggcaaagctccaaaatagtgattcctagtgatgaatagtggcgttaaaacgaagaatttccgagctaaaaatgtgtttttcgtgcatttctcgttgaaataaagccgcagaaaaatagttaaaaaactaaaaatcctcgccctattcattaggatgaattgaaaacggtgagaaatttatagaatttaatcgtttatttattttaattttggccgtaaatcgatcgattggtggcaaaggaaaagcaaaggaaagggccgaaatatttgcgaaaggacgggacgaaagaaggaatattttggggagaaatggacaaaaattgcacaaacattgcgggggaaagataaaataaataaaaattatattttttaaagaaaattgacaacaacatatttttattcactaatgtaataattaataaattcgtttggcatgccccggggcaatgtgccgttgctgacacgggcgaacaccgtggcggtcaacagggcaatgtaatgggacgcattcatcaccaattgggccgcatttgactgggggttgaggacgcgcaacgacgggggcaaaagagtggcctaagggaaggtaattaattaattaggtaattagtcaaatttgagttagtgcctttgtaaaaaatttacaaaacactcaccaatctgttcaattcgcgcatttcctccagtgaaagtgacttttcgctatccaaaggcgtggcacgggacgaatttggcgattttgaggaggacggacaaactgaaaaggggataaaaatgaaataaggaaatggaaatggtattatgtaaatgaaagtacagtaatttatcgtacagtaaccaattggcaaaaggttggtcttcgtctgcccaattttgctcaccttcttgtccaatgctccgtcggattgccattgtccgtcgacggcgccgttccctttgcattcgtcggccaatgccattgctcaaattggcagtgttttcgcgcgaccgggccaaaagacacataagaagttgattaatttaaatggcatttgccccaaaatgccatttattcagtgccctccattccccgacttcacagctgcacttttgccagatgtatatgctcgtgaagagccaaaatgaaggcaaaataagaggacaaaatattattttgtttgttcgtttcttttgctgtgccatcccggcaaaatttaaatattttttcttttttctgcagctgcactccaatggcacagatgtgccattggtgtccg

SEQ ID NO: 6057 - DNA, 953 bp, Heterodera glycines
ttaacattttaaataatgttttgttttttccttccttaccaattaatgattggcactagggttatgccccgaccccgagccccccgaccccgacccccgacatttttgggacctattccccgacccgacccccgacatgacgccccccgaggtccccggcccccgactttttgcccccgaccccccgacactaattcgggggattggggactccgagcgttttaaaaatttaaaagttatgcaaccaaaacatttaaattttacctatcactaagccaaaataaaagtttttttctcactcttttaaaaaaattaataatatataatttgccaaattacggtggaggtcggtttagtctggccggtttagtcagagggtcgttttagtctggcaagctgtttttgtcctacattgatccaattctgataaaatactggtcttaactgtaagcttgccttacactttcccattttcatactgccgtccttttggcattctgtccaccatgtgtagtaagcagtttgttttatcaaatttgtttgaaatttgcttgttctggcttgtttgttagtttgttacatctatcttcctttttttatcccctttctcagatttcaactcactcagctttttttcatcatggtcgtctggaaatctctacaaaactatttttgtgttatcagcaactgggttgcgagcaaaaagaagattcttgcatgtgaggatccgccgcaccaagatcttgcgtcagcaatgcgagcggcagggcttttgccgggacagaagctaactgcgtctgcattacaggagtttgaatttccaatcaccgaagaaacgtttattgactgctttgagcagattcagagtaataacaataatttcatttttaaaaatttaaatacgtttttcaaagatcttggcttatacaatggccaaacgcctaaagaactcc

SEQ ID NO: 6058 - DNA, 2105 bp, Heterodera glycines
ctccttcggcgctggaattgccgacgtacgctgcacccttaggagtaccgggctgtaaggaaggggctgtacggcacgattgcgtcagcagcagcagccgcagacatggacgaggagcagcacgagcacaacattcgggcgaagaaggccaaaatgatcgatctcaagacgcaaattgcggaagcacaccttgagagtatcaagttgcgcaaccgctccatggagttgcgccacatacagatggagtgcgacatcgccaagaaaatctcttgcgtcagcggcaaaagggtgggaacaaatttaaataatagtaaaatgtgagcttgttatctttctgagggattttgctcatgatgctaacaggaaagaatgcttacagttgatttttttaagaagtttgatatgcgtgtcagagaatatgctgaggaatttctggaagatgtgtcttctgacgaagaactccatgatgagacctttaccgacgaccacatgcagcatgaggtttcgccccaggcgtcagcaccagcactgaacagcggcgatagtgatggcacaagctcagctgtggtgcaggtgcgtattgatccgaacgtgtcagcagcacagcaacagcagcagagcaacttcggctgttcgaacagcaccggtactactagcgcatgccaatgctagtaggacagcttattgtgtggctttcagctgcagacgacaacaactctcacgtgtcattggtgtcaaccctatcaacgactccaaatgcatcagagactacgggcggcgaatacaccatcgatgagtcagagacctccggggaaaatgaagatgagggtgcttccgtaagtcttatcttagtgtaagctaatttttcatatggtagaagatggagcctagcataggaatttattgcttacagttgcacatatcccagctcaaaaccaatcaatgttcactttaaacttgtttaatattcctagtcgacgcaagctccacctgtgtcaacgaaaaaaagggtatcttttaatagcactattactgttgaagaatatgtcgcagcaattcctcctccaccaccagcgcaccgccgccggcgccgcccacggcgactcgtcgctttcctccgccgtcacaattcgctgcgaaccttttggtgtgccacaccacgcgccgtactgtcccagcagtgtgccgcccgcaaaccgaggggacgaccatctccatgaaagtgcgttcaggacaacaccccaaaaagactaaatatcgaagggattgttaggcctgtaaccagaaaaattttgctgaaggggggggggtcgaaaattttatctaaaatttattaacgaatttaagccatggatgtgtcgctggcctccgtcgcgaaggacctcggcttcgacggccacgacctgaccgacatgttggccaaactgccggtcgaggagggcttcgagggcgacatggacccggacgaggacaccctgctcagtaattgcccacaacattgggtggctttccagtccaaagtgtccccatgcttagcagacatcaacaaggaggactcggacgaggcgccccccggcacaacgctgggccacagttgggccgacgtggaacagtttctgctcgagcaggaggagggtctgcaccaaccaactagtcatatctattcaaatccgatcgatactcaaaaatgaacaaaacacacacactttgcattgtaaaaattgttgatcatttttccaccgatggacattactagggcgtcaaattatatggaaatccatattttttttcctggactgtgggaggcctgaaacgtacgaaaaacatgtttttggcttggtttgaagcctctaggacgtatttctatacccatatttttccatattttgcgatttatatccatatttgtccatattttggcatttatgtccaattttatgcccatattttggaattttttcaaaaaacctctaatagaacggcccccaacaggcaaattggccttttgacctcaaaaaccagaaaattttccaaaaataattttttagcaaaattttcacgaaaatattgaataatttaaatttgccgacaatcggatgagtttt

SEQ ID NO: 6059 - DNA, 2772 bp, Heterodera glycines
ccctagacattactttcaccacctttccgagagaattaaaaggttcaaaattggctgaccaaaaatggggagaacgagaatgcccaaaaccgctgattaagcccaatgaaaatgcagtggaattgtaccctaaggcaattttaatttcaaatattggggctcagtcactcctttggtttttggcagtggcatgaactattcggcgatcatgtagaatgtgccaactccaactaattgtcgaatgagtgattccattgttcgacgtcgctaaactctaagcaccattctcgacataagttaaccacgactctcgagctgttgtggtgagtgaccaatgaacgaaggaagagagagtggagggaagaaagagaagacagcgcaaattagacatagaggggaattggaaatagtgcatcgccggtcaacaaatctcactctcccctttccttagcctaacactatttcttttctctgttcttctgccgtggcttttccccttttatttttttatttttctttctctccaacaaattagcgtaaacaaaaaacactctctgcccttttccctttctccaattgttgccaatgaccaaattaatgatttttattttttatttttatatgaaaaattcttaattttggaattcaaaagattaaaaacgaatttaaaatatatttaattgacggtacttgtaggttttgtcacccccttgaaatttttctaggctaattttttgtgctggtcacaaatctgacgttttcttaacaataacatatttccatatgttatgtgttaaaaaaaatagaaaatgaagaaattaaagaatgaaacaggatggataaaggcaaaacaatattttgtagaatattatcaaattcatcaaaattttaaattacttaatttaaaaaagagcataataaaaacattaaaaaaaggatgttctataatctgtgactaatcgattggaaatgtattaatctgtgactgagccttgtatgagctgtttttaactttcaataaatatgtcatttggtgtttgatcattcattaattttaaaatgccatattctttcaacacgtaactcactgtatacacataatggtaaaaaataaaggtctaattcgagataagcacattaattagcctagaaaaaatatctaaaaaaattcagagggaggggggggggggggggtgacaaaacctacaagtacctacctacctaattgactatttaatattaattgcttccttcatttatttgcaaattaaaaatgtcgtgtgatgccgccactttggcggatcggattaagctgcttttgaccactgctgctgctgacgatgcggacgtgcattttttagtggggaaaggggaagaaaaagaggcgagtttggccataaaaaataattaacatttaaataatgttttgttttttccttccttacaattaatgatttactcatttgagaagatcaaaaagcaaatttcttgctaattagaagataattaaataaatgccattgatggcaaatccgtgctgatagcattttattataactaattgttaagcttctttctgcgcacaaattgattctgaaaaccgcttccgatgtattccaagcgatgtttcgcttcgatgccgcaaatgcaaaagagaaatatggtgaaaaagcaaaatgcatgaaaattataatttaatttaatttttgcaatttttggctctttgtcgaaccccgtggtggtcactgatgtcgcggccggagatttcaaagcgatgctcaaattcatttacacggacgaattggactcactgttatcatttcacttgtatttatttgctttaaaaacctcaaaatacagttacagcatgcatgggattcgaacctgagaccccccttttggtgactaactcacagaccactaagacgaaaaatccagcatacttgtacttggagcccaaaattgggccgctgtgtaaagcaagcatataattaatttgtttaattaaatttatcttttaatgatataaataattatattaaatgcaaataataattttaattagccaaaaaatacaatgtctccgctttggtcaaagcgtgcgcagaattccctttgtcaaagcttaacaatgtatttgaaacgctgctcaaagcccgctttattgaagaacacgtaaatttacaaaaaaaaattatttacaatttctatttctgttaattaatattttaacaatttccatttggtaatttaatatttaattagtttccaattttgctaatttaatatttaattaattcccgattttgggccttcgcttcgcattatttgcatttcattgacaaaaacgcggaaacgctgttctgctcggatgcctttttacgaattgatcacaaattgttgtgtgaacttttgggacgcgatcagttgcagacaaacggagagatttgcatttggaaagccgtaattcaattcaaaattctcacttttttaattttttgtcttttgccaggccctccgttgggccgacgcgcagtgccgtcagaacggcactgattgctcaacggagaatcggcgtaaattgctcggctcggcactttttcgaattcgttttccgatcatcccaaaaacggaattcgcagagagtgttggtgagcattggcaaaaatcacctcccaacttccatttcctcatatcaattttattttgttttcgcagttccgtccgatctgttgaccaaggaggagctgatcagcgtgttactgtaccatt

SEQ ID NO: 6060 - DNA, 1139 bp, Heterodera glycines
gcggctcaaatgtcggcggcgcaagtgtcggcggcgcaaatggcagcggcgcaagtgtcggcggcgcaaatggcagcggcgcaaatgtcggcggcgcaagtgtcattttggctgggcggcgcaactgtcgcggcgcaaatgtcggccaatcaacgcaaacatggaaaaattgaagttttaaaaggaattctttgagaaaatattttttgttttgcaaatctgaatattcaaaaaaaaaaacggataaactgtagtgaactccccgtgaaaaaaagggtcaaatgatataccaatcgattcgtcccgaggagcaaagaataaaccggttcaaaactcgaaaaattgagagatttcgcactctaacttttttttaaacgatcgaatccccacaaattagtaccattcgaaagctcttggcgagctaagtctaaaaatcattgtatgaagtcgaaccgcgccacctaaaaaccgacaagtataaaccggtggtttttgaaccgattcaaatcctatagtgccaattcagtaccaaaggtaatttttaattatttgaattggcggcgcagggaaactggtgcaaataggtcattttgtttattgcgctaaaaaaccgccgcacactcgactacggcggccagtaggtggggcgagactacgggctacgggagaagtccgcgcgtcgcgggtcgtagtcacgctccacccctgtttgtcctcacattttttgaaaaatttctttttcaaatttaattaagtggttcgggagttaaatatttaattcttcaatcctgattttataggaaatggctattgataagagtgcgcatcaaaagaaatttgtcggcactatttcggtggaaccatcagttaatggtaaaagaatactatgatgataataagtcttctataaaatgaccaaatcatttttcagctcaacgactccgacgcgaacagcagcagcaccagttgttggacggacagaacaccggcgaactcattcaacaaatcttcgacgaattaaatgcccagcacagttcaacaggtcgcattttggagagaaatgggcgtgcgttgttcagaattgccgaccatccggggacggagacgccgtgccatgtcccaaaagggcagcagtaatt

SEQ ID NO: 6061 - DNA, 847 bp, Heterodera glycines
  unsure (1)..(847): unsure at all n locations
gcaggtnncggaaatatggacataaatcgcgaaatatggaaaaatatggaaaatatggatatagaaatccatcctagaagcttcaaaccaagctaaaaacatgtttttcgtgcgtttcaggccttccacagtccaggaaaaaaatatggatttccatataattcccagccctagttatgagcaattttgtctgacactggggcgtacccatagtgctttacttcagttgggcgcgcacgattgggcgccagcatgtttttccacttattcgaaagcttaacatgtttagaaactttttctaagatattgcttcgcaattagacatttaccaaaaaagttatgctctattgcagttcacacaaccataaaaaaaagacacgactataaaatttttttttgcaactttagtgcaatccaaattaaacattattagtatcattcgatagctctaggagggacccacgcgtttcggcgctcccgtttcggcgctcccgtttcggcgccagctcgtttttccacttaagcttttttctttggcatccaaatccaacaatcttggtatcattcgaaagctcttaacatgctctattagccttatcaaaaacgaaaagtttttcaagcctgtaaaaattttattaagaaaaaacttcaaaaatttcgacttttcgtaattttcatgcataactgttttgataattgtctaatcgcaaagcaatagcttagaaaaagcttctaaatagattaagctttcgaacgacaccaacaatgttggatttggtttacaaagaaaaaagttatagccaaaaacatgctggcgccgaaacgggagcgccgaaacgcagtggac

SEQ ID NO: 6062 - DNA, 3422 bp, Heterodera glycines
  unsure (1)..(3422): unsure at all n locations
attgggttttttttccaaattatatattatttgcttgcttttccttaattaatcatttatttttgatggctccaatgtgtaatgactttgccttctcgaatcgttattgtgttgctctgtgccttgctaatcaaaatgatctttcgctttcgcgtcttcaaaatgagctcctcgggggattgactgcaggaatcagcggccatcctttcaatcacaacgttcgttcagctttgctttgcactggcatttatgtgctgtactcacatgggaaggtaggacaatggccgacttcttgttaattatccttgttaagtatgccgaaacgtttggcaatttccttgccgatgcattaaggtcatttgtgcttccatgaattgcttctgaatatcgtttaggtcgttgacaaatttgcgttggtacgatgatggagcgattgacaaatcgaacagtgtgttttttgatttaaatgcattcctttaaaagtatattttatttattttttctaaaagtatattttaatttttttttccttgttttcttttagaaataaccatccatgagcagttcgcattcagttttaccactttgcttagcgatatggccgcacatttcccacacattcgttctcgcattatcagtgaacaaatatcactcattgaagaaatcattgataaactctttgattatcttaacaattcctacaatggacaccttggacccgttaagaatggcaaagagaaccaggaaatcgaagtgatgggtttgtttttctttcgcttgctaaattactccagataactaactcattgtcagttgagcttatgagaacgacttccatactcatcggccttttgagggcatttggcagatattgcaacgacatatcgtttccgctcatttcgcttatttaccctttgccgtacaatttaccaagaaaaccaactgacgagagcatccatcggaagtccaacgcgtgtcatgttgggtaagcaaaagggaatttaaattagaccgaataaaagactcaaaatttttagctcacaaattacccaattatgtagaatcacctcaattaaggatttaaaaaagatatcatactagcaataagacatttttgagttaaaaagcgtttcttttcgttttatttatttatttttttgtcgtgtcggattaaggaatgcgtttttcccgacaataagacactttcagattgaatactgattcttcaaattggttttggaacgaccaaatgaaaactgaaaacgacacaaattgttacaaaaagttgttcacccgacatggaagtagttttttgttgcaaagagaaccgtcatctgttccaaaatttcgcgtttgttttggtgaaattcaaaaaataacgaattgcgtaagttttattaatagagtgctcatttttcagcacaaaaaagcaccaaaattgcaaaattagcacaaaaattaaaaaagcgagaattcagcatgaaaaagttggacttaaagccctcattataacttagaaatgcgtttttcatgcgaagctccaagttagcaaaaaatttcagcaaatgctgcaaaatgggcacgctgtatattatatatttaattttattgattttaaaattatattcacaggtcaaaaagttactttctttggatttattgtccaaacttgattcaatcgcgggtcaagtttttctatcgtcagaattacgcaaatttccttacaaaaccgtttcggagacgctcattttggtatcagttacacttttgagagatattctaagcccactgtcaattggaagcggtgggaatgaagttctggagtgttttgctggcgaggtgattggtttccgaaagatttaaatagtttttgatttactttttgggacaattccaaaccctataaatccacttgggtgcatcgataataaatactctaaaattattcagctgaacgagttcgttctgtctttgttcaaacatggtcaggattccatcgctcagaaaagtcaaattgacgagcgcaacgcttcttccgtcgacagagaccgttctcttccacttaaacaacagattaatgataaagaaattgccgtgaatcgagtcaaaatgctggtcattgccaattctatctgtttggaattgatcgtttggagtgcggtggatgaaagtggtaagcaatggaccaattggagaatgggttcttttgtccatttcagacggggatatgatttgtgggacgatatcagagaaaatgtggctgccgcaccgccacgtgttggctcatatgcccgttaatgtgatggcactggaggcattgggcagtatggcggagaaattcccaactctctcaagcactctcatcattcgtcttctgagcaaatttctgactgatccttgcccaattttgttgaaaattgcctctgaattagtaagatagatgggttttggcttattctaatgaagtgccatttcaagaaaccgaaggatcaacaacaccaacaattaaatgcacgagaagaattactttccactcgacgaaaaattgggctggcaagtctgcgatctgctgcaattaattctttgtcgaggttggtccgttttgaagaccaattttacagcgccgtactttagggcgctgaagtcggcgttgctgatcgatcagagcagccttcaggcgtgtctcgccagtctctcgtcacgtctttacactgtcgcttcggagaatgataggtggggtaagaaataagccacttttagattacttggcgtctttagcaaggctcttttggtgtctgaaaatctcatccaaactcttggcaaattgggcgtttcctttgtcaacgatgcttcttcttccgaacttgtccttcaagtatttgtcctcatcgtcctgtcgatggacagccaaaaaattctttgttcagatatttttgcaacgtttttcgaacccaccttctcagcaggacaatttgatcatttcttccctggccgacatgtggatagcgggagctgtttgtcttttctcttctttttctaacaaatttattttttattgtgtagaattccattcacgacaagacaatgaaactgttcaccagagtcaccattgagtcgagcagtcgcgtttattcttccgatgcgctgcccgacagtcgttatttgtaactctcactggaattaatcgttcacccaaaatgcatttaaggcacgtttcattggcagttgacaatgcactcgcgaaaatagcaaattcattggattctgaagaacagcagactcttttcttattccgtcttttggaacttttcattcaattgggactcgaaggacaacgtggtgggagagnaaatccccanattcactggcanagttgatttttatattaatggcaggnctgctcataagccggcctgcaccgc

SEQ ID NO: 6063 - DNA, 900 bp, Heterodera glycines
ttcaatggggactcgaaggacacgtgtgggagagaaaatccccaaattcactgcaaaagtatgattttattaatggcaggcctgctcataagccggcctgcaccgccaagggcttcccgatcggatacctgataatgagaccttctgtcccgaaaatgtcagggaattgaccgaaatttttgaacgtctgagccggtcttcttaaaaatagtgggccaaattttcaagcctgggtcggcttgccaaacgcaggcctgtattttagtttcactaattgaaaaaaaaacttctagaaatctgctggcgctggaaatttgggcgttttaattccaaaaattgcgtcgttgctttgcaaaatggaaccaattcgaatgccatccgtaaagttgaggaattactttcgtgacttttggttctactgtgtcacacttggctttgcctttcccttaggttgtctttgattattcttattcacttttccccgtatatattgtttaggtccttggcctgaggaatggtacaatgccatttgtaaaatagcatcaaaatctccagcacttttaccgcatgaaaattttaaaacggaaatggtcgagaacgccgcaattaaagtcgatggtatcgcaacggtaaacgatcaaattaatgttgaaaataaattaaaatttttatagactgagcatcagcaagtgcggaatatcatttccaacgagttcaaacaaaatgcggaagtaattgccattgtttctcggatggacattggctattgtctgtttcttttggctgtgtgtcgccttgagaagctgcgagtggtttactcgaggcattccaccgtcgttcaaacgctttttacatatttggaaaatctgttcgaattgtttcgatttgaataatcaattt

SEQ ID NO: 6064 - DNA, 2280 bp, Heterodera glycines
aggtctgcaaaaaaaactaattatttctcacaaatcatcgtacttccccctccctcccccctcctcccatttcgtcaaatgcccccgacctccgatgctatgtgagtggcaatttgcgagttgttctccagtcccaggaacaggcgggccttgagtgcgtttttcgccgcgtccacttcctcgtcggtgatgcccatcgccaaatgcttccacgcgtgcagaacggcacgggtggcttcgccagtaacttcgtcactatgccctttcatcactatgtaaaagccgaagaggctgaaaaaaatatattaaaagtttactaaataaaacagaaaatgtaccctgtgatatcgtagctgatattgaaattttcatatccgatcaaatcgtcgttggcgcacatcttctgcaccgtggacttcggagcgttcagcgatgcggcaaaggaacgatcccatgtgccaacataggcatttgcaacctatgaaaaacatgcaaacgtacaacaattatggatggggacaaacaagttgggaatgggtgcactacgtttgcctcccgccgacccacccccccccctgaaaaaagcatcgaaaattgtactattcaaataaataaaatttaaacaaattcgttaaaaattgtaaacgccatgttgaccgatgtgcccaaaatatgccttcagtgcccccccccccccagttctcccaccagcatggcgatgtagtcaaggtggtttctgccaatgccctccaccgcaattgcgccatgcattagcgggtaattgtcgtcccggtagaggaactcgccggcagtgaaccgataaccctttggacggatttgttcgtgaccaatgttgttcactgacgccacatgtggaggcactttgcgattgtacgaattgccaaggtggccaaagtgtttttcggcctgaaaataaatgaaagaatggaaaaaaaattccaaagaagtccgccaaagtaataatgataatataaaaaacgcaatgttgtaacatgccccaactgaccaaatcgctcattttctcatggtccacaccaccaacagccgtcagcaccattccgctggccttcaaaatgtcgtcagcaaattcggacacggattctttggtcaatgagctaaagcagtcacatcaattgaaccagactccgtctaattgttggtttttaagtttgcttgccccacttttttgtttccaatttggcacttacttcaatgcttttgttgtgccaagtggtgacagtctgagcggtgttccttggaaggcggtggcgtgcaaattgtcgagcactgagccgcgaatgtcgcccttctcggccttatgcagtcgatccaatgccacggcgcgttgctcctcaattttcgacgcgtcaaagttttggttcagcaacgcatcggcaagcaattcgaccactataaagtgatgaaaaagcctaaaataaaagagaaatgaccgaacctttatcggtgtccgatttaagacattccacaaaaaaggccgaatgctcccgggtagtgaaagagcgaagccgagccccaagtttggcgagctccgtttgaagttgcaccgaatttcgtttccctgatccctaaaatttattagttaaccaccaaactataaaatctggtatcaaaaccaatgttaccaaaaaatgagaaaattcgaaccttgtgcagcaacccttcaaaaagtgaagcgattccgttgttctcattggtttcaatcctcgagccagcattcagccaaacaccgacctgagtttttagaatattgtaaattgtaagctaatgcggaaatgcaaatccaaacgcaccgtcactgtcggacgtccgtttgcataagaggcgacacgaaagccgtttttcagctgactcagctcagcagtgtcaccgcggtctcgcaacacttcataagaattgggaagttgagtctgaaaaggggaaagattttgtattactcaaccatttgtttgagttcgtaccaaagagcgaatggagcagaaccgatgaatggaaggaaatttcagcaacatttttaacatacgaataataacactaaacaaagtaaaatgataatcattagatactgaacaagtgctattgcaaataaaattggctctaaccgatccagcaaaattttctctatcgatatgcaaaattaaaaaaaaatctgtaaggtggaaaaaaagttttatagagcgaagtaaattcggtttttctctattaacagagataaggaaaaagtacgccaaaatgagagat

SEQ ID NO: 6065 - DNA, 4650 bp, Heterodera glycines
taaactccgaaaaaatgcgaggggataatcattgttaaaagaggggttctgtttacaataattcatttatcttggttaaaaattatttttttacggaattgttatatgtcaaatgtgtaaatttcatcttgtaaaaacaaaattacgtgtttattcttttcttgtctcaaaaactacctttttatccttgtagagatttttacaattgaaaaattttttgcaaaatcaaagaggaattgaatcttttagcgcttttttcaaaattttatgatccattctaaattttcaaaaattttgcaaaaattaactcaataaattttaataaattttttcttcgtattttttaaaagatatttataatatttttttcttgaaaaatatctagattcctggtcggaaacggtatggggggggcgaactgctcccatccatggatgccttgtttacagaatatcaaaaaaatgacaaaaaatttcccttctctccacagatgctatgtgatcattcaaaatgtcgctgaacacagcggcagtgcggaagaggacacggaacggatcaccagcattgtgtacagcgtcgtgtcctccgatgggtttcgacagcgatgcaatcaaatcaaagtagtaataatacgcatttttagggaatttgtcacgactcgatcccaaattttcagcagaaactcgacctgttgaagaactccgccgtggccaccaacgcgaccgggcagccgattgtggtggcgagcggccatttgccgctgcgaattgagcgtttgccgcgacgcggcaccggcagcagcgcgtcgcgtagcgcaacaacggtgacgacggcacgaggcgagggccaacagcaacagacgacgacaatgacaacgggagcagataaacagtggggcgaaggcaaaacggcggacggtgccaccgggggtgaacaaagtcggcactttggcaatttttggggagacaattagtttgggttaggaaaatacattgaattgtatttccagaagaatatgactggtcaaatgcaatgggatcgtcgcgtcccgcacttatccgtgttcgcttccgtaatcgtgaggccgcaattgcattctgtcagctgttcagggtgggcagggcgtttttctcttttgtttcgtcttttcctttttccccctcttctctacttctcttttattttctctcctccgtttcctttcctcttatcgcttcctttcacccgccctcttcctgtcttatcattctcttcccctctctcttactctttcttcttttccctcccctccactctctctcactcattttccccaaattttaggaacggcaaatatttctgcgtcaaaagagacagcagcaaccaaaggggcaggacgatgagtgcattgtgagacagcacgggacgggcattgattgtggggaccgtgaaacggatgcagggaacgaagaagaaaaagaggagggggacggacagcagacggactcctactcggacttgtccgacttggacgtgttcagcagctgcgatgaggacaccaacggtggccatgagaagacaccgccagtgacgagggaggaaacggcgaccaaagaacacggaaagaaggagggcggagagacgaagacggaaacggaagaaagtgttggtgaagagggacagcagcaaaagacggagagcaaagcgaaggcgacggaggagggagacaccaacaacaacaccaaagccagcaacagcggcatgaagcggaagaagatgcagtcgtcggcttcgcagcgtcaccgtcatggccactgcagcgaacgccgccagaaacacaagcagcacctgttggactcgctcatctgcggtgcgtttgcccaccgggacctgacgccgccggagttggcacttggctacgcactccgtcagcactgccgggtcagtcactttgttcgccaaatcctacaaaaaatattccttttataaatcttatatgaattttttggcgctattgcattttcatgaccataaatacacgactataaaataatttgacaactttaatgcaccatattttaacttcaaaaaactggctttctaaatatttttgactacaagtttttgaatcttggatcaattttgtgcattacagttctcaaattattttatggtcgtgtctttatggttggctaaactgcaatagagccaatttcctaacgaacctcacgagaatgagtttccatgccacttattaattcgatgcttgctttttcaaggagcagaatcgtgtcccaaactctcgtgtttttctgtacccgcgtgccggacgcattttcgaacgcaccgccgccgcggaggcaaaataatgaattggtcgtgtaagagagattattggactgatgactcgaaaataattcatttatttatttcttataatgttattattattgtgtgtgtgtgtcccgttaaggtttgtttgggacggattattatggcacttttgcctctgttattttattattattatttgtgttttaaacgtatctcatttcgttcctcgactctcgccattgctgcataaataaaacgagaaatccgaatgggtcaaatttattttggatttacgcattgaaatgctaaatttgtggatttgtgcagcttttcctctcctccatcccctgaagattttatccgttttcttacgcatttatcgctgttttggttttgatcggtttctgtttgacttttgccgtgaaaacaaatttgttgtctcttctcaatcaatgctttattcctttttgatctgctgatgtcaagaaattatattatgtgctacaaattcacctcaccccccaaatcaaataatttagctttaggccaaaagtgcccaattaatatagcaattttaatcgctcttaaatcacatcaaatgctcccgacatcaattgttttgtgtatttagtctcattattgaaagacatgctttaattcgcttacagtaccgttcctgttcatactgtccacatttgtagtttgtttgttgtatagtgactgagtgagtgaccttgacccgttcattttcttcaatcgagttggatataacgagggcgaggatgaaatcctgagattcctacgggatgaaatcctgcgccccggctccaaccatttttaaatacaatttttgtcctaatccgccattccttcgacacaatgtgcacattttgcatttgttgatcccatttttaaaggtttctttttcataattgtttcaatttgccctttttgtcctttaatcaaataaaattacattttattatatagccaaacaataatcattctcgatatttggaatcccactcattaattgttgacaaaagttcaaaagtaattcaaatattgttctttaaaacattaattaaaattttgagacaggaattctggaaaacttttggttttattcaaataaagaaaattaaaccggaggataaagcccaacgcttaaatataccctgaattatttataatagcccaaaaaacaaatacggtgtctacagtattgtatgcctgttcgatcattaaaaaatagcttttctatcattctttttgcatcggtttccctcccatcgatgtcttaccgtatcatttgccgtccttgtcgttaccgtagtggaattgaggggcagcgcggcacacaaaccctttgagcgtttggggcggtgcccatgggactatcgtggaaatctgctcgaagaggcgttgatccacctaattataaagcaaaatcagcataagtcagtcagtcttttcccttttgattgctcactttggtgccgtcctcaaaataactcgagccgaagaaaatgccgatccaaaagtgccgcaaatcgaaattggcagtgataaagcgaaactcatcaacgctgtgcacagaacagaagctggccttaagttggacgagttcaatttcgaaaaacgtggcaagacccctgcttaggtctgagaagaggcagaaagcaattttctggaaagaaattccaaaaattttttttattgttacaattttccgatacgaaaaacgcaaatgaataatatgcctgtcggggcaaatcaattagcaagggtttcaccaatttggcatttgagttcgcctgcctgaatctgtgcgcacgcccgcacgccgaagtaaaacggcagtcggacttgagacagtccgtaaaagtagggttgcgtccccgacgtcggggttggaaaattcggggttcggggttggaagcgtcgggttcggggtcggggttgccaaatcgttcggggttcgggttcggggtttttcaatttttaccttatgccaaatagtcaaaattttttaaatattttttcggaaataatatttattaatttccataataatatttgtattgtttttatatttttttatttcttttttatcagaaattttgtatagaattaattttatttcttgaaattttaaaattttttattacttttttgttttccaaaacatctttttcacgtcgctcttttctaaagacttaaggagaaagggtacggcgtccggcggtcccgataggcgccgccgggaaaatttgaaaatttggttagatctgttaacaaatattgtccaacaaatgctaaatttttgcgattttg

SEQ ID NO: 6066 - DNA, 2180 bp, Heterodera glycines
caactcgagttaattcgcattcatccggcaccataactttatttggtttttcgtttttggctcaactttggcacaatgtccgcagccaacagccaaagttcggcatattcttccaaaaatggtccaagcattgaattcgtgaaaaattctttgtgccatttatttgtgaccggtgaagctaaaattagtaaatttattgaaaattagtaaatttcgcgaccacctttattaattgtcaaaaattcgcctgaaatcataaatttgaattcgatattaagaaacggagaagaaatgtctttgtacgaattactaaaaaatgaaaaatgtttattaatgtaataatgaattaatatagcataataaattctttgtaaattaataaaattatattccttttttggagatttattggattgtccataaatattgtcaccctttttaataaatatcataacttttgtttgtcttaagtttttattgatatatctgggatattttaaagctatacgtttctcaataatttggcacttttgatatgttctttaggcgttttttgaatttttagcaaatttaagagttatgaaagtcgtatgtagaccctgaaatccgagcacacaaacacataaatgtgttttgattcatttttagtgttgacagtatttatgggataacccaatatttacagtatgctctaaaattacaaccaaataaagtagtatttaatttttctaatttcactgactcgaatatgtaattttgttttccgaaaatgattgttgcgttgcgaagtgaaaattgaattttcctggcattttcgccgcatttgccactgattgttgacccattgagcattttgtcgaatttaaatcttttcgccaatttccatggcacattcttgccaaacaatgtgcttctgtagcacaatgaaaaacttaattatggaattaacaattatatctgactaaatcgtttaatttgttcttaaattgctccaattaaaaaccttgaacaattcccatgaagttcatatttaactttgataggaccaaatttcgtcaactccaacggcactttcctaaattctttttgaataatgaaataattataattaagtaacgaattattttatttaatacattgttctgtttgaaacagcgaaacgaggaagaaagcacataaaaataatatgaagaaaaagcattgatgtgttattacgttattacaattcaaaagcgaaagattatacatttgctcctttttagctaatgaaaatcgctttgaacaaaaaaaatgagtgtgaatcattcatcaatgaataaagagtgtacagaaaaaataatattagtgcgatcatatctaaattatgaaaaattgaatgttatttaaaaaataataataataatagtaataatactggaggaagcaaatgtaaaaagaaaatttaatatttattaaactttgttaagataattgactaaagatttaagcattatttgccagattttatgaaaatgatatgtatgagtcatttttttggcataatattttgggaattttacaacaacaacaaaaatgcaagccgagaaatggaaaaattggcacttaatttagtattttactgaaagtttaaaaggtaaattaacaattatcaaactaaaataaaaatgggacataatttcgattggagttcaattgttgacactcaacctaactaattatctttattcaaattaattgtgaattccaattaaatttattgccaaacgaagaatgttttcacattttatcgggaataccaattaaaaacttaaatttggattttaagacctttaattatatcagtgccaaaaagtaataaatagaatcaaatttattaattttttcaatttcataatttaggataatgaaaatcttttttctaataatatagcccaatttccctggttaattcttcgtcttggaaaaataagcattttttactgagtattttgaccaaattattataaacggaactgattgagtttttcctggttccggaggtcatacctgagaccgggacctgggctttcaacaaaccgggacctctggggatccggaaattccaatcccgggccagtatcactctaatttaaatattattagactcaaaatgcaaatttagaaaaaattgagttttcgaa

SEQ ID NO: 6067 - DNA, 2847 bp, Heterodera glycines
atcctgtgttcgtaattgggcgaaatgtatgcctgattcgtgttcagtgacgccaaaaataaatctacgattaaccctccaaaaatgctgaaaataggtaaatttgtttagaaaaataagcctagaagtaatttcggatttctctgaaaaataacaaatttttacgttgattaaataccaaaatacttaacatgaatgttgtgggttatttgaaaaaactggatcagattcctagtttgtagtttaaaaaatgtatttctaaggcatttttctgccctttcaccaaattaggtaattcttatttccaaggagtcgataaaatattcagtttattaaaagagtagagttcattatgcaactctgtgggcttccagcaatggtaattcgtgtattggtttttccaccggtaacataatataaattgttgcgtgctgacgcattttataaattccgccacccatgcgcgttttataaatccgccaatataaatcagtatgctttatataaatttattatttgttgtgaggacccttgtaagcaaaatatagcaattatttaccaactttaatactggataaatccttatataatattttatctgaataaagcatccgaaaatttttttacttgaatttgtacgacattagctatcacaaaaccttaataactatgctaattaataaagtgttctatggaattaatttaaaaaattcatatcaggtaatggtgcaaaaattttaggagatcagatctcaaaaaaagaaataaatatcctgaagagctgctggaaaatatttgataaattggattgtaattaccctaaggactttattttagacattttgtataaaatatagctgaaattattgcataaaattttaatattattaatgatatatgcaaaaaaatatgctggcggatttataaaacgcactagcaccaattgttggaaggtaaaaatgttttgtcaaaaagctttaggcttaaatatgaccccatgagtagcttttatttttcagtgaaaattttggattttccaaaaaatgtgatcgtgtcaaaaaaaaatcttttttaattgcaattttgttcaataatttgtgaattttataagaaaaattttaaaaatcgcgaaataaaggcgaacataaggatgaaacgccaaaatatgggcaaaaacttattttaagggcgaacatctaaaatatggatttttaagggcgaatacccaatataaggaattctaaggtcgaataagggcgataaaacgcaaaattttcgaacaaaatatgtgtttttcgtacatttctcttcgagttaaagccacagaaaaaataagtaaaaacttagaaatccgatccctacttattactgactagccaaaaggtcgggtgccgtgatgaaccaaaacagcaatgcttcttacaccgctgcacccggtacggtcccccggtggattggatttaattaaattctctccttcggcaattttttttcattaggtcgactcgtcaaattttaaggtcacatttcttaggcttaaatggaagtaaaaattaccagctttaaatgacatacaatcgagattgtggaaagcttatatgacgttcgtcaaaaaccatcatgacaatattttaacaacacaaaatgaacttaacgtgttttctctaattatatgcacgtggtatattatttttcaacctcttcagaaaggttggagataattggagacggggagattaatggagatgggcttataataagtaaaaattcggtatgcctatttttaggcttaaatttaaaaaattcatcgaatttaactctttctatagttaataaaatcgcgccaaattttataagcataatcccgggtacaggactaacttaatctaaactatttcaacgcttattggttttaaaaaaaatactgggttttctattatattattttttcagaaagtgctctgaaacgcaccaaattttgttgtcatattaataagcattctaatgcatatattttagagaaggcttatgaattcgattaaaaaaaaatttatgaattattaaatatgcctatttttaggtttaaatttttagtgaaaattaattacaaataattatccgaaaaatgataagaagttcaacaaaattttttaaaggcatcaataagacaaggaaaagcttctctatgataattttatattttttatgaaattttaaatgatgcctttcattttaggcttataattttagtgaaaattttgtccctcataatttttcggtaaatgatcagaagggcaccaaactttgcaagcatactaaaaggaagagaatcaacccattatcaatttatcatcctattgaaattttctgaccataattttattataattttgtaaaaaaaatttaaaaaaaaattaatttctgtagagctattaaatgataccattaaatattaatttggctgaatttgagccaagttatgagtttatgtgttttacattttttaaaaatttactaccctttggcggcatttaagaaacgacccagcatggtttttaggacgaataaaataaaattttaatataaaaacaaatggaaattttaatttttttttttttaatattttatatttatttgctaaattctaaaattttattttccaatgattcttaaatatattttgtatgataaaattttcattaaaaatttccaatttccattttaacttcggctgcctctccttttatttattatcatgacatttatattatatatctatcgtttttcttaattattcatctaattagctagtacacatatatgtttaatttgtgtgtgtcttccctt

SEQ ID NO: 6068 - DNA, 3077 bp, Heterodera glycines
  unsure (1)..(3077): unsure at all n locations
atatttcgccattttttggaaaatttgttaacaaaaatgcaataaaaacggaaaatacacccctaagaatcgaccgaaaattttttaaaaaaacaccactaagaattggaaattttctcaaaaattctttccccaaatttttttttcatgagaaaatttttgatttaaaaaatgtcaatatttgctaaagagaattttataaaagaaatgtagcagctctttggcaagtgcattagtaaaaaaaattttttttattgaatttgcacccctaattttcaatttttagtgcatatttggtgcatattttacgatttttgtgcatatttggtgcatatttcacgactttatttgcatatttatgtgcatattttggccacttttcgtgcatattttttgcatccctgctaataataatatatatttttatttaaaatattaaaagcataattaaacagaaaaagtaattactgagacaaaagctaataaatcgttcattcatttaaagaattcatttaactgttttttattccctacataagtaaaactttataataatcttataaaactaagtctgtgaaaattctttttataaaaatttttgtttaataataagaaaaattaaataactattttcattattcagtgagtaaggctgcgatttttaggcaatttcctaaaataactttgcctatttgagactttttgtgcttactgccgaaatgcctatttttcgagcctatttcgcgattttttgtgcctaaaaattgcatcgctataaatgagaataaataataatagaaatatcaattttcttattattaaattaaaaaattttataaaaaataaacaattgtttcacagaatatatttaaaaaaattatttctttattaagttttattatatagtaaatatgcaaaataatattattattaaatagttaaaataatttgcttttcatttttaaatattttaaataattattttgtttatagtttgatcactagcagggatgtgcgaaaatcacaaaaaaaaaatttcgtatacgaaaccgaaacganaaagggcattcgacaagaaaacgaaacacaaaacgaaaaaattttgacggacgaaaacgaaacacgaaaacgaaaaaatagccattttcgtacgaaacgaaacgaaaaaaccgaaaatttttaaatatattcaattttaattaagaactttaaaattgtatcctctaactgagggaattaagatcctagtaggtggaaaagcggatgtggctctaggacaggggtatgaccgaaaaattttcaaaataagaacatcaaggacaaaaaattattgaaaaattttgcaaattggaaaaaaatgttttttgtgataaaaactcaaaatttttacgattttgaatagcatttcgttcaattttttatgaaattctatttaatctccaattcgtaaatttcttatgaaatgaatttcgttttaaatttcttaacttttttacggtggatttgtaaattttttcaaaattatacatagatagatacctaattttcgtgaaaatctgttagcaaaattcatgtaatcagttataaatcacaatatttggccattttttgttgaaaacctgttaacaatttgcaaccaagtttaaaaattttccccggcggcgcctatcgaccgccggaccccaaaaactcttgtttaatgttcgtaataaaatttatattatgtgtataaaaaaaaaatttttacgtgataaagaatagtattaatcacttgttgcagagaatttcatatttaaaatgtaataaattttatattattaatttttgtttttaatgtatttgtcgaaaattttcaaaaaaagtctaaatagaggcgaaatgccaaaatatatgggtagagcacagagagaaaatctcgcggattcattatcatcagggaacggatttatatgtgctaaaaaacgccaaatatgtacatatatatgtgccaaaaaacccccaaaataggtgcaaaaaagcccaaaatatgtgccaaaaattgaaaaaaaaattgctcgaaaaataagtgaatttctcaaaagtctcattttttatccatttcgctagtataatgccaattaaaagcattataatgcgttttggcgtaattttttcacgctctcaaagatttactcatttttcggaatttttatcgcataaaattaaattttaccttaaaagtgaaaaacgacatgaaaagctacaaaaaaatgcaaaaaatagaaaaaatcgaacatttttggggacattttgccaagaatttgattgccaaaaaagaaacttttgtaaaaaaaatcaaaatttctcaaaaaatcgccaaaatatgtgccaaaaacgaccaaaagcccaaaatatgtttttatatgtgctaaaaactcgctctgattgaaaggaaaacaggtataaatgctattttttgagcttttcatgcgatagcatatgcgcaaaaaaaatatgtaaaaacatataaatccgttccctgattatcattatacaaattaaatttatttttcaaaattcggcatttcattttttgtttaaatcagttgcctttgtgctggtcagcgtttacaagaatggcacaaagatgtgccaagttttctcccattctgcccattttttcgctttggcctgctgtgtcttttaaattgcattcattttggtcggaaaatgccaaaaaaaaaacggtagctcgacttttaaaatggcggatttggtgagcaacggcgcggaggaggcctgagaatggcacacaattggatttgctcttcattttgtgcttttgggttgtggtgatggaaaaaggcacggcacaaaatggtcgtcggcagcgccgcgcccatcaaagaaaagtagcggaaatcgggagagcttttcacacaaaagagttggccggctggcgcttgccgccggcttaggccaatccggcacccgtgccctcctcgcccacaaatccaatttgaccctaatgcctccaccttttgtggcatcagccctaccccatcagtagcaacacacgaatgatcccctcttccctc

SEQ ID NO: 6069 - DNA, 4173 bp, Heterodera glycines
aaaaaaaattaattaatattttaaaaattaatctggtttccggacctttcgtactgctatcgatttcttatctggtgatgtcaaatattgtcagtaatctgttttcgtaaaattaaacattgcgcaagtgcattcatgacacacatcgttggcatttcacacatttcctgctttttatacgtgttttattatattagaaagaaagaagccgtaaaaataaatattcaaatcctctttatttaaaatgaaatacatttttattataataattaatactattcgttcttggtttgtcggctccaaagacacagctgctcgaaaggatgtctagcgccagaaccaaacactctttctttattttctataaaaaaaacaaacattcacgaatctaaatgctttggttttagcttcggcaataatgcctactaacggtacccgcgtcgagaacgcaccaaagctagggtaccaatggacccgaggagttctgtgatagttaaagggataaataatgtcccgccctatcacacgctacaccctcctctttaatgtagcgattaacttaccttaaataggtccattttaaactggttgagtatgttttcactatacaaacaaaaatttctaaactctgtaaaattacttatgaaattcaaaaaaatattctaaataaataaaattttctgttaataatcttgttttttagttttataagataattgtttcaaaaaccgactttattaaataaaacttttagttttttaaataatttgttgggatttataaaatttctctccaaactatattgttaattttaccatctttgttatcagccggtaatttgattttaatttgttgccacgaaccaacgcgtgataaggctacataagtttggccatgagaaaaacttggtcgagtccaatcaattcctattttttcgtatgttgcaccttgtccttttataaaagttgctgcaaaagctaattttactggaaattggtgcctttttagcggcacaggaaattcattttcggttatcaatgatattcggtgtatataaacttccgaaccatctttatcatcgccaagtattatacatctcaataaattatcttttaattctaaaacttgcaaaattgttccattacaaagtccgtcttcgatactaatattcctaagaagcattaccttacagttttgttttaatttcaatttatggaggggaaatcccggagcattgaacgaattcattatttcaggtgtaacgggaaaattgtgagttgtttcgacttcgtcaatacttagataagtaacatattctccgggaaaattttctaaagctaacgcattatggtgatcaactaaatcattataaggcgaaagtatcatacgattttttaattcattgaaattatgctttgcaaaaatgtctccataaatttcctttgttaaatttgaatcgtcagacaaaatacattctgagggtaactgaattaaatcacccaaagttccattgcctatatcaagcatttgttcagcaaatatttcatccttagcccgattattcactgttaatttcatttgttcaaatttgctccaaaaaatagattttcttattgtaagatcaataatttcacttcgtatagcaaatttttttatgggcagtgtttgtctaaaatcaccggctaatattatcgtttttccgccgaataaatgattacatttggttaattcacgtagtttttttttcaatagcatcaagtgcaaattttggtgtcattggcgcttcatcgataataaaaaaatcacttttaattatttcttctgctgcttttgtaccctgaacaacaccggaaacaacatttgcattaatgttaagagggaatttaaatctattatgtattgttcggcctttttttaataaaattgcggcaattccagaaaatgccatattgttaatttgttttttatgactgcgaactaaatgaaaaatagcatttaaaacaaacgatttccccgtaccaccagggccatcaatataaattaatttttgttttatttggccaagtattacttgttttactgagtcaaaaatgcatttttgttcggaattcattaaattatataaattatatgcagttttcttttcttcttcgtaatcaatattttcttcatcgtcattaatcgagtaatcttggggtaattttttaaaatccgctaaagatttgccttctcgaattaaatgtttattgatataggataatgccaatttataagcagcatttattgtattattaacgaaaaagtcctcagctaaattatttttaaattgctcccataaattttctgggtgttttggctcaccaaataccaatatgcttgcaaacaaatttcttaacgctgttggaattttgaaatgactcgcttcgtttaaacaatgtttccactcgtcatcatttttaattaaacctctcgccaaacatgcttgggcaaaagtattatatataataccattaaacgttttaaggtcttcaaaaccttttccagaaacatgaagcaaaagatatcgaagataatatttttcaccctctgttggattaacaggatacattctacctattgttttactaatttcaggattttttcgtaacaaccattttccttgttttgagttccaagtacaaaattttggcatttctgtatataaaatatccgacataccggggttttcattagtaaaatcaaaataagccattaatttacttttcttatctcttttttctattattgtttcgtcatcatcattttcatcaaaaaaaattatttgttcgttttctaagtgcactggcaatctttgaaccgaatgtgatttcgcttgtaaaggaaatttgaaaattttccaacatgcttcaacaggactaagatacctagcatctaaatagttcccagtttcatcataaaataattcttttacatttccgttttcagttgtcacacaacgcaaagttgcagcatcgtatcctttaaatatatatttataaatatattttactgctttaatatcagccactttttctacatttatgtgtgacttaaacctcttaagtaaataacgattgtatggtacaatgtcttgattagtcatcgacttgctcttccctgttttccaatccttttttaaaaaggttttaccatcatttggtcttttatataaaggataaccattttcattaatttcagttttttcgcgaaattgttttggaaatttttttgaacattttttctttttttgacaccaacacattgcattgggaaaatctggcccacatggaccgtgaaccattaatgcggtgactaagtcatataattctttatctatattttcattaggtacttctgctgaaataaattgatcaatgtcgtttgtatttttccatttattcgctgaatctaaagtcagtaacatatgcaagtgagggagacctcttttttgaaattctattgtataacaaaaacccgcaacttttccaaatattttaccatctataatttctcgaagaaattgagaaacttttaaatgaaagactcgcgctacaatatccggtctatcaaacgcttgttggccagaaatcatactttttaatatatcttcatccttaggattacatgtaaaagttaaaaataaatctgggcgcccaacttcattaactattgccattgcatccatgaagctttcatgcatgttccttggtccaccactaaaacttgaaggcaaaataatcttttttttaacttgtgcgccaacttcggttgctttagcatataaaaatttgtcaatttcactaactctttgcatatttctttttggtgtaatttaataaaattcaatcggtcccattcaattcgtgcagcttggtcaacacaccactgctgaaacaatttattgctataatgatgtggtaaaaatttgccgtcggttcggaaaaataatttgtatttagtgaaatcacataatgttatttttttattttctttatttttttaatccgtagtgccaaccaagataactaccggggataaaatatcgggtaacacatgggttcaaccattggactaagtggaaaaaatcgttttcaactttttacttcccttagcatgtacaactatatttgcagc

SEQ ID NO: 6070 - DNA, 3002 bp, Heterodera glycines
cgcgctacaatatcctggtctatcaaacgcttgttggccagaaatcatactttttaatatatattcatccttaggattacatgtaaaagttaaaaataaatctgggcgcccaacttcattaactattgccattgcatccatgaagctttcatgcatgttccttggtccaccactaaaacttgaaggcaaaataatcttttttttaacttgtgcgccaacttcggttgctttagcatataaaaatttatcaatttcactataagactctttgcatatttctttttggtgtaatttaataaaattcaatcggtcccattcaattcgtgcagcttggtcaacacaccactgctgaaacaatttattgctataatgatgtggtaaaaatttgccgtcggttcggaaaaataatttgtatttagtgaaatcacataatgttatttttttattttctttattttttaatccgtagtgccaaccaagataactaccgggataaaatatcgggtaacacatgggttcaaccattggactaagtggaaaaatcgtttcaactttttacttcccttagcatgtacaactatatttgcagctggaatatcgtcattagcgtctctccaaataatagcgcaaacctcgtttgatctaggtatattatatcgccttaaatcagttccttctcttatatcaaacaacatttgaacatcaggaatttcatcgccagttttttttgactcttctaatgcctcttcatagacatccttcatcatttcataagattttgaataaatataattttcacgtaaataattttctatataagcaattaatgcaacagtttgatcttttggatctccaccaggatctcgaaaaacatttaatcggtaatctattgcttgatctgtatctataaaatataactgtccatttgttggcaattcgttattatcaggttgcgcaattgtgttatatgaatggtaaacacttccttgtattttaaaaataggtatttttttatcaggaaactcaaatctcatacaacccaacgatgcacatgaaaatgaagaatttaaaattcgtatttttttaaaaaaattattgtggaattcgattattttggtgtaattgttagaatcgatttctggttgaaataaaactctcaattccattggatattcttgtatcatatcttctaaaatattcaattttccataattgcaacaatctaaaaattcattgttaccttttgttttgctttgctcttcaggaaaatgaatagcgggacaatgaatacacttaacattaaattccccgagtttataaaaaactacattcgatatatcaaaaacacctgcttttaaatataagccttggtttttaatcaattctctacgtgcttgcacaactgttaaattcaactctctctctaattttctctgttcttcattcatttgaaagcgggatattttgcgatttctatcgtattccttaattttttcatttgatatgctaggagagaaaaattcatcaggcaaatcatccaaatctataacttcttccatttgcaatcgtttccttttcaaacaacgtctttctgtacttttttctttgctttgtaattcaatcgaattatgtattgtttcagaccgcttttgtacggagctttgaaccgtttcaatcaattgaccgcttttttgaccgggagctttgaacccgtcattcgtgcgctgatcatttgaagtgcttggagcacaatcgtcagttattagcttttgttttttgcgcaccattatattgctaaaaatatttggataaattttgtttccctaaaaattgcgaatatggaacaaatatggacgaaaaagtgaaatatggaaaaatatggattatatggaaaatatggacaaaaaaaagttgtcctagaagtttcaaacatggcgaaatatggaaatatggattatatggaaaatatggacaaaaaaaagttgtcctagaagtttcaaacatagcgaaatatgggaaaaatataaataaaaagtgaaatatggaaaaatatggattatatggaaaatatggacaaaaaaaagttgtcctataagtttcaaacatggcgaaatatggaaaaatatggacgaaaaagtgaaatatagaaaatatggattatatagaacatatggacaaaaaaaagttgtcctagaagtttcaaacatggcgaaatatggaaaaaatatggacgaaaaagtgaaatatggaaaatatggattatatagaaaatatggacaaaaaaaagttgtcctagaagtttcaaaccaagctaaaaagactatttatatgcttattagcacgaaaaaagcatccagaaaaatatggaaatccatacaattacggtctctaaaaatgagcaataaaacacatacaaaaaaggaaaatttttttgctattagatcttctaaaaatatcaaaataaaggcgaaacgacaaaaaatcacctaagtacgggtcacacaataaaaaaatggtttatttgggtaaatttttcagattttttccctaaaaatggcgaaatatgggaaaaatatgaacgaaaaagtgaaatatggaaaatatggattataaagaacatatggacaaaaaaaagttgtcctagaagtttcaaacatggcgaaatatggaaatatggattatataaaaaatatggacaaaaaaaaagttgtcatagaagtttcaaacatggcgaaatatgggaaaaatatgaacgaaaaagtgaaatatggaaaaatatggattatatggaaaatatggacaaaaaaagttgtcctagaagtttcaaacacggcgaaatatggaaatatggattataaggaaaatatggaaacacaaatacaaaaaaggaaaaatttaccagagaattggattaaatatttgttcaaacatggcgaaatatggaaaaaatatggacgaaaaagtgaaatatggaaatatatggattatatggaaaatatgga

SEQ ID NO: 6071 - DNA, 4193 bp, Heterodera glycines
tgtacacgttctcgcacttttgcccaatcgcaaaacgccgtgaaaactttgctgtcccaggcctacaaggcgcaggagcccttgagaaaaacaaaagttcaaatttagtgggtgtaaatttttggcgttatgtatagcataaaaaattaaaaatgataacaaacgcagcgcaattggcccaggcaaaatattggaaaggtttgattggcttaggagttggcatacgctaaaaaaatattagatttttgcgaaataactcaagaaaattagaacaatttcttggtactttcctattttatgtcagccagtaatttcgaattcaaattttcattttgggtttcctaatgcacatacatatgtccttggaaccggaaacggttgggccccaccatgtttttggctataacttttttctttgtcatccaaatccaaaattcttggtatcattcgaaagcttaacatgtttagaagctatttctaaggtattgcttagcgattagacaattaccaaaaaatttatagcatgaaaatagcaaaaaaggcaaaaattaaaaaaaattttcttaaaaacttttgttatgttaaaaatctttgagtttttttgtaaggctaatagagagcatgtgaagagctttcgaatgataccaagaatgttgaaagtttgtataaaaatttaaatggagttaaaattgtttactccgtcagtgaaaagttgcgtaaatgtgtgaaaaatttcttaaatgaagtcccaggcctccccccccctccttttatccagccgtagagttattttctcattttgactcggttacgtcgagaatggaaagaaagtcttgggcagggaattcatagaaattaaaatttcttccttaaatgtacttcgttgcatttaaagccatcgcaagcgtagcatgtaggcttaaaagacggtggacaaaattttttcaatacgttcgtcgggcactttccattcggttcagcacaatctttgaacacaaacagagggtagccagttgctgtgaaagttttacaatgatgaataattaattaattatttcatatgtaaatatttaattttagattggaaaaatcgcaaaaaggtacttaattaatatggcaaagctccaaaatagtgattcctattgatgaatagtggcgttaaaacgaagaatttccgagctaaaaatgtgtttttcgtgcatttctcgtcgaaataaagccgcagaaaaagtagttaaaaagctaattttccctattaattaagtacaaaagatgcacaaaaccccaaataagtaacaaaaataggggtaatcctgaggaatgggaatttctaattaacttttttatttaaagttaaacattgatgaaatagattttcataaaaattttagcgaaatacaattcaaaagcgtaaaatcttttgagtaattatcgcaaaaactttgatttttttttactattttcataaaattttcccacctttatgagttcttcttcgattttcagccgaaaattttatgaaattgcctcggacccccctacgatttacgaacttgaccctatggttgtgcctctgataaagtagcattgaaatttataaaaatgtaaacaaattagtattccactcgtcaggatcagtcagctggggacaactcagccgaggaaactccgctgacagacaactcgtctaatggacaactcagctttacgagaatttacaaaattataaaaaattaaaaatcaatatttaaacaatgaaaaaaatcttttaaacaaagtaaataaactaaaaatatttttaataagttaaaaaaactattaatttttttaatttaacagtcgtatttcgggtgtcatgacaacttgtacacaggcaagcacacagacaactcgtacaaaggcaactgtacaatggcttaggctagggcgaagctttaggcttagaattgtttgggcctaggcttaagttattttaaaatttttttattgtatgagttgtccatcagctgagttatcctcggctgagttgtccagaagccgtattcccaattattcacctttgtcagtgcaagtgaacgcttggcatttgtatattctcttcgcgcacgttctcaagttcttctccatgtttctgttggtcagccatttcttaagctcggcgctcggcgtgtacaaccacgaatagtccatggacaatttgcagtcaatgtacgtttttatgagcagttcagtgttgttcgcgttgcacacggtgtcctcatcatagcaaaagtcacattttgtacgcaactttttcgactttaatttgcaaaattcgtccaattctgtatgactgcagttccctcgatctgtggcgcagccgttgatcacaaacacgtcgttgttatactcttcaaaaaaggaagtttaaatgtgcaataatttggattattatttttttttgttgatcagtagagaccggatttttaggtgctaaaaacactgaaataggtactaaaataggtgccaaaagtgcaaaattggtgctaaaaacgcccaaaataggttctaaaaagtggaaaaccccagtttcttatgcacaaaaattccaaaaagtgactaattttttttatcaatttcgcccaccaaaatagcaactagtcaagaaaataactaatatatattaattttctgaaattttggtcattttttcggagtatattttctctgaaatctttgggatcgattcttagtgagtgtattttttcgtttttattgcatttttctatgaaatttctgggaaaaggccaaaacaggtaataaaattcgtaaattacaaaataggtgctaacccccgttttaggtaatttttgtgctaaaaagtcgctctaaataaaaattgttcggagaaaatgtgcttttcatgcgtctctcatcaagtactctccgcaaaaaaaaaataggtaaaaccctaaaatccggtctctattgattgatcagtgttcatttaccatccatgcatcggtatgtctgacagccgaccttcgcctccatcgccttgccatggcactttatatccggcttatcctttgttattccccatttttcgatcacctttgcaaactctccgttgactttataaatcgtattgtcgaaagtgaatgcatgtttgcagactgcaaaattaaaacacatatttactgtatatgtaatttattttttatttattaaatttctcgggcagtctctccaatcaattctttttttaatttttaataaatcaaaatattgtaaaaccttgattagaaaaagaaatttgtttaaagaaatcagtaatttttcaaatttccatatttacttagcaatttattattcccactcagttggagctcaggacaacaaatcattttcagctcaactatgagtggctttgagcagttcatttcatttttagtaaatctcaaaaccgatgataatgaaagaactcagtttttattggtatgtttccacttgattataatgcggaaagacctttaagaaggatggcacggggtcgagaccgagccgggaattcccggtcttgccatgttccggtttttcccggttgcctggtctcgcttttagaaaatacaaggaaaatattactgataaaaatgagggtcttagcgaaaatacaaatttcaagtacactcacggtcaaaagtattgcaccaaaaattttttttcgaaaaattcgattttcttgccgtcgagaaaatcggtcatgactcaaccaacccgctttttggtgggacaaaagtaatgcaccaaaacatgtatgcacgaataactcactttttaatgataaaaatccgaaaaattttctgctaagctaacttttgatgctgatcaaaaaagtcttttacagaaacttgatcagatcactccttcatggtgatctggaaagtcaaaaatggcttgaaatcgggaaaattttcgaaaaaaattcctagggggttgggaaaatttttctagaaaatttaagtaagcctatcagatagaggacaaaattctctaccgaattgcctttgggatggtaggcctatggcctatacccgcagagcagcttagggtatcaaaattgactaccataaaaatgatcaattttctaccattttcccttgaaatacggtagaaatcagtcatttttgatttgccgaatgtttcacgaactg

SEQ ID NO: 6072 - DNA, 1951 bp, Heterodera glycines
gtgcatacatgttttggtgcattacttttgtcccaccaaaaagcgggttggttgagtcatgaccgattttctcgagggcaaagaaactaatcgggacaatttttgggtattaattagtgcactatttttaatgtttattttagcataaatttgacatttttcaccccattcctttttaagaaaatcgaatttttcgaaaaaaattttggtcaatacttttgaccgtgagtgtaaaaacttgagaaaatctgtcgatgaattaagcattttcatttatttattattttaaaacgtcgactcaaaccacaaaacaattaacattttttgcgacagattttgttacaaagcaacaaattaattatgtaattgaagcaaagaatgttcatttaaactaattaaattcagctgcccatccaacaaaatgacctgatgtgaatgggtcgtcattgagcagattgccaaattcgcaagtgcagttccattttgaagaagccatatatccaactttttcattcacatctttgttgtaaaagtcgcaatttgtgtcgtccggatagcatttcatttctaagaagctttcgtttggagctaaacaaaaataaaatgtataaactaacaaaggtctgctgacgggagacaatcaatttgaagaaacggcaaaattcaattccgaaaatttgacaccaattttttattttaaaaacatttatgaattataataatggagctccggcatttgcgcctatgtccaaaatcggattcaaagttgaattttgttcaagccctgacagccaaaacagcattaattaagaaaagcaaatgtcgggacacgattataataataattgaaaaaaacatattataagaaaattcaactctccataatggtggatcaattatttaatgcttaaccatttggcgctgccaaattaccatagtcatttttttctttgttgaccaaatccaataaactaggtatcattcgaaagatcttaacaacaagctctattggctttccaaatcacacaaagataaaccgacaaaaaaagttatgatgctttgaacttggcacagactaaaacgacccccacccggaaatgggcatatttagccaagcaatctctgtgaataataatctttttctgtcctattgtgcccaatttgtaagtgtattttcttttaccagcggagcacttgattttggtacaacgtttgtggttgggattagcacattctgtatgctcgaaatccttatcatggcctttttgaagtccgtgcgacccaacgacgcacttcaatgcttaaaattaagaaaaggcatatacaaaatgttattttatttaaaatacaaaaattacctccacaaaaaagggggaagaatgcgaggaggacgatgaaaattgcaagacggcggaagagggacattttgagggggttttgtttttaaatttaaattatctgtagaaaattattattattattattaactttattttttaataaagcaataataataataaatgaattccgaccagaattagcttaacatcgaatgctttttgatgatgatcaatgaaaataagaggagaatgaaagtgaatgaattggttgtcgagcgacggacgaccgaaccgattctgatgatttgatgattcattgtgaaagtgctgttttatgcataataattaaataatgtaaaagaataaaatttatcaaaaaataaagttattttatttttatttagttattattggaataaataattatagaaaatttaaaaaaacctgaaaaagtgaattaataaagtgaaaagttgaagaaaattaaaaagctaaaaagcttgaaaattataattcaaaaataaataaataaatctaagcgataaatacaaactttaattaatttttattaaaataaacattttaatataattatttcattaaataattca

SEQ ID NO: 6073 - DNA, 2212 bp, Heterodera glycines
  unsure (1)..(2212): unsure at all n locations
tcgttccaatagctcaaagtttatttattttttcaaaagtcaaataaaattccataaataaaaaaattagctttttaaatttnaaaactttcagaaaaggactatagaactaactaccaagttattttaagtcatgttggttctgcaaaacaaacaaatgtggttacgaatggaagtatttaagaaaggtcccagcaggaacaaagcttacttgcctaatttattctatatttatatttaaatttatttaatttaatttttttctattaaaaatcaatattcaatgaatgccctccaacaaaaacaacttttttttgttcaagaaaagacaactttggatatgaaattttaatatttattaccttaatcagtgttatttttcaaattatttcttaatttcggtttgattcaatcttcagttgagtccattcgaatggctttgtgttccaaaaaatgccacactcgcgctgatcaaaaaaaactacaaaaaacttgcgatggccacacacccggacaaaaacaatcaatgcagcggcaaattgtttacggtttgggttactgtacaatttaatttgtaatttagcaaaaagaaggtaaagtttaattgaaaaattctttcagctcattaccaatgccaaagatgagcttcttggccgctccagaagtgcagtgcagcagaatggaggtgcgtattaaattctcgaaatttggaaagatttattaattatttaattaaaccactaatgtgttagcatatgaatttttaccaaatatttaacgtcaatgtaatattgtacaggagttccagcagcttgcgaaattctttgagattctcaacaatcgattgcttagatcgattcagaaaaatgctgctgacaatgagagcgctgcttgtggaacaacgggacagagtgagaagaatggaacagtcccagggggggggggggggggggtgcggagtacgataggggtcaacggtactgggatataatctaaaccaccaaatgaaatttttaaacaaaaagttacaatacaaggaaccagcatttttggccataacttttttgaaacttaacgagattatttcttaatgtcattcgatcacaataattaaaatagttggagaaaaggagagaatatattattcggtgagggatttgggaatggaagttcggggatgggttcgaggggaatatttccaaattcaacaccactttatgtttaaagtcaaatattaactgttcatttttataacagcagttttaagtcaagggtaatcaaagatggtatgatcagggatggcagatgtgaggctttagcctcattttgtgggtttttgataggtcaatgaggctttgaggctttttgtggttttttgagaaattttgaggctttttgtggttttttgagaaattttgaggctttttgtggttttttgagaaattttgaggcttttttggttttttgagaaaaactgcttatttctaaattgatcatggacaatcaaaaatataatatttgaacattttaaacgtgtttagaatacatgtaaaaatgaggctttttgacccaaaatgaggcttttttgcttgccaaatgaggcttttgaaaattttcatctgccatccctgaatcccgctactgtactttatataacacttgagaaaacatcgttagaaaaggatttatttaatcctcagtacgagtggtgtgttccaaaaaatgccacactcgcgctgatcaacaaaaactacaaaaaacttgcgatggccacacacccggacaaaaacaatcaatgcagcggcaaattgtttacggtaagtccgatcaaatgggtggcggttactagggcttcgtttttaggcgcaaattacgaaatatgcacctaaaaaggaagaaaaaaaccgtaaaatgggcattttgtccaactgtccgaattgtccgggagccttataaatgtgattgtagattcctcaaaccaagctgaaaatgaaatgcgttttcgtctatctatgcgtatcaaatgcgcagaattttaggcattctaaaaaacgaagccccatagattactgtacatacaataattaagaatttaaagctcattacgcatgccaaagaatggcttcttggtcgcccagacgcagcggcaggttgatggtcggttattaagcctaatcattttttaaactaggtttaaaatcatttttatcca

SEQ ID NO: 6074 - DNA, 2194 bp, Heterodera glycines
catttatttatttttgagcttttctctatgacaatgcaattggccgagtaattccaactttgtcaccgattatttaaccaaaaaataaaaaacttttctcctctctctgccgatttcgctgctttttctccccgccctttcttcgcccattctttcagtgaatgtctttcatcggacagtccatcaaccgcaaaacgacgaagtctgtgaaagcttttcaaatatattttcttaaatttgtttttttggatattttagccctgtgcttttgtgaatttttgaaatggcacctccaaagaatggcacacccaaagagaatcgctttatgcgaaggctaagaaaaatgctcaaagcggcgaaaaaactgtacagagattggcacatcaatcacttggcaccgattgggttcatcggcatttatatgtttgtcggtgccgtctttttttggctggccgaaaaaaacgccgagcttaacgaaatagccaaaaggtgaaacacgatggattttaacctaagaacctttctcgaattagaaaagaaatttattggtccattcgatcggagggaatttcgaacatcgaatcggtggtcggagtgaattggatgagcaaagagaggcgcacgcggctgtcccaattggtcgactctttgttctcgcagttggacgaattggccggcgcgggtgaggcgcagccccaatggaattttatggcggcgatgtgagtgcaaagtgccgtcgatatagcatttgcaaatgagtctcgacaggtacttttctggcactttgttcaccacgatcggatacggggacatcgcctgcgagacggccatcggccgaatcggcacaataatttattcggtgatcggtcagactaatcaacgattaattgcccaattaataaatgccttttgcttattttgccaattttcaggcattccgctgacattgatcactttgaacgaattgggtaaatttctgtacaaatgcatcaacgaaataatggccgtcgtttctaatcggtggaatgtgtgcattaaaccccttttattttgccggtgttttcggcgccatgccaaaattccgctggatcttccgcctacgccaatgtctccgtctctgagacaggcactcaattaaaagaaaattaaatattttggcaaatttaaatttaggcacaaaaggaatacgaacggaagacaacacatttcttcaaggatcagagaattgcgcaaaaggatctcatctttgactacgatttgaagtcaatgtccgaggacaaaaagttttccgagtcgagcgccgggggggacaatttgacgatggacgcggagaaaggcgcctttctgacggccgaaggtcaattgagggaaaacgaagccaaaacggcaattggatgattaaatagttgttcaaattcaatggcattttccgttgagttggctccaccaaaagggaacattcgcagcaacaattgggcattttgggcgacgatgcgccgcgaatgcacgtcctcgtcgccattttcttcaccgtttcgtggcttttcttttgcgccgcgctttttgcacacgtcgaagtgggaaaaataagaaagcaaatgcaataaatgtttaaaaattcaaaaataaagaattggacctatagcgaatcgctgtattttgtgtgcatttctctgctcaccgtcggacttggcgatgtgaaagtgtcgcacagagagtaaaaaaagacaatgccaatttaaataaaataaaatataatttaaaattaaaattgaaataataataataattgtcagatatatggtgctgttcttcgcttttatgatgatcggtctttcacttgtttcgatgtgtattaatgttattcaaaattcaattgaagacttttacaaaagacttctgatgcaaatgctcgaaaaaggttcaaaatcgctaattttggctctatttttttgaatttttcctatggcatttcgactttttcaaacttcacaggcgatccgaattccctgcgcaacaatcgtttggccaaatttttgttgccgtttctgagcaaagagaaaaaagcatttatgatgcatcaacttcaagaagaagcacaacggaacggcatggaaatgccaccgatttttgacaatttggaccaaattttgaaaaggtaacaatcgatggaaaagtgccgaaaacggcttca

SEQ ID NO: 6075 - DNA, 2371 bp, Heterodera glycines
  unsure (1)..(2371): unsure at all n locations
gcatgcgatggattaaatgacntcattgttgttcataaatactgcttttccgattaaaaaatcagtcttttgtaatttaattgtttttggccttgccaattattattggccattttaatgtgacaaggttttacataatccttttgaaaaatccaaaaaattattaaaggtaaccctaaaaatcgactttttttttaaaaaagggataccaaaaattgattttaaaatgttaaaatgttattctaaggctcattagttcattttatggttggccggtgaaatggaaaataaaggggaacgaacattttaattgcagcggcaaaaaatgggagaaaaaaagggaggggacaaagcaaaatgcaaatgggggacaaaagatgggaaaacattttccaaatcggataaattggataaaaagcgagggaaagtgaaaatgatgaagaggatttgtctaatctgatcaaagatggcccgggagtgattctctccccatttcagtgcccttctgtccccaatctgtgctttctgttcggttgggccttccctgctgatgtcccttcccatttgtccactttcgtcgccaaaaaatggaccacaatattttttttcaaaaaatttttaaattatgggttacggattacggaaattaggctttttcatatccccataattacggatttagtccagaagccctattttcgacactttcattacgcaaatatcaataaaattgtggttttctatggatttcataatttaagtttggatcaatggacggaggacaaagccaatcaatcaaaaggcatttcattcatatcagcggggcttttcacgccaattgctgcttttccgcacatttttttgatgtttattcactttggcctttctttttcgcgaaatttcgtcgtcacaatgattcgcttccaattataaattccattttcatttgatttttcgtggctaattttaaagtaagccaataaaagatcaaatgaatttattttcaaaataaatttaaaataaaataattattttcgttgatgaatgccttgaagaaattgttaggcggtggagggaaaaagaatggcaaaagggaagaggagaagcaaagggacaacagcgaggacgaaggcgaacacatcgccacggacttcgacaaaacattcgaagaagcggccaaaaagacatcggcgacggtgccacagatcatcgaataccgtaaagcaatgactaattaagagttaattattaaatgaattatntaaagttaacccgtaatgaagcaacacttaacccccccccccccccggcacaggcggaagtccgtcgagaacgaaccgatcgaaaagtccgtcgccctatcagtgtcgaattaccacacagcagcaacagcccaagcagcaacagcatcccatcaaaaaagtgtccagtgccgttgcaaatcgcacgtcagagctttgtcgcgatttttgttttgaatttttattttagacccacgcgaattcgaaaaggttcggcacccggcgcctataaacttttgggcgatgcgaaaagcgcaacgccggagaaagatntaatgagacggaaaatgacagagtcgcagcaaaaacgagtgagaaaagggaaaatggggggggggattaaaaataaaattaataaattaacaggcaaaagacattgtggagtcattggattggataaagcctgccgaagagagtacaaatccaatcattgcgaagatggaatcaatgcaagtcaattaaaattgggggggtggcggagaaaggacacacgctaatcacggatcgactgctgatcagtttatgtatgcttcactgatcagctgatcgatgtgtgtttcgatgatcagctaaattggatgaactgctggtgccgatcgtacgcttttgtgctttagctgtcctcaagtgcatttgtgcgaaatgatttcgctgccccgtgccgatcaatgggccattgccgtaatcccccaaaggcaattgacaccgcttcctgtgccattggcagcaagcggaaagctgcacgtctctctcacgaacaatcgatgaaaaggactgtggaggaagaagccaaacgacaaaaataaagtaagccagggacggatacgatacgaccgggcgctaattgtagaggagctttgcgattgtattttattttttaaaaataatccatttaaattggcttttactgctccattcccccaagggatttcatttggcttgaaaacgcggcatttgccgagttttggcgatggaatggcattccccggcagtgattattaacatttattttgtttcaatctttgacatattatgtattctttctttatacatagtacgtacctttctga

SEQ ID NO: 6076 - DNA, 3776 bp, Heterodera glycines
  unsure (1)..(3776): unsure at all n locations
tgtatctttctttatacatagtacgtacctttctgaccctcacatagattgntgaatattcggcaaaatgaaagaaaataacaaaaggaaatgcaccaatagaaaaaagttggaaaagaaaaatggcacaaaaatagcaaaaagaaaaaagaaaactaacgaaacactgtaaggaaagaaaaaagagacaaagtgtaagtgcacggaaagtgaggagagcgcagagaaagagaggagatttttaagacgaatacaattttttaaaaaaaattttgctggcgccttcggcatcattggaggcccataaaacccttaaaaatgatccacaaatgaattttttggataaattaaaaattttcaacaaaaatatcaggctttccccggcttgcctatcggcactgccttccccccagcccgcagaaaaaatattaattaatgcgaaaagttttaaccgaatttccattgccatttctcatcccccactttcccccccttttccgctttttgtgccatcattttccgtcattctcgtcctccatctctgctgctgacaattactgctgtttttggttctgctgctgtctctaaaccattctttttccttttcttctttctccgattcgttttcgtcctttgtttttgccttccgctgtaattcgggagaaaatcccacctaaattcggcatcattaattaccattaccatttgcatttggcaaaatgttcaccgctattttgatcggctgcactttctgttgcgttggccctattcgcagtgcgtctttaaacgacactttccgtgccgtcctccctttggtgccgcccgttgcttcttttccatctcccgccttcgtttttgttatgtgactgctgtccgtcgtcgattgagtggaggaaccttcggcggaagtgccgttggcggtggcacccgacttttggaagggaatggcagcgtaaacaacgggtagaacaaccaatccgtggaccaggcctaacaccacaacgagcagcacaactttgacgaacacctgaacaaacagtgaaattgctaagcaatacgaaaaccgggatgtcctccctacctgaaccatgtaagcgtggatcagtaccaaaatcatcaacgaaagcaccgtcgaaagcgcggcctgcagcatgggccaagcgatggaactgagcgcgtgccgaagccgttctcggctgtcctcaatctcgcctttgtaataatggaagctgatgtgagccacgaagtccacggacagtccaatggccatcaaactaaaaaatgtggggagatgaaacagagaatattcataaatagacgttgtggtcatggaaatggggtccaagtcgatgctccaataaaagagcagtccgaacacgcccaaattgatggacaaaacgcaggcggtgccgggcaaaatggtgctgatggaaggagtgaacatcaccaaaacgaaagtcatgcagagaagggcgaacgcaactgcaaaaagatggataaacaaaaagacattcgttacaataaggccgactcgccggtttgtattgtcaccgacggaatactgagcaattgatcagcgtacatactgtaaacaagagacagaacatgcgaaacgaccattggtactgtacctgaagtcctcgtatacggtaaggttcagctgggaataatcagcggctaattggcgccaccgttgcagcaacaccaaacggtcgctccaagcaacggcattttggaagccggtcgagaagaagaatttgttaatgcaggatgggcgttcgtttaagcaatcccttcgggggactcggaattagtcattgaaaagtcggcatttcccttttactctttggggcctaagctgacaaaatggctccaccggtgatactcgggaatggaaaagaagtcgtaaaggtatttgtagcggaagtcaatcgatccgcggttctgacaaaaaatggcaaatgaccgaatgaacacattccttggctcacttgcagtccgatgaatggcaagtacgtgttcagccacatttgcgtgctcgacgggcccacgctgccgttgctctgctcaaatcgctccaaaatgcgcataattttcggaatggccgacggtttgcgcaagtctcccggactgttcacaaaaacggccatctgtcgatggcatttcgtttataattgccaaatttttgagcaccgacctgtccaccctccttgaaaatgacattgttctgcaaacggaccaattcgagtagtggcgagtcatccaggaacagtttttccgacgttagtccaactttaatttgggcaactaaatacaaaaagaaagaatcatttgatcatttaattgtcagaatatttttaaattaattaccgccataagcggaaaacgcccaataaatgatcagagaaatggccaacagaatgcgagcggtccaactcatcacaaaatccacgtatcggtcgaccaaatccgagcccaaccgccacaaatttgttctcaattttcctacgttttcattcgctttgcctttgctgattgtgtgctaaacatttaaagctaatcttttttcaatgttgccacttttggcgaccttttcggcacgcgcttttatgcatggcaaatacgcatttcgctcgtccgcttcgcgttgggccccaataaccatcacagcagtgtaaaagaacaattggtacaaataagcataaagcacagccaccgaaatgaacaaacaaaaagtctaaaaagggaaagattggttaaattggcaaatgaattgccgagaaatgatttgtgggtaagcaatgccaagtgattggctaattgattggctaattgtcgccaatttcaaaacgtgcccgaatggcaggcgttggagtcgcaattccgatggtgaagctgagccaattggtcaacgaagtgattgtaaccgatgggccagccgagccgagcagatccgccacgcgttcgcgcaaatctttgctcgggtcggtgtgtgcccagcagtggaggaaaatgaaaacgtcatcgaacaccgatggccaaaatgagaaaagggaccaccaccaaaatgggcagaaattcgaagccgagctgaaagaggggagaagataaaaatggcaaaaggacggaagggaaagtgccaaaaatgacccaaaaaagggtgccgaaagaagcgccgacggaaaggatcggacagaaaacgccgaccaatgcttcccaaggtttgctccggatttggtcacgcttcagtgaagtgatcacctattgatcagatcgaaagtcaaatggcaaaagggagagaagcgaccgtaaagagaatgatcacggacagactgatcggcatcaacgggagcacctcaatgcctgaggagggagaaacgatcagaaaaacaatgatcggagggattggatgccaaataagcaaaacacccaaataagagaaggaacattagacagactgtcttttttttattaatctacgcttaattgtctttaattgtttgatttgtccttaaatatttcttaaattatcaatcgctgtccccgtttcccctaataactgtccttaaaagggcctttcatctgtactaattgccatttgacctgtcctccgcacctcctcggagactaaaccctccgaggtgacgtgcagcttcagcaacggatcgccgcgtgaattcattgcgaagttgtacacggaatgctcccactttttcatcaccgtttccattgtggaatttgggaaaatggcgtggaaattgatcgtgatcactttg

SEQ ID NO: 6077 - DNA, 2263 bp, Heterodera glycines
atcactttggcccccttgacaagatgtgagctgaacaagcgccgatcacctttggtttaatcaaaaagccaccgattgttcagttggacttgaaaaatgttgtgggccaagtaaatgcgatggccgaacacgtcgatggtcggaaaggttaacttaatgttgcccttgccgcggtgctgaacatcgcggaacaccgtcaggaaaatgttcaccgcgtcactcgtctcacattgggccccgcagaagtcgctgtacgcgtactgaacgccttcatgctcgacctgaatttctgatcagttgagtagcctttttgccgagaaatgtccgaaagtgatcagaggaatgaaaagcctttttagagatgggatgaaaagcggaacatcgcacctttagtttgtactggagaaaatcttccacttccaaagccttgtcaatatatcttaacggaaaagcattacaattgtgtcaattgttgcggtagtaaggtcagttttgatggccggttcagtctacaatttcttcgaaatgcgtttaaaatttgatggtactgaactgacaaacactgaactggccgtgctaattttgtgcctcggcctcagcaaatttccgccgtcggctgcttcaattgccaccaccacgtgaaataaccctccaagctccttgaaaaactcgcgcgccacaagaaattcgtgacgacttggcgaattgtcggcactcaaatcggacaaaaataaatgaatacaaatagagggattaaacaggcaaaagttgggggaagcaaatgccaaagcgaaaggggggggggtggcggaggggaagggcacctgaaatggtccctgacattgttcacttctttgaaattgacaacgcccgttgagagaacaatcgccacaatcactctgcattcaataatttatgtcaggttgaaggtttctccatttattaattaatgcttacttacgatatgattattgttgtccacggccaatgcgaaacgaaaaggccgagccgacgaaagccgcggtgcgttttttcttccgcccaatcggcaacggaaaagccaatcggcaaacagagaagacgacccattggcacaatggaagtgatcaatgactgactgatcactcactaaaaatgtgatagattaaagaaggcggaagagaaggtccgttacggagtcgatcaaattgaatggaaaatgggggatcgattaaagaggtgaaaatgagtgaccgatcaaattgaatgggaaaaaaagaataagaaatggataatggatcaaatagaacggaaaatgagtgaccaattaaaatgaatgtgaaaaaagaggaaggcgatcagattgaatgaaaatgagggatcgaccaattggtgggaactgaatgagttaatcaatcaaagagaatggaaaacaaataatcgatcaaataaatggaaattaatgtcgatcaaaatgattaatatacaacgattgattgatccacaaaataaaaattagggggggggatcatagtgcaaatgatgaagtacaacattaataaatgttggctttttcgatgaaaagtcaattgtggacaaaactcaaatgcgatgcgatattacagaaaactcatcgaggcattttgtccacccgtttataatcggagccaatttttgcgccattttggccctattcggggattgggggatataaacagcagataaagcacaaaatggcggggaggaatcgaggaaagaacaacgacaatcggaaggaaccggtcgcgggaaacacagcgaagacgaagacgacgaccaagaagaagaagcagaggatgatcaagaagagaggaagaagcagaggaagaagcagaggaagaagcagaggaggaggaggaggagaagcaacggctttgcggatggatagtctcaacagaacacccaaaaatccatccaaatcaaaacaatcaattcaatccttcccccaatgccctccgtcttggcgagtcaccccccccccgaccccatcccccctcaactcggcttcgcccccccgtcgtccatcatcggagcaatgctcgtaatcaccagcatcagcctcctggcttcttatggatttgtatataatggaacaaatgaagcgaaaagaagaaaatgggagaagcagagaaattggaaatatggcgtttcggagagtgaaatggacgaacgacggatgaccaaagaaacggcgaaaggcgaaattgggggggggggggaatggaatagaaagaggcaaacgaca

SEQ ID NO: 6078 - DNA, 5093 bp, Heterodera glycines
atccctgcttctgtcttctgtataccaatccgccttaatttggccgaaatgactgtggacatcgtcacgccgggcaccacccaaacagcgaccaggacaaggacgaggaggactgcttcacgccgtcgcgcgtcaacagcagcgcgttcggtgagccgtccctggcgctagtggtcggtcaactgcgtctaatgagacaactttaagaagccatcacatttttcggcacttttgctgttttgtaatcccctaccgatgcttgctgtttggtgaatcccgaaaagacagaaaaagtcttttccacgcgctattttcgtgtttctcttgagaattgtgcaaatagtgtgtgaaaatgaaattctctgtcgttctttttcgggacccccttaaacagcaaaagtgccgaaaaagatggcttctgaaagttttctcaagctcagttggcacccgcttcagtccctcttttttgctgcaactaattccgtgtctcattttacgccctccccgccgttgttcagagagctcgtcgacgacagcagggcgcctcaaccaacaacagacggaccgcgccagtgcgtaatcgaagcagcgcccgagcgcgtgtgagtgcagcggtgcgccgcgcgtcacgtcggcaggggaacaacaacgacggcgacgggaccaggacgaggaagaagcgcggctcggcaatgcgtcgtccgctcaagctcaaaccgctccgtggaaggccgaggggatcgcgcaaatcgagggcggcgccgcgcactgctggacaaaagcgtggccgtggacgtccgaggaccgtgaaaaaaggccgtgcccgacgggggaggagcgctgcccagcggcagacgacgacgactgcggatgcagcaaccaacactgacgcaaccggagcggcgactgtgacaacggacgcggcgaccactgcgactactccaccgacaacgacgaccgcggacggagcgacggtgaccaacgccaacgaacccggtgcgactacggcgaccaacactgaggcgcccgctgcgactactccagcgacaacgacgaccgcggacggagcgacggtgaccaacgccaacgaacccggtgcgactacggcgaccaacactgaggcgcccgctgcgactactccagcgacaacgacgaacgcggatggagcgacggtgaccaacgccaacgaacccggtgcgactacgacggctgcgacgaccaatactgaggcgaccgctgcgacgacaacgacggcgattgcggatggcgcggtggcgactaacactgacgcaaccggagcggcgactgcgacaacggatgcggcgaccaacactgaggcgcccgctgctgcgactgctccgatgacaacgacgacgaccgcggatggagcggcggcgactaacactgatgcaaccggagcggcgactactccgacgacgaatgcggcgaccaatactgaggcgcccgctgcgactactccagcgacaaccgcggatgtggcgttggattagcatcatggcacaacaacagaagaaggataagaaattgacatttatccgattgatcctttgaattgtacatatgtatttcgttgatgtgtgtgtatcatgtatcaatcaatatctgatcacttaaattgtatgtattggtgatatgcgtgtggatataaactaatcaaagtcttgtaaatgggaccaaaaatatgaaaaaaggcgtcaaattttgctagtaaatgtttttaaaaattgatttcttccgcttaataccaatagctctgtgtttctcatttttgcccaccgatcagtgatggatgagttagcctgaacttagagagagagagaggcctacagatccgcttttcctgtccggatcagctagagagaggacactgatcaaagctaacctgataatgtcattaaattaattttgatagaatctgaaaatcacggactccactaattacctctaaataacacctacagaaaaaaaagcgacaaaaacttccgttttccgagtataatatacacacaacacacagacataatacatacacattatgatgatacaaattacaatgatggatcagatcagtcagtgttattcttgctgttgctgctgttcctccgctggttcttcagggggaattgcgcgcatgaaattgaagcggcacacgggacagttggtgttgtatttgagccagcggtacaggcaccttgaggggagataatgataagcgttgcattaatccgaaataatgatgtcaaaattgggattctaggccttgaaaatccataaatcttcacccaaaaaaaaaaaaaattttttttttgacaaaaaaactgggttcaaggcaatttatgctaagaaaactcgacttttagaattgatcgtggaaccatggattaaaattgatcggaacggattttgaattcggcgaccagcaaacgcaaaacttccggtattttggccaggaaaactcgacttttagacttgttcgaactcggggtcccatgggttcgaaattgatcagaattagccccgcctccacctgcgatgaaattcgtgcacacagcccatggtcacacgcgtcatggagctcactttgcccagacacatcatgcacttctcccgtgcgatcgcattgcgtgtctgaaaaattggcaaattaaaaaagggtgccgaattgaattaattagtgtattaattgccccctctccccctcgcgcgtcactcacatgtccggctcgtccaattgcggcacgcgccttcttggcatttcgacgattgattttgatgctccgtgctcgcgctgctgatgcccttgtcctggccgttgttgctctgaccatcctgaaaaaagggcacaaaatttatttcattttaaaaaatgaaacaaaaaaaaactgacgggaattatttattgtataggaagacgattcgaccgatggaaagaaacaatgggtgaatgcaattgaatgaatgaatgcatatggtggggaattcatcgcttaaatacggagaaaatttcataaatttgtcagtcatttttcaaaaaagtataaattgcagaaatttttttcccctcctccccccgttcagcgaacgcgcgactaaaaaattgctgcatttccgctttcactcactttttttaattcggctttatccctaaattgaatttttgcaattaaattttagcgcttaatccctctctctctgttgctatcacaacacaattccaattcgtcaacagcttcttcttttccctcatcgacgagatgacttcttcaagatcggtgatcccctcccccccccccccattttcatgcgcttttccgccaccattcatttttccctttcctccccccgttcagcgaacgcgtcgcgcgacttccaatactgcttcaactgctgctgctggccgtggtcgaagccgttcaagaaatacggcgggtcgtcgttccgcgagcaacaggagtagggcggcatcgagcaacagggacagagggacgcgtcgtcgttcgtcacgcgccaggaacgcgtcgcgcagaggccaggacagaagcgggacgcgtcgttcgtcttccaccaggaaagcgtctcgcagaggccagggcagaagagagacgcgtcgttcgccatccgccaggaaaccgccgcgcagacgtcaggacagaagcggaacgcgtcctccgtcttccaccagcaaagcgtcgcgcagacggcaggacacagggacgcggcgttcgtcatccgccagcaggaatgcgtcgcgcagacgtcaggacagaggcgggacgcgtagttcggcatccgtcaggaaagcgtcgcgtagacatcgtcggcggattgtgccgcgcaaatcgaagccgaagaagcggtccaagtcgaccaagcggcgtggacgtggacgcccgcggaggtcaaggcgtggctacagacgcccaaaagatccgcatacgcccatagaatacggcggctctctgaggaacattcaactcccgactacttttgagacgttcgatgttctgccaccggagctgccgaatgaaacgctgcaaccactgggcgaaatcccgacttttggcatgctcgacctaaacatcttccttcctcctaggccaactgaacgtaattgtttggcaacttccaagtttaatgaggagccaccgacccttggaaaattttttgttttattttcaaatgtagagttacacgggaccgggacctggtcctgaaaaaagtgtgtcaactgagtaccaaggtcccgattttgaccgggaccgggaaattcccggttttcccagccaaaaaatcccgggttttcaagccgaaaattcccggtcccgtgcaactctattcaaaagtcatgaaaacatgttattttgggggagggtcgctgatcacgaatccggtcacctcttttcgacgcaattccgaaccacgtcctggcttttgaaaatgaactataaaaatcgggtccattattaaacaataattatcggctcctggcaaaagtgccatgtttttggggactattttttttgttacatcaacaaatatatgtatttgtgctgtttttcaaggtcctcctgctgcaacgaatggaacggcgggcgcgaatgtgacgacgacaacgacaccggcgacgacgaatgtcaacaacaatacggcacctgagaatgcggccgccgccagcagctcctcaagcagcgacagtgactgactgaatgacgcgtggtcggatgagccatgcatggtacaacaacaacaacaataacggcatggcatgaagaaaaatggcgatcggaatggacgagaattttgcagaggatactaattaaaaagcatggataattcgcctcattaaagaaatgttgtataatgaaattaagcccgtcaaatccaactgatttgtgtatgaatttccacactaatgcatgccatcatttgatgttactaataaatattgtgaattggttttccgctggggtttttagggtcgattatcagtggtaactaaggctgtataggagtgattttggcaaagctgtagaattgcggtcccgacagaaaataaacttaaaaattttatt

SEQ ID NO: 6079 - DNA, 909 bp, Heterodera glycines
agattttgtaaaatcactgattttatctttgatttttcatcaagtacttgatttttcaaaatttttaaaatcttctttacaagaatttgtggtgaaaaaatgttctaatcatgaatatgaactcagattttacaaaagccatcagtttgtctatgattttcatcaattttcacaaaagaataaactgctgccaagcgggctcgaaccccagaccccgtctcacatgacccgtaagggcttcgtaattaaatttcaaaaaatcgtaaaaaacaaaaaacaacttctccaaacattcaatagctcattcgaaagctctttttgagctctacaaattctgtatatgagttttttacgcccgattaatttttcttatttctatcgggaccgcaattctacacctttgtcgatatctgatattctatgatcctctcaatgtttacatcgatgaattttttgtggagctcgattctcttgtactaccgttttttcaaaataagaaaaaggctaaatctggatttaaccacaaaaaagacaaaaaattggcacattatacactttgaaaattgataacattaaaaaaatttccaacactcaaaaataaggacagtcttattgttagaagttagggtatttaaatttctgattcgggccatccaaccaatactaatcttggatttagttattacatttacaagccctgaatccagtgaaaatgtctcccattttcttaggtttttacaaaggccttttgccaccgcttgtcatcgaaacgccaaaacgtgcccttaaattcatggcttttgaccgctattggcgtgttctccgttcggatgcgcttcccacttggctggtgattgaatgtttggccatttatttgcgcttccattttcctctttttccctagcatta

SEQ ID NO: 6080 - DNA, 5043 bp, Heterodera glycines
caaaacaggaaaaaacctggattttcctggacaaaattttagaattgattttttcaagtgaccgatgttttttcaagttttcaaaaacagattaactaaatttaaaaacacattattattattaattagatatttttagatgcttctaagcaaataattaattttttcagacatttttttgatttttaaaataaatttcaaaaaatccaggttcaggcctggatccaggtctcgaggagcctggatttttcctggacctggattttcctggatttttgtccaggaaatcaaggtccaggtccaacatggaatccaggtccaggtccaggcttttttcaaaatgtcgatctctagttaatactagataaacttacaaataatatttaactcaaaaaaatagatgtgactaagtatttttgcatcctttttcgaatttaattcgctttttgtaacctaagttttttttgctcctatttttgggtttcaagtcctaatattgtgagaaaaatttgggaatatatgtaggaattggcgagagattgggaacggacagttagagaccggcgagatattggttgccattagcgcccatggcatattacccaaaatctccaaaattatatttaaataataaaatttcaaataattttcatagcgttgtattcaatttcttggccaccgaagggaacatactttggaaaccagcgggggaggtgacattaaaaaaaattattttaatatctattaatgattataaaattaatttattattaccaaaagaattcaattacctatttataattttttgtatgtcagcttcacatattattaaattgatatttaatataaaattaaaatagttaattatagtcgatacacaagaaaatttgggcgattcacaaaaaaaagggaaaattttaactttcctatgatttttatcaatatcgttttgtttttgtattccgaataataaataattaaatttaaataatgttatataaaattactgggctgtctaattttaatttttaaatatttatgaaaagttcagttccaaatcaaccaaaatgaaataatgaagcaaaattatagaaatgaaaaaaatagggataaaaatgctatgcctatgtctaagcaagccaaagcttttaagactaagctatgactaatgcttagaattaagtagttgaagtagtgtaagatttatcagtgcaaaaagcaggaattggtagcagtcttgcgccaaaataaaagcaatacaaattttttctgcctttttcgccaaaaaattactatttttgccattttggcctcaatttttcaaaaatatggtaaaatgggggttcgccggtgccgatatgcgcagccgggaaaatttttaactctttaatgctattttgttaactaaattgcttaaatttcaaaaaatttacggaataatatatatttttaaatttttaattaaatctccctgatcaaacgagctgaatagcctcacaattattaaatcgccggtttcaaattgttacatatgtatatcgatataaatataaaattagcagtaaacagaacctcattccaaaaatactttaaataaatttattataaaataatttttttaaatatttattctacttaaaaaatattcttttctttgctttgtttgattgtagtggcttgaaacacattttaaagttcctgctgcggaccggaaaaacggtgcaaaaaattgtttttatttttttaaaccaaaattcattcttttgtacaattatagcctaccgaattcagatgattataaaaagaaaattttcgcgaaatgttcgggttttcgacctcaaaatctgattttttgagcccggtgttcttttgaataatttttgatggccgtcatagctttaatttcaaaatggacgtattcacatgccatgtgaatgtagattagcaaaaaaacattcgtcttgatatgtgaaattaattcagccaaagctcctaattagaatatgaaaatggtgatgaatttattaagcctttttacattaaatattttgccaaattgtttaataattgctcattttgattttgctcactatcacagaagtgccttactgaattaatttcgtattttatgatttcattttctttagcttcacttttctcctctatgtatgaagagattgcgatcatatttatagtcaaaaatttaatcaatttattttgtattaaattcggttaaaattacacaaattcttttatttttcttatttcttttaaaaaagactccatccaaacaatcttaaacatttttcgtaagccgaatcaaatttaagaaactcatgtaaacttttcactcatattaattctcttattaatcttgcaaaaaatgtgcaattttagcaaaaaatcagctaataaacaagccaaattttacataattcccggctgtgtgttatcgctggatactaatagtcaaggttaggctttattttttatatgtttttatgtgaaaatgttttggcataataagcttttttcattcagagaatatataacgcgcaagatttagttgcacaatagtcggctaaccacaattatcattacaagcgcttggaattatatgtaataaaaattgcaaaattggatataaatatttttaaaaatgccgaaatatgctaaatatattcaaaaactcaaaaatatgtacctaatgtaaataatttttgattttttagaaaaaaatatattagaaaagcatgaaatagggcaagcgcaaaatgccacgaagttaccgaagatcttcgaataacattttgtgtgttttaaaaaatttgtttttataccactttttgaatgccattttatgggtacattttccaattttttgtatttttttaaggaatttctaaaaattcataaaacttcaaaatataaaaaataaaaatatttaataaaaattgcaaaattggggtatttttgatcatttaagaaaaatttccataaataatcttcaaaaatagccatattatttgaaataaatttggtttttaatttattatatattaaattaaatttttactttaacatttgcctatataaatgaaaaacaaaagaaaagtattatttataatattttcagttgaaaaaatacccttactaatcaaaaaagcattcaactaaatgaattgaaaatgggacatcaattataaaagctttaaataaaatttttgaaatcattcaattttttgtgcatttcatttagtgatttttccttcatttctgttcccaaatcccactctcaaagcaattcgttttactctcaaccgtctaacatggacaagtgggctgcacttgtgtaagttaattgggtgggggaggggttaattgcccctagaatgaggcaatcaaagcaaaacccgaaaaatactgatcaccaaaacggtttaaatgcgtttaattgatctaaattaaaacaaaaaaaacacgaaaatgagggtttttaatcggtgttaaatgggaaaccgatctagtcctaaacgaatcgagaaacacaggccaaatatagactatctgtccactttcagtctgttgatcgccctgatcaacgcgctggacagcgctgttgttcgacaacagcgcgccgccaacgcggacgcatcgaaaccggaaccgaacaacgaaaagccaggtaaattaaaatgaatttaataaaaaaaatttaatttattaatttgatttaggaaatgtggactcggacaaaggaaattcggacaaaagccagggagcgggtacggaaggaaagaacccggatgagccaaaggaaagccaggaagaggatgaaccaaatccgaagaagccaaaggaaagccaggaagtggaagaggatggaccaaatctggaggagccaaagaagccgggaacgcgggaagcggaaggaacctggaggaaaaaaggccaaggcggaggcggaaagaaaacgggtggaaagggagggaagaacgcgaaaaaaaggggaaagagagcgcccgatgagccggcaccaaagtcgccgaaaatgccggataaatttgacctaaaactgccaagtatgcataaaacactgatcgtcctggggtcagatccaatcttctgacatggcatgttcaggagtggttacatttgttgtctgcatttttttgtagtttttaaatgaaaggtgcaaaaaatatttaattttgtataatataagcaaaaagcaattatttcctatttaaataaagtataattttgtgcaaaattatacatgttttttacagcacttggagaccctcaatattataatagcagcagcatattattttgtagcggatttgacccaaaaatgccatcttagaacagaacaacctaatttttatttcgtcctatttttgttcaggaaatgtttggcattttcccccctttcgtctctctcgcaaaaaaagctaataaaaacttttaagaggaagacccatcgaagtcagctgacgtagtgaactatgtaccaaaaattgaacggcctgaggatgataagaaagttgaattcgacggaaagaatggaaagtgtaaagtggaggtgggcaaaaactatttaaatggtaaataaaattaaatgaacttttttgtgttatgaaaaatgagacttttttctaaattacttgtccatttggggacacaacaaaatgaaataaattttgaacaaaattggggggggggggcggtaaattggacgacaccaagcaaagttctcttctaaagaataaacccatgaattagattgaaaataatttgtgtagctaaatggattaatgaattaagatcacgcttatagaaatatatatgcatataataaaaatcttttacgcaaaacttaattttttgtttaattatttttaattaatttatttttatatcaaacaatggccaattttcggtggccaatttactgggagccaaatttggttggcgtaatatttaagcaggcaaaatttggtcagattatgacattttccatgcatttgtacatatcaa

SEQ ID NO: 6081 - DNA, 2361 bp, Heterodera glycines
aaaaaagttacgatgttttaaaaatgcttggtacgcagctggcgggacctgactccaacggaattaggcccggttctagaaaaaaatttggggagggctcggcggtgccgttaagcgcagccaagaaatttttttggaaattatgaaatatgtttaggaaattatgtaaaatatttaaaatattccctttttttcttgaaaattttttcatttcaccatatatatatatgggcctgattgaaatggtattggtaaaaagataatgtttaatttatttcaaataaaagtgttctttatttgaattactttttgattttctgatcatttggctgatttataaaacgcgaaatatgtgacgggatttataaaacgcattagcaccttatatgattatttttcaggtgtcattctacagtagaggtggctaccaattcgctgccaaaaagtacggtatcgaaaaagaaaaaccaacggaaaacttcaaaaacatggaagaaatcgacgaatacggcttcatgcacggtaagttcttcgcatttaaaaaaggtgctaggtcgtttcgtaaaaaatgtcaatcgaatgataacaaggtttttaaatttgattgtgtttaagaaaggttatttacgagttttctcgaaaaaactgtaaaattgacacttttacgaaatgataggtgaaaatttttaaaggaattttgggatccactagtgcccaaaactgctacaggggaaaatttttattttgtttacaaatttacagaatcccctatgcttacgcccttgtgttggatcatttcacattttgtttggagcttttaattttcaaaaagatttacccattttcgagtctaacttattcgaaaataaaaatcaaaagaatcaattttatgataatgattttttgttttacaaaaaaagggatttacctaaccacatttgcattttttttcgttttcagacatggtgttgctgctgtttgacggttgtgtcatttgtaatggcaaagaagtgcctaatgttacgctgtcactcctccaacatatgccacaggtaaaaaaatatgtttgcccctctttactactatttttacagggaccgttggtcgattcgtgtcaagaatatgttaaacggcccaggtaaaaaacaaataaacagaaaataaatatttgttgaatttgtttttagtaaagcactgattgtgccgatgaagcgagttcaacaagaatcccaaggcaactttgcatacgctgttttgctgatggaacggtacggtaactataaataaatgaatatatactactgtcaataaagaagaaataaaagatcggtaacggcgcacatttacaaatgaccgtattctgaggcatatgcatttattctaacttacggcctaatacgcacaaaaatgattttttaacttcttttgaaacttttcttattttttgtgtctttttgatgtttcatcctttttttcgtgcctttttttaaattcatttgttttgttctatttctggaacgtcaaaaaatgacaaaatcatacttgttttgcatcatagcactaatattttcaaaatgtttgccggcggcctgatcagcatcgccggctcatacaaattagtccttccccagtggtgggaaaagcaaaaaagatcgtatgattaactaaaaacataaaaattcacaaaaaatttcggaaaagaatctttttgaattttaaatggtagacaattttaacaaagattattgtattacaaagactatttctatcagtacgggtttaccaattggaaagaccattttgtgcttttaaaaatgccttttaaggggcgcgcttttttcaaaaataatagattttatgattgggttcattttttaagaaaattaggagtttggggcccggcggtgccgttaggcgccgccgtggaaaattttgagtttttcttagttttttaacagatttttgttcaaaaatgactaaaattttcatcaatctttaaatttaaatgacattatgccataaaattccaaaaatatcataaaatttaagaaatcagaacaaatttggtcactacctcaaaaccagaacatttctgataaatcagaacatatccgagccctgggttaaagtgaaaaattttagcctctgtcctgagaagaaacccgcgaccgacatcgataaccctgccaacaaattctatatgcaaatgctcaagtaagaaattaaaattattaaaatttaattaaattttcaaaatatttttaatgagtgactggcttatttcctgtttagatacagttaccgcgtggtgctggaagtgaaccacacctgcggcgaaggaggaaagaataaaacggtgct

SEQ ID NO: 6082 - DNA, 3312 bp, Heterodera glycines
cagcaggcatcacaaccggttgccgtcacttcgtcggcggcaaaaccgctgccccaacaacactttgtgcccccgccgccctccttttacacggccggcaaccgttcgtccaacgccgccgccgccgcactgcttggcgttgtgccagcgcctccgatgcttccgccgtcggtcggcggtggttggcccaccgcttacgcgacacagcagcaacagtcgatcaatgccgtcacttcgtcatcggcaaaactgctgccccagcagcctttttacgcggccggcaactattcgtccaaagccgccgccgcttcaatgtttggcgttatgccacgacctccgatgctttgcccgtggggcggcggctcagcggtgattggcccaccgttgcccgctgcttacgcggcacagcagcaacagccgatcgactccattccgtcatcgtcgtcatggaattttggccaacagcagcaataccaatttgcggcagatctatcacaacaacaccacaaagtaaaaaacttcggtttgagagaggaggtggtggatgggtagccccaatcaaagaatattttagatgtcgtccacttcatcaacggcagatttgcaccaaaagctgttcgttccgactgccgaagatctttctgacagcatgatatacccatttgatgtgacgcatttgttctgcagagaaaaaacttcggagattttggacccccaggttagcaaatacctaatcattaagagaggagggggtatatgggtagcaccactcaaggaatattaatattttagatggcgggccccacttcatcaacggcagctttgaacccaacgctgttcgttccgactgccaaagttttggaccccgaattggttagcaaataatcattaatttgaattagggaagttacttagacacacaggagggcattagttttgcatatccaaaatgaagcctcttaatttttgtgagtgaaattatggatgacttataaaactgtatcaaaattaaatggttgtggtactcatttggtggtgccgaagatgacccatattgatttgttcaacaaaataatggtcattttcgatttgcatctctttatatcatggaaatgttttctctaaattcgcttttttccttcccaatctccgctcttttcggttttagaatgtattaccctaaaatgattaggcttccgtctgaacttatttccgaattggcgagtgctcttccccttgacccccgctgggccgtcatccgtgtgtcttcggcctttgattttttcgtttatacaaaacagataatttataggaagataaatagccaggaatttaaatttgtcttacattattttaattgttcccacttttaggtggatgaagggcttaaaaaagcaaagcaacaagtttcgtcagttgccaatgctcagtccagtgacgaacaacgacgaaaactgctcacaggttggaaccatcgatgttattttgtatagcctaatagaggctttaccattttgtgttgttgactttatctggtaaaagtcggcatttgttttagaaatcgcggcgtttttcaaaaacaaaacttcagaggctgaagtgattttaagcaccgcagtgtcaacggatgtgaattcatttaaatgtgtgtgcacgcatctttacactcttttggggaaggaggaccaagcaaaagaagcattcacaaattgtaattttggttatggaaatttacatttagaataacaatttcagttcttcttgaattgtgtggagctttctctgtgccttcggtaaattgagtctttttgggcggcctaattttaatcggggcatggtcattcctgtttgtcttttccatttcaaatgaaatttgaaaaaatttatcattacctcatccgtattcaagatactgagcgctggcggtcatgagaacatttcaaaagctttacaaaaaagtttcgagcaagcggaaatctgttgctgcttttgcaaaaaaaatgtgcttttagccaacctctgttattgtagccttgcccaagaaaaatgtcatcaccaatttgagttaattggtttaaaagattaaatatcaaaaaaataaaataatttacatacaaattagctgtcctttcccgattagcttatatttcaatgttaagctgttgcaacaaattggtgcagaagacgaaacgcgatcaaaaaagaacgaacgaagggggcgaggacgacggtcaggcaaaaaagtggcgaattgagagcaagagggactgagtgttttctgagaaatgacacggaaagaaaaattataagtgtgtgtgtcacaaatatgtacatataaattccaacttattcccttttttattttcgcctctcatcccacaaaaaccatccataaaccccgggaaaatattaatttgttcttattgtgttcgggctttgccggtttccccccgtccccctccataaaatcgcctatacatacgttttttgtattcgttcggtcactctcttttctttttcaaaatgaatgtgtccacatttatcgctgctaatttattcacactgatcatacacaatatataaacaattttttgctttttgaaattattaaaatgaataaaaataaaacggaaattggcattttcctattcccaattatcatcggtgctcaattttctgcgtttcctctcccctatttgcttgcgcgtcttcgtccgcctctccatctccagcctcattctctgttcgtccgtctccagtctgagtttctgttcgcttttcctcctcctccttgccccatccgatgttggcacaatgtccttgtcaaagtgtttcattgcgcttccgaacagcacaaaggcggccttcttgtcgcgaatttccacaaagactgttggcagcagcaaaaagtcatctttcgccctaaagccaaaattcaattgaacccgaatgagtggaaagctggaagaaacaatccgaatttgcatccactcagttaatttagaacaccaaaggacctcaaaatgattaaaaagcaattttttctattcaaataaataaaaattcaaaaaagggacaaatgggttaatactgggggtttgttccccccctttttttggcaaaaatttcaaatttttaaaagtcacgtaaaacattttttctggggttttcggggtcgctgatcacgaatccggcatccatttcgcccaattccgaaccccccgaactcaaattcgaaccaaaagtccgaaaattaatttttcctccaaaatccaattattttcaccaaatctattcaaatgcacgaaatca

SEQ ID NO: 6083 - DNA, 3338 bp, Heterodera glycines
aaatggtttgaatgtgccgagtgttactatcaaacccctgccaattggataaaccgaagcaagtgctagcgaaaactcgacttattttcttttgcgtgatatggagacatttgtgccacggattaggaacaaacgaatagaattcacgctaaatttgaaaaattggattattcaattttgttggatacgggcgggattaatcgtaaagggtgggcaaagtggtggacccaggcgggaatcgaaccatcgccctctgttggtgtggtgataggctttccacccacaccagtgctcatcccattcgcccttcccttttatgaatcttttgcctccgctttttaagcatttttaactgtccgctggttagatccttgcaaaatataacgcccaaacaatttgttttttaaatttcagttgtattctcggagaatcgatcacagaatgaaaaatttcaaaaaccagtaaagcccccaagggagaaattaaaatgggaaaaatgcctgatttctcaggagcgaaatagcggactattgaatgttgagccgaaaagcatcccaaaagagtggagacaaacccatcggtaaagcgaaggcgtgcaacgcctcgcacactgtccgaattggtggacaacggctgaacgtccaaaaagcgggcgaagcgactgcgccgtgtggcaaaaacggaggggtagccaatgcgatagatggacctggaggcggtgtccacggaaacgacggcgacaattcgcgtgaaatatctgtgacgaaacgggggggagtaaaaatggaaaattaaagagaaaacgaaaatggactcactttttgatgccggcaaaaacgagggacgaaaaaaggatgaggccaatggagggggagatgggaatatgctgagaaatggacagcggaagagaagccagagaaaagatgaggaacaccaagttgaagcgcaaaatgaaccaaacgccgacaaagccacggtaacggtaaattggggtcctaaaaaggagggaaatggggaaagaacccaaaatcctggagcaaaatgaaagattgataacgaattagggatgggacttccaaaacaaattgaaaatgtaaaaaattctaattttcagtcatttaatttaatttggccccattttaaagtgccaccaaaccatgcattttcggctgtcgctttctctttcagtgccaattcgtcagccgtccattccatgggttggacagactcttcaacgagccggacattcttcgaatcagacgacagtggcatgccactcagaaagtgtgttggtcggttgggagttttgccgaaaagggacggaaggcaaaatgaaattcgatggacggaacgaaaggcattggccaagggaatggccgagacatttggaatgaacagctgtctagcacaaaaatgcatctgaagaatctgataatgtgaaatggattcgtattgtaaaatgcatgacttttatgtattttaagggtagttctagagaatacaaaatgagtagtgaactgaacccttttaaaatttaaatataagaaactttttactgacaatgaattactttttttaattatataaacataaagccagagtaaaaatttaaatttatttagtaggagaaaaagaacggattaatggatttgtaacttctgtagtgataacgatggtctgaattttaatggttagcgttacaagttgtaacactaaaaaaaattccaaatatgcattaaagtatatccacaaaagatggtggtttggaaaaaaccatattgtaatttaaaatgctcgaattgaataatttatgcaagagaaaatgcaaagcgctgaatagagaaaggctggcagtttactgctactatatttagaaaaatccgtaaaattttacgatttggaggcatgtgccgaaattgccagccctaccgatagaccaatcaaaaaatgattttccgttgcattaaaatgaagtagtcaaaaagaaaaacaggaagaaacaaatggaatagattaaaaaaaaagcaataacgttcgtacgaaaactgaaaagaatcgttgtgaaaatatttgaattttgggaaatttgaaaaagatgaatgataataatgagatttttcccatagaattgtttgagaaatttgaggaaggttcaaaaatataaaaaatcgaaaactcttcttcgctttgtccttttttgtccaacaatggcaaaatgtccaactcagttcaagtcgaaaaggtcgtccaccgaatcatcagcctaaaaaagataatagaaaaagtgaaaatgttttcttgcttcgacctgcacatcattctgttcttttgggagtccgttgttgtgtccattttgaaggtcattcggaggaggcggaggcgggggaggaggggggaagtcgaagttgggcacggaattcggcatttgtggaatgccagcgctgctgagcaaaattttacacaaaaaggttgaccatccgataactaaaacaaactctgcggtttgttcttgaactccccctccaccctcttaataaatggtagattaacagacgcgctccaaatttttgatgtcgtggccacgggcgcaaacgtccgtcgtgacgataattgggaattcgcccgttcggaagtcccacaccgccttctcgcgcgttggttgggcacgcctactaaaaaagcatttgcaatcagacaaagtgaagttcagcagagaatgagagaacgcacccactgattgtggtcgcagagaaccctcgagaggtcaaaaaattacacacaatttcggtatcgttgcgtgtgttgacgaaaaccatggtgctacgcagttttttggaacctgaaaacttggcgttttgttttgaacatgcactttttcaaaagtccacttactgtccaattgttcgttctgttccttctcgagttgcaacagtcggacgagtgtgtgccgtttcacggctttttcggcaaggacaaatgtttgtttgatgcgtttgttgggtgtgatttttcctttggagactaacacggggttggggcgcataaattcatcggcccatttcagcacatcttttgaaaaggtggcggagaaaaaaagagtctggcgcaactcagtctaaaggaggtggggacattgcaaatatcttggtaaaaaaacaaatattttgttatgaaataccgtaggccaatttggcatactgccaagtacacgcatatccaaaatgaaactttcgtccaacagtttgtcagcttcgtcaagaacgaacaccttcaaaaggtcgaacatgagctaaaaggaaagagtagacgaattatttcgaagaaacaagcaattttct

SEQ ID NO: 6084 - DNA, 991 bp, Heterodera glycines
tgctaattgatagaaatatttaaatttaattattatttttcatttagttgcagaatataaatcgtaaattacaattagctcaaatgtaattaatttttaactcgtcaattattcaagcagcagaattaattctcataataaactagaaggctgggttttcttaattttagtgctattttttctatcagggcttgaaaaacttaggtttcaatccgattttggacataggcgcaaatgtctggctggacacgatttggatgacatattttaatttttttgaatttattacaaaaatttacatttttctaatataataataaattaattatcccctttaattgctccgttcgtccgtttagttcaccaccgatgagccgtggcctttcttcctcacatttcacattcagtccgttttcggtttctgctcattggccatcaatgttgtgctcattttgtacgcgttttgtgccggcgactgttacaacccgcacacgtcaatgtggcgatccatggtaaaacagcagcagggaacggaccggctcagttcggccccgcacggttcggccctagcccagtttttgatctataactttttcctttgccaaccaaatccaacaatctcggtatcattcgaaagctcttcacatgctctattaactttacaaaaagcaaaaatattttcaagctttaaaaaatttatgaagaaaaaacttcaaaaatattgattatgttaatgaatatggtatgctaattgtatgaaagggcaaatatccatgtagcgtcttactaaagcgtatgtggaagtctgacagtgaattgtgaggccgtgttccctggtccaggtgaagaggatggtaataccacataaaaattcgtccattttttctttatttagcttcgcgctcttttacaagatcatcgtcccgaatccacatgtaatactgatcggaatgcccaatccaacgcaccaggtggtcttttgactcctttt

SEQ ID NO: 6085 - DNA, 3558 bp, Heterodera glycines
aatgtctgattgtgaccagcgactctgaaaacacacataagcatttttaaaagattttttacggaccaacctgatttgtattactttgtcacgcacacattcttgacaattgagagtttaataaaaaaaataatttccaaaattcttacagctaatccgatttcaggaaattgcgaaatttacactaaaaacaaaatttaatttaatcattgcaacagaagaatatttggtacttcgggttatgtcgccccccctcaaaaaaattccaaaattcgtaatttggggtttccaacttcgctgatcacgaatatgatatttattttaacatctgatgacttttaatcatagatttgacaaaatatctatgattttagaaaaataggcttagaatcacatttgaatattttacaaattaatttttgatatatcattttttgaaaaaatcgattttttagggataaatattttcaagctataaaaaaattatattaagaaaaaacttcaaaaatgttgatttttttagttttcatgttatatcttttttgataattgtcgaattgccaagcaatagcttagaaaaagcttctaaacacattaagctttcgaatgatagcaatatgttggatttggttggcaaagaaaaaagttatagccaaaaaatcggctggggccgaaccgtgcggggccgaactgaggtagaccggcagggaatggaaaaaatgcttagaattggatgggaaacgaacccatgcctgcaccccatttcgtagtggcaaattttattgaaaattccaataaatttcaaataccgtaattttaatttattgtgagtaattagctgatgaaattttcatctttcaacgttttgatgaaaaggcacgtcagcggattacacaattaaattgtcaatttgtccacctttttcagttggtcgttgacattttggccaccgccgggttcattttggacgcggaatcggcattgaaattgcgttggttttttgtacaataaaaaataattaattttaaaaaaatatattttctctctaaaataaataatttaaaaatgcaattcaatttttaaggcttttatattgtctcatttcttaattatgcttttccaaattcagaagaattgtccgccagtgcccttccgccctttgcttccgtcgatggttcgtcccaatttgtgccgcccgccaccaccaccaccaccgccgccccgttggcacttgagtcaagcacagttgagcagcagcaggcacagccaaacccattcaaagccgcaccaccgtactccgtgtacgacatcgccaacggcaactttacagtactcggctgcaccgcgcaacgaccgtacctttttctcacgctaatcgcacgccaatgggccgcactgttgatgctgttcatgggcctggaacgacttctgtttgtcctctacccgctgtggcttcgctccattcaaatgaagtgagaaaaaaatgatataaaaagcgatagcattttagggctcggatttatatatttatatatgtatattaaaaaaaattggaaatgttttatggaagcaaaagattttctaattttgattaaataaggaaaaaattttatataattaattcttttttttttacaaaattttttggcgaaaaatgttcattttgtcaacataaattaaggccctagcaatttggacaaaaaaccaaaatattcacaaaataagcaaggaaattttagggcttgacgctattttatatatgaaaatttcaaaaaagcaaaaactttttctgctttttatgattaggtcaagaaaaattgaaataatttaaaaattttacaaaatatttaacgaaaaattgtcaattttaacaacattaattcaggctctggtaatttaaacaaaaagataccattaattttgattttcattatttaactttatgataaggttattttataaattaaaacctaaaaatagtcacaacataaaaatgggaaattaaaattttcatttttgtgaattgactaattgcttcctgatcactttaagtagcttttagcttttggacatacatatatgtaatctttcaaatttatgatttatttttttattccaaatttaatttcattttaaattttataattttgcttacaaagtcaattaattaatttaatttgattaagtgtggccccacttaacgtgttcaccgttttctttgccctcttctccactggcattgcctacacaaatgccacttatgtggcggcctatgagcaaacgcacttttcgtgtgaagcgacttgggcattcggcgaagactatgggtaaaataaaggacaaaaaaaattggcgaaaaatgaaaaaaaccatttttgaattttattaaaattccaaatggggaaaggacacttttggtttgcaatttttttgtaaaaaataagtcgtgaaaaattctttctaggcttttcggggcctcaaattacgaatccgacatcacttttgaccagttcctaatctctaacttgactcgaaaaaagttgaaaatttccatttttaaaaattaaggtaggttagcgattcggaattggttgaattatatgtcagattcgtgatcagggattcggaaacattcggaatcacttttcttacagttagatatcatcttataaaatttgcaaaccaatccgattttactttttattttatttaattgggttttcattttctttttaattcattttaatttatttttctttttacttttaaatttattttagttgattttccttttttcctttttaaatgttttttaaatttatttggttgattttctttttaatttcttttaattatttcttttaatttattattttaatttggttttaattttgatttagttttatttatttttttcctttttatttttaaattatttactttttaatttttttaaaattcttattttagttggtttttctttggcattgtcatcgctccccaggccttcggctgtctgttctgcattattgcctatttcatggtccaccatgaacatgcactgagaaaatttgggggcaatcgcctgaaattagccagcgaaaagagaaaacttaggtttttttttgcaaataattatcaattttttacaaaaatttaatttcaggaaaatcaaatggcttctgatcacttcctcctcattcgtcgcttttccccaaatgcttttgctttttctccaattaattgctccacaagaaatgtttctgatcaaaatgctcatctcccaactgttcttggccaaatgtttcggcaacattttgatgtacaatcgagcgattgcttcaacacgatttgggttcattgaaatggtaattaacgcggttaccccacatttgcgccccggacatttgcgcaccagccatttgcgcctatgtccaaaatagggttctaacttactttttttcaatccaaaatggactaatctgctttaaacaagggattgaaaatgatttatgcgataatttggttgtcagcaaatttttgaaaaataataaattt

SEQ ID NO: 6086 - DNA, 4851 bp, Heterodera glycines
tttagcctattaaaatatttagaaatttttttattatcttttatattttttgaaaaatttccgatttccgacgtttttggggtcggaaatccgatttccgacacttccgaaaatttttggggcctcggaatgccatccctgataaggacctccggaccccctgttcctagttttttgaaaaattgcaccgcaaaaaagtggttttgaaaagaaaaaaatagtcagatttatgaaccgttaataatttgatttccgatcaactttttaccgtcggatccaatcgaaaaatcttagtcgacccatcagccccttttaatgcatcccgccagcccctaaaaatttatttttcagcattttttgatttttggaaattttttgaatttaattgaattttttcgaattttccaaaatcccgcaatcccgcacgggatcccgcaaattttaaatgcgggatttgcgggattgcgggatttgcgggattaatcccgcgggatcccgtcccgcaaaaaaatttgagttccagtcccgcagcgggatccgcaaatttgaaattaccggtctctaattaggaccatcgattttagtgagaatattatgaaagcaagttttttagcctttttaaaaattttccgcatttttatccaatttagcaaatttgtgggattttcttattttattaaatatttctgggtgtttttacaaaaaaaaacccggtctccctgtcaagttaaaagaaacgacctctaagataaatacggaggatcatcattcggcgctgcgcttccaatgaaaagtgccatgaagaaaatgagggctaataataatgggacggggaagaaaggcatttttgggaggcatttggccatgttttttttggcgtaaaattcaaaatgaaataaaaaaatgctgctaattgtccaagaattgtaaacattttcctttaataattgatgcttcttttatagggcaaagcttttggacggtccctttattttccaaccactaaatttgccaatttccgtaattacttttcatatgaaaatttccatttccgctacgttattaaaataatttaaacaaattattatgtttttggtgaaaatcaatttgtatttgtttttgtttttcagtgctttggttacgaatttttttaaactcggaacagaaattttccattttttattctaaaaaatttttcaaacaaataaattcaatgaaatatcgaattttaaattattaacaaaacggcaagataacaacaacttgctaattgttaatccaagaaaaaaaatatatagctttacaaaattctaaaatatgaagctaatgatttttcttttcaatcaattttaaaaatttgatgaaatttatgaatgttgatcaattaaaaaggaaacttgaataattttgaaaattatccactcatttttaaatggcgggttttcaaaaaatttggctttcaataaaaccattcacacatttttaaaagaattattgagaacaggaaggatccgtgagtgtttgtaggctgtaggcacttcagggaaagttttttttcgaaatttatttgcgatttgaagaaaaatttcagcaaaaattttcgaaaaaaggttatgtcattcatagttcttgcggctcgtcatcccagacatttgcgcctatgtcaaaaatcgggttcaaatctgagttttatcaatccctgataacctaaataacattaactaaatgataggaagtgattgtgtccgataatttaatcattagttcgtttttgaaaaaatcatcaattattcaaataacagaattaatgctcctaataaactagaagactatgttttcttaattttaatgtatttagctatcagggttgaaaaatgtaagtttgaaccgattttggacatagccgcaaatgtctggggcgcaaatgtggggtaacccccctttccggcactctcatctttctgccgtaaagttcgatcacaacctttgcaatccttttttgaaaaaaaaacctttttttatgggtacactttccaaaaaatttaatttttcacgagaaatttcgataaattcacaaaaatctccaaatttgtaaaataaaatatgtaagaaaaaaattgcgaaatttagaatttttttgagcatttaagaaaaatttccttaaaaaacctccaaacatgcaaaaaaaaaataggaaaaagtgctaaaaagtccaaaataggtaccagaaatgtaaatccaaactatgtaaatatgtataaaaacgcaaaatatgtaaaataaataaaagtccccatcttttgtgaatacaaaaaagaaaatgtttttccgactatttagaacatctagaatccaggaaaaatgtatttagataaaattggcatccctattaataagtaatttttaattaaaaaaaattaaaattaactttctgtttccaggctgagttttttatccgttggagagaaacagagaagagagaaatagcattgtgagggatagagaaatagagagattagagagagaagatcaaagcgaaaaaaaattaattacaaatttggtgtctatttataggcgtaaattttaatggaaagaaaatctctaatttttctcttaaaaataaaatgacatcgcacaatctttcgaatttttcttttctcacttttcaataaatttcacttgcaattgctttttccttgatacagatttttcttgtttcatttttcctaaatattcttttaaattttgcattttttcttcaaattttgcattttcctgttccatctttccaaatgtgtcctcccaattgtttctcaatttttcaatttgttcccatttttcttttttatcacttgctttcagctcaaattcgagcaaattccattcaaccgttttaaaaaatttcgggtttgcattattccaaactttgttttctttcaatttttcgaattgcattaataagacgggaacgatttgttgtatatctgtaagaattgatcatataattgaaattagacaaaattaattttttcccaattgacaacaaaaggcaaacccaaaacaaaaaagctcaaaaactgaattatcatatctttaccaattaaatttcgagactagaagcaaaaaatcattttaattcttgaaaaataaaaaaaatatataagaattcaatgtccgatgaatcagttgttgattcaataaagaagtttttttattggaaaaataagtgttaaagaaaatgtgttttaaattggaaggttgaacatgaaaaagttaaaaattttcgaattttttgaattttcggtatttttttaatttttgatcattttagtgttttttttttcgaaatttcatgtgataagagccttaaatagggacaaaaatctgaaaaatgtttataaaaataacaaaccaaatcaaaagtttttattaattgatgttttggtcgaattagtgcaaaatatgaaacaatacaaatccgctttacttatcacattatccaagatttaaaaaatcaaaattccattctaaagccaggcttatccctaattttgtaaagaatatataatctttttttcaatttcaattttattataataccattgtcaaaatcaaagtcaagttcaactgcttttgcgaagtttacaatgctttcgccaaaatattttcttatttctttgcttatgcttaaacattaaattaacgaattatgttgtttggatgaaatttccgttttatcaacatacgattgctataatagacgaatcgatttttttttttttttgaaaattagacaattcataaattaacgctaatatttcaaatgttggggatttttggatcagtaaaatacacgaatttggatttttgaaataaaaaaggtgtattttttgtttattttttttttgtatgcagttgtggtttttatcctgtttctctttactcaattttcagttgctaatagaataatgaatactatagactctaaaattatcatagaaaatttcttttttttttaaaaaaataagaaaaaaggcaaaaagaagaaaaaaaagaaggtaagaaaaaataaaaaaaatatcattaaaaaatctaaatgcaatcgtggaaaaaacctacgaacaaaaataactaataaaaaaaaggaattaaaaaaaccaaaaaaaagacaaaaaaatatatatataaaaaaatgtttactgtaattattttgtctacttttactacggtaactacaaaaccactgaccttttgtccgcgcacaattgctgctgcttctcagcaaagcgttcacgtgccatcgaaatggattcaatgccaaccaatggaaaatgctttgcgttaattgcattttccaataattgctcaacaaaaaatgacaaaatgcaaaagcaattttgaacatttattttgttttgttcagtcaaattgcactttgtcaaaaattgcaaaacaaattgaaaaattcggtactccgacgtctgatcggctgagctaatgtctccattgtcatcaattttgctaagaattttcgccattttgaacacttcaaacagtgttggtgaaaattttgacaatgcacataaaaagtggaaattttctgtaaaataaaaagggagttatctgacactaacgccatgcagcagacagatgccctccaaagtgtatacgcctcggacatttgcacctaagtccaaaatcggatttaaacttacattttttcattccctgataactagagaagaccggattttgcggcatatgccttttttgcgcactagtttcgacatattataaatataaataacacattttccacttggtttgaagcttctacgttgacttttatta

SEQ ID NO: 6087 - DNA, 2093 bp, Heterodera glycines
  unsure (1)..(2093): unsure at all n locations
aattaatactaaaggcataaggctttatcatacgggttntaagcgagataattttataaaatagtccaaagtttcggaatggactgtgttataccttatattaattttttcctttttttaatgaaccatttttaaaaattaataaatttctagaaaatattgacaaaattaataatatttaaatttatttaaaaattaaattaattagttatgcttttacctttagcttctttctgttttatttcattttcattttcataattcacataataaggcagaagccaagtcggagaatttatttccagcaaattgttgtcccgaatttgaattttgtaatcaaaaaacctaaactagtaaagagtaaagaaaatcttgatcaatttttaataacatattttctgtttattcacatatttagaactttagagaaattaaataatttaaaaatttaaatgacactaggaaaaaagaacaaatttaaattcatctttttccatttgtgaataaaattatgtttttgtttttcttactcatatgacgcataacaattgttgttggcggagattaatgtgctcaaaaaaagtccgatttgctcaatttgagtacttaatcgaattgccaatgtaagaaacaatttgaaattgacccattgataattatctaatgtcattagtggcttatgtagctgaagcggttcctctgaagaaatattttgcaatgttttctcaaaatccatttccatccaacaaattcggtcaattggagtagaagttcaataattgaaaaacaaaatataataattgaaaaataaaattattattataaataatcccgattcgcacttgacaaaagtattttgtttagaaaatagggaaataatagcaaattatttttttcaatttgcaatttttaaaattgtccaaaaatgcataaattggtcgttttttgatgaaaaactgctaataaagtgccattttcgaccacagcccctataagcgcacttcatccccgttctctaaataatacaattaaatgcaaaatgctcacctctgactaattaatgtaattagtgcactgaatcgcttaactaaatgtacacccatcgaaagtgggaatgaaattagctgtcggtgttcatcataattcacattgtcattgtatttggtgacagtttcaaataaaatttgactgaattttattttttgcttttccgtatctttcaagaaattatgcattctgttctgttgttgacattctctttctacatttatatttacgtggcacgaaaggcgtgacggatttgggaagaatgaatcatttttttggggtgcctatggcagaataaataaataaaaattgacttaggacaggcacgataaaaaataatctgggggcaatccgaagacgccaatttcggttttcaataattatgtctgtgggcgaaaaaataatatttttttactagtctttgtcgaaaaaatgaacaattttataaataattgtttcaaaattttgcaaaattaaatctaattttatcgtcaggcgatgtcgggaatttttgcaatttgaacgaaattaaaaaaaaaatttatacgaaacaaaaaaatttttaaatttttgttattcggttataattagggatgccaattacataaaattagcagccctagttataatatcgcaataattttatgttttttttctcactgggacttcttgtcggcacaaattggttttctaactttgcctaaatccatattgtatttattttatattttattttaatattatttggcaggtctctctccaattttccagatttccgtttatctttcggtgaaaaaaatttaaatttaataattcgaaaaaacccattaaattctgaaaaaaatttccccccacgacatccggccacgccttctttgtgcaaccttttataatctcgaatgatttggcccaaaatattgaccagttcttccaatgcagagattttctcggcaaatgacaattttttgttaaatttttgcaaataattccgaattcttgcacaattctcttttggcttcaattgattctaaaaatttgccggaaaa

SEQ ID NO: 6088 - DNA, 6925 bp, Heterodera glycines
tgccttcacctttttgcaatgcccaatgtccgtcggcaacaatttcaggaaacatctttttgagatccttgataatcgttgctttgtctccatttttttcgatcgcattcaaatgcaatgaagaattgacttttttctttgatgttcggacagtcgtttggagaatggtgcaacttgccacaacgccagcaaactctttgagtttggctttgaatttagttccctttctgcgttggtttcatgggccgctgcttctgtttgaccgccatcaaatttcgcgatgccatcggccgttcttcaatgacttttgcttcagcgatggttgattggtacatttggaggtcttcgacaactccatcatactcgatcaagtcaccatccgctgcaagcttcgatagaattcgctttctcagctcggcatccttcgttgacttcagtgccgtcaaaagcatgaggcacgaaaatttctcgttgagcttgtcgaactgaaaatcacggaaaagccgcttatgtcggttgatgaaggggcgaaaattctcatcgtcgctttttgaggccctcaggcattcgtaacgatcaatccaaatggattgtggccggctgaaagcaaatttgagtcgctcctacgtttggttgaagtcaaaatcgatgacttttttcggcaggcacgacttgctgtattggctgaaagccgcttcgctcagtttcgtcatgataagtttgactttcgattgatctgcgagttgcggtgccgcacagtcgagagcgaaattgaagcgctccaaccaatccgaaatgcttctatcgtcggatggctcggaacagtcgatggttggaagagaaggcagagcatgcgcatttaaggcgggcgcagcattttgtggcggattcgccaacaattgctgaagtgccgctgtgagctgttgaattgcgtcgcccatattaaccacagctcgtggactttcccctcagctagagtactcgttttaagtgaagtgtcgttcaccacttattgttagcagcgccaagctactaatcaagtgggtgcgcgtggatgagctgaataagtatcgcctagatactataaacagcagcgcaaaaaatgctctgatttcaaaagaatccgcaagccacaaatcaaaattgttttggctgcacaaagttcgattttgtcgaggcgtcgccaattgttacgccccaaagtccgaagaggaataaaataatatttattcaaaagaaaaggacaagggcgaacagggtcaaatattgattgggaaaataagggaacaaaataaatgaatgaatggagaagaacgaactgagggaggacggggaggctatttatgcaaaagactgagtggtcaaagaagggatggggcataaaactaaatgggacggaatgccaacataataaataaatcaaataatcaggcccatcccgaacaccttcccctttaaaagactgtgttcttatcatccgggcgtatatcgttcaggcggacgccgatttcgcttgggtctttcgtgctgaacaatcggctgaccggcgcgttcttcgatgatttcgtttggctgctgtggctgatcgggacgcggagatggtggcgctatctcaataactcctccagctggttgtgccacaacatcgccaagttgttgattgacctgtgccaatggaagtccaaaggcatcattcaaaatgtcgaggggatcttcctcatcaacatcagaatgtcgaaccaaaagttggttcgcatggaatcgtccaactgatccgtcctgaaaagttacgtcgtacatcacaccttttttctgggtgatgtgcccgggtcgccaatcctgcgacagtcgatgtcgggcgtagaccatatcgtctaagtcgaacgatctcggcctcgcgccatggcgtcgattgaacttacgctccatttcttcatcgcggatgacgattggacgtttttttggtttcaaaaggtccaatgtcgatcggagtttcctctgcagaaacagttccgctgggcttttgcattcaggcaaagactcattcggcgtgacacggtatgtggctaaaaatgtgtccaacatttcggtgattccttccttctttaatttgcgacacgtccgtttgaatgtgtcaacgaaccgttcggcttgtccgtttgacatcggacaataaggtgccgaaaacaaatggtttatgccgttgagtcgggtgaattccttgaattccttcgacgaaaattgggtaccgttatcggtgaccaacgtttcaggcaatccatgccgtgcgcaaagatagcgcaatttaccaatctggcggctgaaccggtggaattcatctcgaatatttctggccacttggaatatgtgtctacaatgacgaggaacatcttcccaaagaatggtcccgcatagtccatgtgaacacgcttccatgggccatcggattttggccatgaatgaagggtagtctttactggtgcttttgcctccgaagcacatgtttggcaggaacggactatttcttcaatttgatcgtcaattccgggccagtagacatactgacgagcgagatttttcatgcgttttgtgcccgggtgtccgtgatgtaatcgttgtagcacttctttttgaagtgattttggaatcacgacccgttcggcatacatcaaacaatcattctcgattgacaacgcttctctccgtcggtgaaaagggacaatgtcctccgacatcgtctttttgtcgggccactgagtgcgcagaaatttcatcacctttttgagtgtgtcgtcctgctcaagcgattcgatcacattctcatttgttaatgggaaattctacagaacagaatttagggtcccaattgtagcactcgtagaaagtttggccaaaattatgtcgtcttctggcatcggagttttcgcaataagtcgggaaagcacatcggcttggccgaactccaatgtttgttggtactcaatttcaaaatcgtaccccagaagaatgattgcccagcgctgcaaccgattggcggtgcacgctttgattccctttttattgccaaaaatggacaataatggcttgtgatccgtctgtagaagaaaatgccttccaaaaagatatttgtgaaacttctgcacggcatacaccaaagccagtccctctttttcaatttgcgaataattcttttccgctggggacagggaatgtgaagcatgggcgactgctttcattgtgccgtcggaatagcggtgagaaatcactgctccgattccatgctctgatgcatctgcggacacgatgatttgttgcgatgggtcgtagtgagccaatagctgatcagattgcagaatctgaatgacctgatcaaaggccttctgacaatcggtggaccaactccagaccacatcttgcttaagcagattgtccaaaggttggcggatgaaacgcatgttcttctcgaactgctgataatggtttatcatcaccaaaaacgaacgaagtgtggacaaattggtcggcacaggcatctcagcgatcgcctgtattttggctgggtccggccttcttccatccttattaatgatgaagccaaggtacttaatttccattttgaagaaggagcacttctctggcttaattcggaacccaaacttggcaattcgcttgaagacctcttgaaggtgcttcttgtgttcttctggtgatcggcttaccacgatcacatcatccagatatgcaactgcgaatgcacaaccagccaacatcgaatccataattgactggaaaatgccgggggctgacttcaccccaaatggcaaacgttggtactgaaaatttcctctatgagtggcaattgtgcacaactctttagaattttcgtccaactcgacttgtagataagcatcccgaaagtcgatttgcgaaaaaattcggcctccattcaaagtggcgaagatgtcttcaggaagcggcaggggatgctgatgcaaaagcagtgcgctgtttaagccagtcgaaaagtcggcacagacgcgagttgaaccattggccttcttcacaaccacaatgggtgcggcccaatttgtgtgttcaaccggacggatgacattcatcgattgaagtcgctccaattctgcctcaacaacagatttggtgttgaatgggacgggacgcggtcggcagtaaattggagttgcattgggtttcagcgacaaatgtgccttcacctttttgcaatgcccaagtccgtcggcaacaatttcaggaaaaatctttttgagatccttgataatcgttgcttggtcaccattttctttttcgattgcattcaaatgcaatgaagaattgactttttgtcgaatgtcgtccaaaagtccgaaagcatccagcatttcaatccccaataaattcaatgatccacttttggacacataaaatgttccgtttttcgtggtgtctccaaatttgaacttcgcttcccctcttccgagaagagtgcacttggagccgtcgtgatatgctgcttgttcttggcatcggcgcaattgagattttccaatcagacagtgagtctcttcgttgatcactgtgacctcggcgccggaatcaagcacaaaaatcacttttcttccattcatttccacggtaatttcaatgagcctcgttggatggttcacaatgttcaccattacacctccgatccgaagagtgcaagctcttttcccttgaaatttgccgtttttgttccggttgagccactcatggtgcttctcgcattgtgcctccaaatgtccagctttgttgcactttcggcaaacagttttgatgcttggacattcgcttggagcatggtgaaacttgccacaacgccagcaaaccctttgagtttggttctgaacttggttccctttttgcgttggtttcatgggccgctgcttctgtttgaccgccatcaaatttcgcgatgccatcggccgttcttcaatgacttttgcttcagcgatggttgattggtacatttggaggtcttcgacaactccatcatactcgaccaggtcaccatccgctgcaagcttcgatagaattcgctttctcagctcggcatcgttcggtgacttcagtgccgtcaaaagcatgaggcacgaaaattgctcctcgttgagcttgtcgaactgaaaatcacgcaaaagccgcttatgtcggttgataaaagggcgaaaattctcatcgtcgctttttgaggccctcaggcattcgtaacgatcaatccaaatggattgtggccggctgaaagcaagtttgagtcgctcctccgtttggttgaagtcaaaatcgatgacttttttcggcaggcacgatttgctgtattggctgaaagccgcctcgctcagcttcgtcatgagaagtttgactttcgactgatctgcgagttgcggtgccgcacagtcgagagcgaaattgaagcgctccaaccaatccgaaatgcttctatcgtcggatggctcgaaacagtcgatggtcggaagagaaggcagagcatgcgcatttaaggcgggtgcggcattttgtggcggatttgctaaaaattgctgaagtgccgctgtgagctgttgaattgcgtcgcccatattaaccacagctcgtggactttcccctcagctagagagtactcgttttaagtgaagtgtcgttcaccacttattgttagcagcgccaagctactaatcaagtgggtgcgcgtggatgagctgaataagtatcgcctagatactataaacagcagcgcaaaaaatgctctgatttcaaaagaatccgcaagccacaaatcaaaattgttttggctgcacaaagttcgattttgtcgaggcgtcgccaattgttacgccccaaagtccgaagaggaataaaataatatttattcaaaagaaaaggacaagggcgaacagggtcaaatattgattgggaaaataagggaacaaaataaatgaatgaatggacaactaaatgggacggaatgccaacataataaataaatcaaataatcaggcccatcccgaacatttatcaaaaatgatttgtttttaatttttgctaaaataatttattattcagttttgatattgaattaattttttcaaattaatatcttagaaagttcattaattatataatgattaaactgttatttattacttttataaaataaaaaatttaattgaaagtgttattatttaaataaaaataaaaattataaacacataaaactattaaaatattttaattgttacttttttcaaatttcctttcattttgtttgttttgcattttattgtgtctattatttatattcacaatagttttaattagtatattaattgggaaaaaacagagaaaaatttttttacgtaaaattttaaatatatgtttgtattaatttttaatgtttataattattttaataaattatgggctagaatttacatctttattattcattaaagagaattcatagaattataatttgaaaaagagttttaagtattttttttttactaattaatactaaattactgtgtttcaactcttataacatgtgaagatttttattttcactttaattcttatataatttcacaaatcatttatttctcattaactatttaatctttaagtccatacttttgtattaccaaaatttttgttttaaaattagttatacaatcgagggttgtaatcccataatatgtacttgatcatgctgcaattcttgttgaatttagatttctataaatgaatttcactttttttttgttagtttttcaattttccaagtttatttaatttcaattcttaaaattcattcttttttaataaatgaatgtctttttaacggtttatttattattttataaacccaaaa

SEQ ID NO: 6089 - DNA, 1423 bp, Heterodera glycines
  unsure (1)..(1423): unsure at all n locations
cctctagagtctttcaataaaaacaatttatttttttcattaaattactcatataaagctacgctgataaaggaagaaaaaaaagaaaaaactttaaaaaaaaaatgctttttctatatttaattctatgttcgattcataaattgttatgaattttaaattttcagataaattcagctgtttgatgggcaatctttacctaaaacggcgtattggcttcaacattgtacaatcatacattcccaccggtctaattgttattataagctgggtaattgaaaataataaaatattttacaatttttaaattaatttaaaaaatattttaaaatttaaataaatttgaaaggtctccttttggattgatcgccgtgctgtgccagcaagagttaccttatcatttacaactttgcttacaatgacgacattagtgcgtcaattttattatttattggaaattaattaaagatattaattaatttttataataccttttagggtaatggaatgcgatttgtacttccgcgtgtttcctatgccaaggcaattgattattggtttggcggtaattttattttaatttcccagtgtagcttattgcattttaaaataggaaactgaaatcttatgcttcaaaattaaggatttatctccatttattatttttttaattcgttttcgtgtgccaaaatctcttaatgtatatggggtctcaccccaaaacatgaactaaaatgggaaaataacttaaaaatcccaaatttaagggagcttaattttaatttggttacttttttcttttttgattccattcacaaatttcatcaaaacaaaatcataaaattttactctatttcaggtatctatttttgaagctgtgtattgtttctttgtgactcttatcatattttatgacctaaaaacaaagcataataaaaataaaaatatatatattgataaatatgtttttttaaatgataatgtttgacaatttttaaaattaataatttctataaatgctttctgtctaaaattactttacagcttgcatgttgttcgttttcatggcactcgtcgagttcgcattggtcaattcgtacatgcgccggtcggacaaatacgaaaaattggcacaacgcatccgacgccgaacatcagtggacatgttggcactttcgccaatcctttcatctgagctggcacatgaccatgaacaaatgttgaaaatgcgacgaaaaagcagtgcactggctcttcttaaaagtaagggaaaattaataagcaattaaaattacgttaattagatgtgccgtttttagaaattttttttgaaaactttttcattccctantaaatgatgaatttaaaaatttatgatttttgtgcccaattttactacgttctaaccaagcattttatgctc

SEQ ID NO: 6090 - DNA, 1724 bp, Heterodera glycines
tcctgaatggcggtggaatttccgataaaagtggccgccattttaatgccccgcgggggaatgtcgcaaacggccgtcttcacattgttcggtatccattcgacaaaataggcggagtttttgttctgcacattcagcatttgctcgtcgacctttagggaacgacaccataagaaagaagggcagcgaagcagaagcattccctcccagcggacctccttcatgctcatccgaccccggaaaatggccgccaccgtcagataacgcccgtggcgagggtcgcacgcggccatcatattctgtcatatgaaaaggactcaccaaagggcgagtccaaagttcaagcgaaccttggcatcgaacatttgctgggtaagttcggggacggacaatgcccggtactgctgactgccgcgggaagtgagcggggcgaagccgggcatgaagaagtggagccgggggaagggcaccatgctgaagcgagccaaacactgcacggaacagcacgcacccgcacacaaactttgtggccaattttcgcaggtcggcgttcagttggcccggaaaacggaggcaagtggtgaccccggacatggtgatgctgaccaagtggttcaggtcgccgtacgttggcgtggtcagtttcagagttcggaaacagatgtcataaagtgcttcgttgtcgatgcagaatgtctcgtccgtattctccaccaattggtgcactgacaaagtcgcgttgtacggttccactaccgtatccgacacttttggcgatgggacgaccgaatctttgccaagagggggtttagccagggaaagctcccctccccttgtgtacatgtggccatgattcggtccggatattcctcgcgaattttggagatcagcagcgttcccatgcccgagccagtgccaccgccaagcgaatgggtcatttggaagccctgcgaacgatcattgaccatctcctcgcccgcgaatgacttccgccaatcgcctaatcacctgaaggcagtcacaattctccgcctctttcctcaccacgtccaacacattgtccaccagttcggcgccttccgtgtagtgtcctttcgcccaattgttaccagcaccactttggcctgaaaaatgaagggaattcgaaaaagcattcagtggggagagggcggggtgggggggaagaacgccccgcaccgaagatgaagttgtccggccgaaaaagctgtccgaaaggcccggcccttacggagtccatcgtgcccggctccaaatcgaccagcaccgccctcggcacatattttcccccggtcgcttcgttgtaatacacattgatccgctccagctgaaggtccgagtctccgttgtaaattccgctcggctcaatgccatgttcgtccgaaatcacttcccaaaactgaatgaatgcaattgtgatcagatggacaaaggttcacttctgaaatgtttctttggcttgcttcgacctgcgcctttttaccttcgctccgatttgatttccgcattggcccgcttggatatgcacaatttcacgcatttcgaacgaaaatggtaccctaaagaaggctgctaaagggccacctattgcacagcctatggcactttttagcaaataaatgcagccaaaatatgcctatccccacccctccccctcccccccccctccccgggggggggggggagggtcacttaccccccccccc

SEQ ID NO: 6091 - DNA, 3510 bp, Heterodera glycines
  unsure (1)..(3510): unsure at all n locations
ttttagataataaatcggacgaagacacaacgccaatcgaaggaaaaaaagagcggcacagtaaagaaatggacagttcagcaacagtcagtgaggagttgtccgcagcagaaagccgagataagcagcacaacagcagcagaagagcaaaacaccggcagcagcaagcagtacctgtagcacaacatccacgacaacaaaatcatttgccaccaaatatgggcaatggcagcagcaggctgaaaaagtgcttcagcaatgccggtgaaggtggtggttgtggaaacggcatgcccaattatcatcaaaccaccactacgccgggaatgatgaacggttcatattatggtaatgtgatgttcgcattacggtagcatttcgactccaactgtgatttggcttgtacttttagtcttgaaaactttttatttcgggtttttgttagctaagtcaatgtgctggttcgtttcgaaaatcggccattttaatattttcgacaaacatggcataacaattttgcattcttggtatcattcgatagccgagatttttctttattgctgaaaatttccaaaaatttgttaaccttcgaaaaatgtatgaaaataagaagtatattattgatgaaaattatgccaaaaatagctaaaatgccgtaatttacgaaaaacccggccagaaacgcactcgaaaaaccaaaaaattttgtgacgctttgcgaatgcttcctgtaaaaactttgtaacacgatcattcttcactatagccaagttgattatcattcatttagacaacatgaattggtcactgaatggaagaaaaggtttggaggacaattttgtgccagaaaagttgaagaaaagtggcggcatttcggtggcatttgccatggacgaattggtcaaaggcagaacattgaatggaactccatgtaagaaattccaattagcatacctattcgttttacaatattaatttttgcttttaaggtgattacttgtttccggattttaatgggaaaaaagatttgaagcaaaatgacaaattacacccagacaatgcgatcaaatacctggaggtgaagcagaattttttttttttgattttttctatgggtcggggtcattttggcgcaggccattttggcgcagacaagtttaaagattcataacttttttttaattcgaccaaataaaataatgttgatattaatcaataggtctaaatgttctttattagcctgcaaaatttcaaaaaattatattaggttttaaaaaagatatggcgcgctgcgccaaaatggccaggaaaatgcaattttttgaggttttttggccataacttttttgtttctcagctaaattttttgaaactttgcaggttaataggcactatcaagccacttaaaatcataccaagattatttaattttgctgtgaaatcaaaatgatatagagtcttgcgccaaaatggcctgcgccaaagtggccggttcccccccggggggggggggggggttaagttccccaaagtgttgcaaatttattgatttcatgtgcggtagaagaaatgcgaaggatgacggaatagtgcgaaggatgtgccaaaaggagaagaaaatgtggcagaatgtcacggcctttttcctccccttaaattcattgtgccattctccgaccttttgtccaatgctttctttcacatttttggcatattctcttaacatcgcctaagttggcatggaaacgtcaaaacgatggtaagacgaatttgaagcgccagagagagtgcaatttgtgacttattgcgcgttacaattggtcattttccgcctttccttttcacatttaaacggtaaaacaaattcattagccattntaaggaaattatcaaatcatttcggttattaagctcatctaattgcaattcatattaagtacattaattatcttctgttatttaagttattaattcatatattgtgacacattgaaataattgaaattttatttcttaaaatttatataaagacaaaagagccaaaatacagactcaggtaaatttaagtgaagagaagacggtgttttttctccaaagatttcaaaatgttcaacgccttcgagtcccgtcctcgaagaacactccgccatcgatggcacagtatttggggcagatgcccttttcgccggctcctccgggctgtccggcgttgccaggctgtccgggctgtccgtcgtttccgggctggccaggaggtccgggcggtcctttcgggccgggctgtccaggtcctccgggttgtccaggcgggccagcgtttccaggctgtcctggggctccagcttctccgggcggtccgggaggagcagggccagctgcttctgatgctgcaggctgtccgggttgaccggggcctccaggttggccgggccctccggggtttccaggtggtccgggaggtccaggaggtcctggctcggggtttccgccaccacttccgggctgccctggtgagccgggctggccgggcggtccgggagggccgggctggccgggttggccgccagggcacggtttgcacggaggctgaattgcgacattaactttagccaataatagcttaaagttaccggggtagcttgttcgcatggagcggaaacagatttcccgggttgtcctggtgatccgggtgctccggggtttccgggattgccggggcggtcccgggggacctgctgggcccgggcctccgcctgagcagcattcactgcacgagccacctcctcctcctccgccggacactgcgccgcctcctcctccgtatccgtccgcttgacgcgccgtacgatttcctcccaccacggggatgctcttcagttggttcacttccgaccaaatgtcctttgcagaacccttaagaggagaaacattaagaaattagtgaaaaattcaagaattggcgcacctgacaagcactcaattccctgtccatattctgagcgacattggacacgtaattttgaagcataggcaaagtgaagcaaacggacagcagcgaaatgatggagaaggacaccgtggagtaggccacgaagcggtaagctttgatcctggcttcgaagtccattttttgagacggttttcctctaaaacgacaaaaggctgaagtcagtgagtaaaaaaggaactttccgagagtaaaaataggttaataagactgggtttacttaatagggcataaatattaacaaaaagctccaaatgattctccgagggaaggaaaagagaaaagagaggcggacgaatgcgcaaagaaagcaaagcaagtcaatttgcagagaatgctcgctgatggaattgtgtggccaatctgctcgttttatatgcgttgtgctgttgcttgcggagaatactgaaaaatggccgcgggggagcgagtgatacactggcaaaagttgaacgatgagacgacgtggggccgcgcagggcggggggggggggggggggggg

SEQ ID NO: 6092 - DNA, 1971 bp, Heterodera glycines
  unsure (1)..(1971): unsure at all n locations
tgttaaagaaacgcttaatttatgggaagggggaggaggtatttgagaagcggagcagtgtaaacaattggacttaatggggagggaggaaggaagggtaattactacaaattacaatgggcggcagaaacggttccgcctgcctttccatcttggaaatgtacagaacacaccgaacaaagtcaccgacactcaaattcagaagaagtcgagcaaattaagctcggtgagttggttacgacaggaggcttttggcattgccaaataaattaaaattaattttaaatggttaaataatccattccactcgtatcgtttctcgttttttctgctgaaattgcaaagtatcctccaaagtatgcccaaatgcttcttctcggatcagaggacgttttcgcacgagtgccatttcaacaaaacatcgaataagtcaagaaactctttttttggatttgcaaagaaaaattccgctcggctcggaatttgcagaatttgatgaagttgcaaatagtaacagtttgaatttcgcatcaattcgaacaaatcgttgctcaaaagtctgcgccgaatggtctcttggaaatgaatcccctccccgtggtcatttgctcccattcattcgtttatttatttatttttatttatttatttacgtgcgaattcccgcgcaatgtttcccccccccccccttttgagtggtctgagaaggcaaattagcaagaagaagcaaacgaacgaatgcgcgaataaatgaataaataaataccggtttttcgggaggaatggacgggcaaaagaaaacattaattaccaacggcggcgcactgattgtattatcacaatcgaagcacaacaaatggcggctctgctttatgctaatcctttaacggtttttgtccttttttttgcatattttcccatttattattcattagtcattttgtgcagtttccttttttgctttgttcataatatttattaattagcttccattggtttatttggtcacggtaatgcaaaggaaaaaccaaaaaacttttgatgagaagtcacagagtgtgttgtgacggagtttgagagatgctcccttcttaatgggaatgatcagccaaaagttgttcagtgatcacttttgaggataattagacggggcgggggacgaaatgccaaagaaaggcaaaatgccaaaggaaaagccatgccaaaggcaaacgcaaaactaagagcagaaaggaatggacaacacatgatgctaaacaatttatcattataaaataggaaaagtaaaaaagcaaaaggaaaggaattgggacgcatggccaaatgccaccaaaatgcaaattgtcttcattccatccgcttttccttcttcgcttaacgccttcgagtcccgtcctcgaagaacactccgccatcgatggcacagtatttggggcagatgcccttttcgccggctcctccgggctgtccggcgttgccaggctgtccgggctgtccgtcgtttccgggctggccaggaggtccgggcggtcctttcgggccgggctgtccaggtcctccgggttgtccaggcgggccagcgtttccaggctgtcctggggctccagcttctccgggcggtccgggaggagcagggccagctgcttctgatgctgcaggctgtccgggttgaccggggcctccaggttggccgggccctccggggtttccaggtggtccgggaggtccaggaggtcctggctccgggtttccgccagaatttccgggctgccctggtgagccgggctggccgggcggtccgggagggccgggctggccgggttggccgccagggcacggtttgcacggaggctgaattgcgacattaactttggtcaagaatagcttcaattaccgcggtaacttgttcgcatggagcggattgcgtttttccgnggttgtcctnggtgatccgnggtgctccnggggttt

SEQ ID NO: 6093 - DNA, 5323 bp, Heterodera glycines
ctgctcctgcagctcgaaataggcggccatgccccgctcgcggtagttacggccaaagtcaaacacgctgtagttgtttgtgtggaagccggccaaagtgatgaatctgtgagggacagagagaggggagcggggaacagttattgaaaaattgaaattgaaatttcaaatttaaattgcccggagaaaaaattcactgatatttgaagcccatggcgcccagctccttttggaacttctccatgtcgctgggccgaaggtgctgacgccagttgaaggagggcgagcagttgtaggagaacaacttgtcaggaaactaaaaaaaacaaacaaaaaaggggttatgcaaaataaatgggataatgggtcgaaatttacccggatagaggtctgattaagcctgatcggaaccgggatttgatggctattgatgcatgtaataattgaattttccgagactcgagaatttcaaaatttctcaagttcatttactattggttttggcaccttttccaaagagattttcaatgcttattaaaatgcaattagaaaaaaaaatggctcgaaagctttctgttttagcaaataaaatttgatttaattttaagcaagaaaagcttcgccataacctattccttaggaaaataaaaaaacgctaattccgagattaaaatccaaaattataacggaatgcccaatagacttttctcgagtcgaaagtgatttgtcaggctcaattagcagagtaaccagcagccagatcactcacttttccgatcattcgcttctccgatcactagtttttccattcactcgctttgagtttggctcacctccttgcgcacgccttctgcaaattcgcgtgccaccgacagtttcgggtacgatgtctccatccagatcagatcacaatggggcgcgtagaatttggcacggtcaatgcacgactgaatggcgttgtcgtcgcgcagacgaaaatagccctctgcggtgcgcccggcggcgtagtcaatgtacggatggtcacgctcatcaatgtccgtggtcaacagccgtgccgactcggcgtcagtgcgtgccacaatgatggttggcacaccgcaaacctgggagggaggagaggggattttgatttgtttgggactcgaatttctgaccctcaaaaattgggaggcaagtgcgtagccagacccttggcttcggggggggggggggctgaattcaaaaacccaatttttaggggtgtatttttatttttttttattcgattcttaggggtgtattttttgtttttctgaaatcccgaattaggtgggtgtgttttttgaaaatttcgagtaatttataatttttcttcttattctaactctttgtgcaatttgtaatttttttttttgtaaaattggctcatttgcataaaatacatatgctgaaccaacaatttggatgggaagagatggcgaggcggagggggggggggattaaaagatttgaacaaagaatggaggcttggccaatcttctctccgcacaaatctgctcgcaatcgtcattcggctgttccgttgctttctaccatcgatttaacaaattccaattaaatgaagcgttagaattgcctatgaattgcttaattttttctattttccaattttgttagatgaaacgtaaaaattccggtttgcaagacattcggaaatttttttaattcgtccgcaacaagttcagcagcatcatttaaatgttgtcaattcttttaaaaaccaagacgcgttccattgtaatttatctttttgtttttaatttttgatgaaaaatcttaataatttatgtcattaaacaattatttacttattatattaactattcttttcttaaagaatatgtttttcgttaatttttggaaaattttatatctaaaaaatatctcttttaaaaaacactccacccaatttacaaaattaattatcctcgtgtatatgaaaaataatttaaaaaaaaacaaacatcagcagccaagcgagcggcattcagatgacgaatgtgttgcgccgtagggatcaacacctgaaatgatcaaaagtcaaatgtgtaatgaccatgagtgaagtgatcagaccaagcaaagaaaattccgtaatcaattaaattagtgtttcccttatcatttgccttgttatttaattcgcacaaaaaaataggccgggaattaaatgctcatattacttagggtggaacataatttttgatacacaaattttttttattaaaaattttttttaatttcaacaaaacacaatcatgattcaaaatacccgccattattatcaataatatgttgccattattctggcaagagatcaataccaatggaaaagtatttagggagttagagttaagtaagaaaatggtcattttagaggtaggtatttttgatggctgatttaaagaaaaataaaagagatacagagccagagaaatagtgattaaatagagcaaagttaggactataagaacacaaaaatataaaattttaattacaaaaattgaattattggagagccgagactgaaagtggtctccaaaaacggcatttttcaagaccaccaagtaacataatgttttaaaagtggttttggaaattctgaatttaattaaacaagataaatcgggtatgttgagttcgaatatggtcttagatttggtctctgggatcgcaacaaacctgtacagctcgaacttcatgcatggagttggagcagtacaagctcaggttgaaaagataggtcccatttaagtccatattcggattctactggtctaaattgtatagaaaaactaagattttgttatatcagctttggttttttgaccataaaaaattcgagaaaattagtgggccaattttcaattttggcatggtcgggaaaaaaggcagaaaaatctatcaatcaaataaaaagtgaaacgatagtaagatataaaagaggacaccatgaagaacaaaataaaaaaagaatcatttaaataggcgcagaaataacggagttatgaatttttaaatattggaaaaaatttgggtatcaaaaattatgttccaccctaagtagttgcttaattatgcatgacccaagaggcgagaccaaaaaaataattggaattagaccgggaattaaaagatcattagctgcttaattaacatggcccaagagttgagaccaaaagaagcaattaggctcaggccgggaatcataaaatcattgacgccaaacgcataaaaattttctgatttcaggatcgcggccaaaaggttaattcaacaatctcggccaatatttaattgcaagtccctcccgctgctgctgatcacctttccgcccatgtggccgcacttcttctccgagcctagctggtcctcaaagtggacgcccgacacgcccgactcgatgtacgacttcatcagctcgaagcagttcaatgcaccgccgaagcccgcctccgcgtccgcaacaattggcgcgtaccagtcgcgctgtgccgtgtagtcctccgcctctacacactccacctgatcggcacgacgcagggcacggttgatgcgccgggccaactcgggccccgaattgcacgggtacagcgactggtccggatacatgtcgccaaccgtgttcgcatcggcggccacttgccagcctgcggtgcattatgaaactaattatcattaatggcaaaaaatgaatgtccttttgtcccccacaatttatccataatttttaaggcatcaattagaaattcaaaattttgacaattttttaaatttaaaaaatgctaaaaaaattgcaaatctaataaatattaaaagttcacaaaatagtaaatttttttgactcgtattttgaatataaaaattaaaaataaaatttgatttagttttaaatgaaaaaagcataaaaaatcggaaaattcatttttttaaattttgatataaaaaatgttggaacaattataaactctcataaaaatattaaattttaaattaattttttatttgaaaaagtattaaattaaataaaacttaggattttcttatttaaattaaaaaaatttagaaatcaaatttactttttacaaaatccaaccaaatattttatgggctcacccgataaatagatggcctttagcccagcacggaccatttgcaccgcttggtttcccgtcagcgcacccaacgcggcgatgtacggctcggtgtggagcaattgccaaagtttgttcgccccacgggtggccaatgtgtaactgatcaaccgaacggacggagttgatcaaatcagtcaaaatatcccccccccccccaaaaaacgcactcaatgtcgatggagccgcgaagtttgagcacatcctccacttcataattccgtttgatgcccttgtagcggccctttggtgccgttttgatcacctgaaaaagccaagaatggattaaaattgttggccaaaggtgaagccaactgctgggcaacaaaattgttatagatatgatcacattattcgtcacctcctttcattattctgatcattaaggtattttggtcaagctgggtcagagagtgcaaaatgatttgatatgatcgcttatcccgcaccccaaaaatactccaaagagaaatgggtcactttggatattctgatcgcattacaccgcatttcacatactgatcgctttagatattttgatcacactggatcaaagattgcaaaatgaactcagtttagcaaaatttcccaatttgtgttaaatattggcacaaaaacagatttgctttgctgactaattaattcggttaattattttgattacctggtagaagttctttgccatttgggttggtggttgtgtcatttgggcaacgaaaagtcaacagcagacgcaaaatttgattatgtgttttattattaattaattggattagatcgaaatggagaattaatggatggatgaaagccttaaattcgttggaaaatgaatgaataattaaataaataaaatggggacgacggaggacccccggggggaaatggggggggggagggggtgatgcaacaaaacaacgcattcgcattcattttgttatttccagccagccaaaagcagcagaaatgggggaatgaatgaattaaatgaatggacaaattggcggtgactgatcggtagggatagggacgatgatgcaagaaaaattgaacgaaaatgatgatgatgatgaaggtggtggttggtgatgaaagagatgctgattttttttctgatccaacccgctcta

SEQ ID NO: 6094 - DNA, 3813 bp, Heterodera glycines
  unsure (1)..(3813): unsure at all n locations
ggttaaaaggcaaggagtggatggttcaggtggtgccgatcagggctgggcgaaacttcggcttcggcttcgaaaacttcgaaaacttcgggttatttgagcttcgaacttcgtgcttcggcttcggctattttacccgaagttttgggaaaaatacacccctaaagattgggtttccgaagtgaaaaatgcacccctaataattggcttttcctttggtaaattgatttattacttatatttttattaacttttcctattattcacatgtgtggtcaaggggtagtgctcttggttatattcattgcttttgctttggatcaagtcccctccaagtatatgttttccttttatttttcaaaattattccttttttagacggaaattcaatacaattaaaaattaaaatcgcaaaatgttttgatttttgaattcaatctattaacaaaacgcactaaaatttcaaaattttccccggcggcgcctatcggcacccccggcacccaaaagttatatttcatttttaaattgagtcaaaaccgtgaatactcaaaaattataaaaattttcaaaatatattgatcaaaaagttcattatattttttttatcgggtttgttggtctttagcagttttgtcaattgaatcaatttggtatctaaccgaaatttgtgatgaaaaatttttgaaattaaaaaaaattttgaaaaaaacttcggcttcggcttcaaaacttcgaaaaccgggttttttgagcttcgagcttcggacttcgccttcgaataaaaattgggcttcgccttcggcttcgagtgttaagccgagcttcgcccagcctggtgccgataggagccgccggaattttttttatataatttgtcaaataattattttaacatttttatcaaaaaggataaatcgatttatttaaattttatttaaaattccttacttttcatgagattcatttctgaaacattttcttgtaataattttgttgagtagaggggtcaagcggtgcctataggcgccgcttggaaaaatttgagtgaaaaatgtaacagctttccctaaaaaaaatgatcaatatagccactaagctacaaaatgatcacttttctgctggtttttgattaaatttaaaaaattaaaaatttgaaaacatccttattttacttactaataaaaaataataattttattatgtgtggggatcgaactaatttgtaagacaaaaacaagtgaaagactggaggtttaaccgcttgactatattaatatagtttattattttttctcaactaaattttcctcttaaccaattaaaaaaaatattttctcacagcccactcccccattcttaccaatgtaaaaaatctcgtgttgaatgatctccatcaacgaagagtttggccaaaattctctatatcgacttttttgggaatttttcaaaaaataaacccttaaaaaccgaaaattttttaacttttagtaagaaatttttgaaaaaaatttatttatataaattcatgtatttggcattttttagtgtatacaacttcgaaccctacttatcatttttaacagaagttttgaagcaatattttatttaaaatagaatctatatttttaaataaattaattttttttaatttgggctcgtaggcttggtaaatgtccagcccgatgcgaccataggaagtattagaattagcaaaaaaaatctgtattctaattttgggaaagaatgtattaacaatatagatcacgatcaaagcggatgccatgaaaagccacacaacgcacgaactgccatctttttatacagatgagcagttacttgcgtacatagacctaaaatttggtaatttaagcagttgtagagcacaaataaaatactttttaaggtggaataggtaatgaaattgctcatcatggaaatgtgcaaggtggaataggagatatgcaatcgattcgatctgccgcatacacatacgtaagttaccactaaataagttttctaaatagcttaaaattaataaaatttattcattaaaatttatatcgttgcgtctttctatcgcaaaatacttgtaatttagcctctcggaatttggaatttcttaaaaacaataataaaccgagggatcataaagagagttaagcaccctattattaaaatttttcaagattaaataggcaaattttttgaaaattttacaaagttttcttatatatctatttaaatttccaaaaatataactcaaaaatggaaaaagtattcgctttttggcaaaaaaccactataatttctgctttccgccccagcgttgctaattttacaaaaataaaattggataaaaaattattttcacccatagagcaaaaaaagctctttggatgccctccccgaaatttttttctggatacggcctctcgaatcgggcgtcgcacgaatcgtcaaccacacaaaaatttaaaattttgagttttaattcttaatttaatcttatttactttgttcaacttaattctaacagtatcctatcattaaattaaattcataattatcaatttcttaggtgatgaagcagatattcgcatttaaccaaattcgactgttggctcttccgtctgtagttagcgccgacgttgagagccaaatgcaaaaaatcattaccgaaagaaaatgtgctgtggttgctcgacttcaaaaaccagaaatcaaagcgaaaacagtgcaggtaataattggtttaatttggatgtgtctaaaaattatttcataaactgaggatgctctcaaaaatgtgatagccacgcggcaccgtttagaaacctttaatttatacataaagcggtgctagtgcacttcacaaaaaatactgatttgggcgctccacatatgcccaaagcggggcgcatcaaaaagtgcaaatttgggcagttaacaaattcaattctgggcgcttcaaaaaatgcaaaaaacaaaatctgatttttaatgttttttaccaatttttaaattatcaatatgtctaaatttgattgaattgatgcttaaatacccattctttctaaaagttttgctggatttcgaataaaaaataattaaattttactgataattaaatcattagtcagattactgttaatttttaaatattgattaattacgaatggactaaaatcaaaaaataccgatgaatggaaaattatctgtaaatgtatctgtttcatctctacgtggaatttcttgggccaaggtctatgctaaagctttatttttgaaaatttataggctccatgaaacttcaagatttaaaaaattctaagtaatcggttaatgatttttttttaatgtgcagtaatatttgattatttttttattcgaaatccaataaaaattaaaaaaaaaaatatgatgcctttaaaaggttctgtaaatgtccattttcccattattgtcgagtcggttcaaaaacctttttcaaaagccataatatatgctttgctaaaaaacatttcctaaatattaattaatttttacttttcttgattaagttgaaagaaatgttattgaaaaaaagaaaacagcaagaaggtggcgaagtaattttttctgcagttgaactaaaatcgtatgtttaatttgattattaaaaaaggtttaagctttacattttaaatttttgatttaagaatccttcaagaaattgacataacgaaaaccactgatcaagactcgtcacagggngtcaaactttattaatataaagtattttcattaaatcacagggtgcgaattaccatg

SEQ ID NO: 6095 - DNA, 2969 bp, Heterodera glycines
caggtgacccataaaattgaggaaagcgctagccgtcgttcggcacccggcgacaccatccaccagcactacgcactgaacttgacgaatggcacgttcatcgactcgtccttctcgcgcaccaaagtatgaacgagataccatagtaaggagtagaccatttcgccctaccatgaaagaatttttataaaaaaataaaaaatagaaatttttctagtgattttcccaggtttatggcgaactacttttctaaaaaaattaaaaacgtatttttctgattttcaaagagaaatccttgtttttcgtacctaaaagaagtttttaacttcttttcaaaaattatatgcaaacaaataacaatttcaaaagaccaataaatccatttccaccctatcagcaccaccggcttcttttgatcccaagtgcactaaaaaaaattatgatttgcttatttcctacccaaaattgttaaaatcgataataggaggtgaaaatataatatttaaatttattttttatcgaattaattgtataaataactgtttggaagcaatttcgcaaaatgttcttatttttttacccatcttattttttggcccttgatgttcttatttgaaaaatttcagatcacatccctctgatttatccccctcccttccactacatttaagccgttcatttttcgtcttcaccacggcgaagtgatcgccggaatggacaatgccatggcctcaatgtgcgagggcgaacgtcgtcatgtagtgatcccagccgcattgggtgggaacccacgtttaaaaccaagggtccccggcacaaagctcatgaaaatttctggcttctttctccctgtttatttatactgtttctcctttgttataaaattgatttttttttattttctaattaggctatggcgacaagggccatgacaatatcccaggcggcgccagtcccaactttgacattgtgctacacaaactaatcaggccgagagcaggcgaactttgataagcaggacggacaaatgataacatggcacagagggaatcgtcaattaattaattattattaatttatcaatttatttccaaattaaaatgattgcttttacctacatttgatgatgtttttcaaatctccttttaatttctttatatatttcttttgatgcttaaatacccattctttctaaaagttttgctggatttcgaataaaaaataattaaattttactgataattaaatcattagtcagattactgttaatttttaaatattgattaattacgaatggactaaaatcaaaaaataccgatgaatggaaaattatctgtaaatgtatctgtttcatctctacgtggaatttcttgggccaaggtctatgctaaagctttatttttgaaaatttataggctccatgaaacttcaagatttaaaaaattctaagtaatcggttaatgattttttttaatgtgcagtaatatttgattatttttttattcgaaatccaataaaaatttaaaaaaaaaatatgatgcctttaaaaggttctgtaaatgtccattttcccattattgtcgagtcggttcaaaaacctttttcaaaagccataatatatgctttgctaaaaaacatttcctaaatattaattaatttttacttttcttgattaagttgaaagaaatgttattgaaaaaaagaaaacagcaagaaggtggcgaagtaattttttctgcagttgaactaaaatcgtatgttaaatttgattattaaaaaaggtttaagctttacattttaaatttttgatttaagaatccttcaagaaattgacataacgaaaaccactgatcaagactcgtcacaaggggtcaaactttattatataaagttattttcattaaatcacagggtgcgaattaccatgaagaaataacctatgcgtttggactcagcgacaattatcaggtcacgtttcagatcaaacatgtgaagttgtggtaatgcttctcgttctttccgtcaacctgtcaagcgaaagcaaataaaatattgtaaaattgggtagcgccgatgcatatattgaaattcattaaaaatccaattattaaatttgtccatcaaaattttggcgaaacaatataagccctgaattttacacattttcctgtggcggtatcaattttaacaattgcaaaatctgatgctcgacgttcatttttattttcctaactctttattaattctattttcttctctctcactctcttgctttctctctctctcctctcacttctttctcgttgatctcagtctttctctttctctttgtttttattttgtttcggcataatatttcggattgagcacgagaaacggcagcagcctcatgttgaaggagaaaagaccaagaaaaaggatggttgttccgaggcgattgtgcatcaggaaattacatcactcactggagtggtaatgcattctgttaagaaattgtaggttcaagatttttttgctactttaccaacttttcacggtccaattaagctgaaatttttaccgaacataaccgccccataaatattgagatccacgcaaaaaaatttgcatcaaaagttatactggcgtatattttttcaattttttcttgccctataaaaagttatatgttcaatttttgaacctataatttattacagcaaatgtatttaaaaatttagcagtcaggcaacataaaaacagtcgaacctcgttttcaaaatattcccttgacctcaggaaaacacgtaaataaataattatgatattccatgtaaatacacggtgaaaagtttagaaattttaagaaaaatcttttggacacacatccactattccatattatatcctcagtcaggatttatagctctgattattaaccactctattcaattaattattaaattaaaattccgtccatagcagctgac

SEQ ID NO: 6096 - DNA, 1043 bp, Heterodera glycines
ctttcagaaccgctcaatgaattgaggcgaaatgatgccattggacatggacaaaaagccaacaaaaggcattcgataggatctaaaatttttcacaaagatgaaaaagaaaagttggtgtgattgcgtatgcctcccgaacgctaaattcttcggagcgcaattactcgcagattgaaaaagaagcgagggcaatcattttcggagtcgacaaattcaagcagtacttgtacggtcgaaagttcgtacttcaaactgaccacgagccactaaaagagatttttgggccaaaaggagagctcccgattgtggcggcaaaacgacttcatcgatggtcactgacattgatgaacttcgactttgaagttgtgtactgctctacaaagaatttggcaatgcagacggtctgtcgcgattggcgtgtccggaagagaaaaccatcgactgtgttggactggaagttcagcaagttcaagccgaaatcccatcgcaaaagaagtcaaaaaggatgaaattcttcgaaaagtgaaagaattcatcgaaaaaggatggccacaaaaagtcgaagaaggactaaaaagttttaatgtcatccgaaatgagttcgccttaatggaaggggcgccggatgagcggaaagtgccattgcatccgtgggaatcaccggaaagactgtggcaacgaatacacaccgatttctgcggaccattttggggatcaatgtgctgatcagcatgtatgccaaaagtaaatggctttaagtggtcagaatgcgaacaacaacggtattggccacgattgaggcgctaaggattgtcatcgaatggagccgctgagagatttgttcaaactttcaagcagggaatgaacaagctccaaaaggaggggatgaagcaagaaattgcattgtctcaatttctcctgaaatacggtgtcacaccgcacgcagcaacagaattggcgccttcggaaatcctcttcggccgcaggcttcgaactttgttggatttagtaaaaccaaccgcggcgaatgattttgaaga

SEQ ID NO: 6097 - DNA, 2651 bp, Heterodera glycines
aattcggacaattcgagttcagaaagtgaggacaattcggactcagaggatgaagtgccgatcgatctgatggacgacgaacatctgccagcaccgccggaggaacagcatcaactggagcagccacaacagcaggctaatgctgaacctcgtcgttcaacgcggaagcgcaagaggccgaagatcttcgatccctcggcctgatcacggcttcaagaaggagggacgaatgtggtgttgagagaccaatcaataagtggagtgaactttgttcactcctttcccttaggcactgttcctccccacatataagcgatgctttccttccctccctcgttcattctgtcatttatttctcccattgcaattctcttcgccttgaccattttattattatatttgtgtttcaaataaatatttgttttattcatatctgttgttctcggacacaacacatttcatttaaaaatcagttaaatattgatatatttttcagaaaaaaaacccattgtaacttctcctttgttaaataaatatatttgatcaaaaatcagttaaatattgacatatttaatatatcttttttcaaaaaatatcatttacccctttgctttatccaaacatatgaattaatatgatcaatagaataaaaatatttcattcaataagtaaccgcccaagaaatcactcacactccaaaaataatagagaaggcttatatatatattggaatttgcttctaggctttattcatttagacatacatacatttagcagtttgcaaatagtattttttgaattctaaataaatctaataaaaaatagaaattcatttacattttttagcaattttaaaaatttcattaatggagaaattggcaccgcaaaattattgtctagccgattcaacagcatcatctttggcaaaagctgcccaaatggaattggacttcatccaaagcgttttgttgggcccacagcgaggaaatttgacggcaattgaatgtttattggcacaaaactttagcaaacagtcatcaatgatgccaaattatggcacggaacgtaaaaatgcaaaagtaccaaaattagaaatggaaaaggctggtggtggtgatgaagccaaattggacaatggaagcgagaccgatcaaagtgatcagaagcaaaagagaaaaggggtgggacgaccgaaaaggcatccgagtgaatgcaaagtgtgcgggaggaagagcttttactgttattacagtgtccgatgttgtgaaagtgagtgatggaaaaagaattaaataacgaaatcccgataatcatgtgggatccccaaaaaaagccacgtgatagccgggatcgggaaatgcctggactccgtcttgggatccctcccgatggttttccaaaatctttgggattgatcggaatttggtcgggaacccgactcgggatccctctgacaccagtggccggtctctagtgtgaacaggagttcggcggaagtacagcactttttgccgaaaagaaaactgaaaatggaaacatttttcaatggaccgaaaatggccatccctaatttgaaatgaaaattgttcagcagattctcttttaaattcattaatatataatatttacaaatttgtataaattaaggctgcaagcaattctttcgtcgtattgttgccaagcgaacattgttcaactgttttggagcgaaaaattgtcaaattggaaaaggttgataaagagaaaaaaactaattagcccaaaacattggaatatttatttaaaaagtattaatattttttcagatggcattcgatgccgcggctgtcgcctggacaaatgccttttggccggcatggacccgacaatggtcattgcaatgcaacaggaaggaatggcccaatatttggacagattggaattgcgaaaaaggagtgctttgttgtgaaagaattgcagagaagggaataatttgtttttgtgaccaaaattatgctaaaaaatttttattttattgtattgagaatttagaatatttttgtgattaggtctccaattatatgtaggaatccatatatgtttttatcctagactgtgagagacaaaaaaaaacaacatatttttagcttggttggaagcttttaggatgaatatctatatccatatttttcatatttcgcattatgtccataatttatattttcatatattatgcccaaaagttggtgagatcgtgtcaaaaataagtcaaagagttgaaaaattcgctttttagcttctttttttaataaaaatctttaaatttaacctttattattatttttcttaaaaatgaatacctatttagccatttttgaaagttttactttatatttagcgattctaaagatattttcaaaatttaccccttcaatttattaagtcaacccagaaacgaataaaatggtcatttaggaatttaattcgtatttcgtcacgcacattcgcaacatcggacaccgtaataacaaacagtagaggctcttcctcccacacactttgcattcacttggattccttttcggtcgtcccaccccttttttctttggcgtctgatcactttgatcggtctcgcttccattgtccaatttggcttcatcaccaccaccagc

SEQ ID NO: 6098 - DNA, 1554 bp, Heterodera glycines
  unsure (1)..(1554): unsure at all n locations
ggaaaaacaagcactggtagaatgggggtctgagtgcaaaattagtgagaaaatggagtaaaagaaaaaattagaaatanntaattaaatatattcggtaaagtagcaagaccaactgtgcaaatgacctagtggttagtctccttcacttcccctttttctttcccctggttcaatccctctacagaaagtaaattatttttaattttctttttctatactcatgtgtttcctatcgacaaaatatgattcctcacagtttttaattgatacatattttatcattttttaaagaagatccgtacaaattgagcctagtaatctcaaaaaccagcctttttttgttgaaatttgttaacaaatcacactcaaattttcaaaattttccccggcggcgcctatcggtaccgccggacccctttcttcctcaaaaattttttgaaaaagcgcgccgaaaaaattgatgtgaaaagcaactattaatttataataatattcaatcatttaatccaaaaaatgattaattgtttgaaataattaaagaaatttgtttgaaaattttcattaatttaattagctttaacttttgggttttataaaaaaaataataattttatattattttcactttaaaaaaataattaaaatttgaattttttattatttttttatttttttgaattttttgaatttttaaaattttccggttggtcccggttcccggtcccgaagaaaaatcgaggtcccagtcccggcttctcaggtcccggcaagtcccggtcccggttttgcccaaaatttccggtcccgtggcactctactttatagaccaagaaaattatatgtataactgtattccaaggatatttaatttattcaattttttaaatttaaatttcgtttttttcagagtgattggtaagacattttttggaggaccgtcaagaaagtaaaatttcaaaatttattgatcgaacataaattaaattctttacaatttatttattcaggaatgtgtgctttggtgtgatgacttcgacgaaaattcttcttttttaagacaagctgagaaattattgagtaattatttgggttgtaagttatatgcatttaaattttttgtttttttggtagacatttttagtgcatataattaaatctgtgaggttttcgagaatatatgcatatttgccatcttaaacttttttgaagacatttttggcaaatttcggtaaaaaatttttttaagaggactggaataaaagagaaaaatgcacctactcccactccctaaacatcgatttttgaaaattttcaaaaatatacccctgtttcatgggaaaatttctggcaaattttgttttatagagcatacaacttacattccttgtaattatttaaaaatggcaaattttgaagaaaaaaaaaagttttttcatgtaagagtaccatcattctggcattaaattttgtctttaattagcaaaatttgaataaatttcttcaaaaaaggtcataattttttttcaaatttgcagtttcaagaaatgatat

SEQ ID NO: 6099 - DNA, 1684 bp, Heterodera glycines
  unsure (1)..(1684): unsure at all n locations
gatttntgggcgaaataanttcgcgtcaaacaaacacattttttattgcatttttttgtcaaagaatttctgtttacatgaaatatcgaaaaatgctaaaaatttttacaatattgacaaaactccaaaatattgaaataaatattttttttcaaaacccccaaaaattttgttttattgaccaatattgacgttcaaatgaaaaaattcaagcgcataaatccgtttttgagcttctttcttcaacgcatataaacaaaaaaaaattgaatatatatgttaattccatccctattaattatcttagaatcagccattaagaatacctatatcgaaaatgaaccatttcattttatcaacgtaactccttgaactctatgcccgtgggattgatttcttgcctgaaaaatggcaactcattatcgataataatggctggtgttttaaacgtatttgaattttttaaatttttaaatagatttttttgctaaatttaaaaagaaattttgttttttttttgcgcaaattaaaattcaaataataataattattatatttgacaaattctgcagataaaatattttttacattttattttcacatgtatgaagaaaatcaaatacatcaataatcgatcatatgcattgtttcatgcaattgtattcttctgatggcactcgaatatctgccatattattatacaaattcatattatagtttttataattctatatttaatattaaaataataaaaatattcgtaaattcactttctcgaaccaatttatacattactctaattaattgtcgtgaattagcttaacattctctaatttagttgagaaaaattgttaaatggtgttttctattcttttggcattctgtcttgcggtaccaatccacttcgtggatgccaagtgcgcgtcggatgtcgtggagggaaacaaattgctttcaaaccgtaaaaccataatgaaaaacccacctaaagaaatcggaaagaatgatgatacggaaattaaacagtttgtgcgagatctgttggatcattacaacatggtaggtaaagtactgttcgtggatcagagccaggcaatcgattacagtgtgattgaagcgatactgtacaaaagtgaccagacaaaggtgatcagagaagatttttgggctaaaattgaccacttttttttacaatatgtatagttcaaattagggttgctacccaacttttggagatacaaaagtccgggatcaaaatttcgcgatggctggaagaaaattgaaaaaatgcaaaccaataatgatcattctagataagtgatttgtcaaaatccaattcaaatatcgaagaaattgtcaatgggattggaaagatcacgttgacaaagtttgataaaaaaggaaaaaatggtaaaaagttaaattttttgtatatctaataataaaaaaatcagattcttcggtgaagccaactctaatggataaatttgaaattttgaaatggattgaccaactcgacaaacctatggctgatttaataagaaaattgcacaaatcagtcaacgaattaagtgcttcaattaatgaaggtgtatttaaaaaaataattttatttatttatttatttagattctttggaccaaaatgcaaaaattcaaaattttaataagtttgattaaagaaa

SEQ ID NO: 6100 - DNA, 1266 bp, Heterodera glycines
ggctgactcaagaaacgtcaatttcaatcctcccaaactccttgattaatccttcggccggtttttcctgcttttctccggttttctgattaaaatctcttatgttaatccttccattccgaaccgttcatcagttttcccaacatttcaatcgaccttcgttagcagctgatttttacgtcaatgcttttcgatttgcatttgtttgccccccctcccactctctctttctctctctctgctgctgtatcatcatccgttccttccccctccctcccttccccatttccccttttcatccttttccttccatttactaaacacaactcctctcctcttcctctgctcttcccctcccctcccctctccccctcctcccgctctctcctccactttcgcctcccctcctccacttttcccatcgtcacaatcattctccaacattcattctccgtttatgcctatgcttttccgtcactgatttctccccccccccttttccttcgctttcattttgccattttgatggccatttctccgcccgaccttggcattttgccctctgccgctgtcccagtcgttgtcgaatgccatcctcggcgttgtctgagctgtcgcgcgccccctccgctggtctcccccagtgccactccctcctcctccacaatttcttccacaacttcctcctcttccgccctgtcgcctcccctttctgccattccgcgccctcttcaccctcttccctttttgtgctgcccatctcaatttaatgtgaggacaatttcgacacgaaccgatgagaggaacgaagaggaagaagaagaagaagaggaagtgatgggcaagaggaaggggaagcgaggggccaacatgagacagcgatttggcattttatggacgatgatgctcactggaagggaaggaggagaagcgggtgcggacaaacgcccggggggggggacaccccggtcagctgatcgggactcttctcgctcttctgctgttctaattactttcctccggcgggggggggggagaaatgccatggaaatttgcctatgctccgttcgcttccctttgaagcaggctctccccacctctccgacgattgttccgaattgaatctgctaaaactgagccgttccgctgctaccaacgcctcccaatgggtgtcggccatccgtcaggcgctaatgcccgtcacgccgcagtcgagcggcgcgccgtccgttggcactccgacgcggcacgaaaagaccgactcat

SEQ ID NO: 6101 - DNA, 4411 bp, Heterodera glycines
acgattcgttacccatccgagcgacgaccaaagatgaaggaatacgaaaggaccaatggcattgtgccggtgtacagcagctgagctgatccctctgctgctattctcactctcttctcggccacaatcaatttttctctcccgctttctttctctctctccctctcttcccctctctctctcttttctctctcttttctctctctctctcttttctctctctctctcttttctttcttctctctttctctctctctctctctctctctcttctctttggcccctttctgcactctttttcctgtttcttcacttttttagtccttttaaacatatctctgatctaaccaatcaatcaatcattacgatgttaatttttgtttcgttttaagcctgccctttcatatttccctctctctctctttctctctctcttttctctctctctctctccctctctctctccctaatccggttcacttttaaaatacgaattttgttttcttcttggctttatttcgattgaatgcatttttggatttttgccctttcccatttttatttcttttgtttcatttaatttttgttgttttcgtgaataaataattaataatacaacatattgatgaaaatatattttataataataataatttgttggtaaaatgagtcaaataatcgaatggaccaaaaagaaacagctgaccatcctcagaaaggggaaagcccgcctttccctgtccaaatgatcggaagaagccaacgggagcggcaaaggcagagaaagcgatcagaactagaaaaatgggggagagagagagagagaaaggggaaatgagggtaaaggaaaagagaaagaggaaaaagaatggaagagagataagagaaaaaagaaaaagagggggagagagagggaaacaacaaaataaagaaaaaagaatgtgaaatgaagtgagaaagaggccaaattggagaggaaggagaaaggagcagaagatgaacgaatatccgaaacagagaaagtgggggggggggggggtgactcagacaacggtgctctcgcctctctcattcaatcatttcaccaacggacggatcgacgagaagagaccgactgactcaatgctgccattcccctccccctaaacaaaggcaaaagccaaacagatcaacaaataaacacgtcagattagggtcgattcggaatggcacaatatgtgccgtggtattacaaacgctcaccgcccattttttgtggcgtttgtgtgcccgtttatttgggcgtttggtccgttcgtaagttcatcgttgtgcttggctttctgctctttctgatcggcgttctgctactgctcggtcttctgctcatttgcgtggccatcgaatgttccgctgcgtttgtcccccttcttttcttcgtttatttgtttttcttttcagtgccggtgctttacttccgttcgccttagtgcttatcattgctgggctactacttttgcactgcggatgggctgctcatcttttggacgttggcgagggaatgccgtacgggtgagtgccgaagtcatacgaaattttggatgagtgccgaatttctgcggcattcccccgtggatatctttccattatttaagtgaatattcgacgacaaaaacggtgagcacttcgaccagaacgaaaaggacggcgccgaagggggaggaggagccggtgttcgaagagatcgaaggcaaacagccgccgcccgagatcaagcagggattttggcaattcgatgagcgcgaggcgtggcaaacggtggccaatccgtacccgataaagtggactaatcttcacggaccttcgctttgactgttttgtgtgttcagttacacgctgaagccggtgattgaacgccaaccgtacgtgccataaccatgggaaagcaatgaaaatgccattctctgtgccaattttggacaatcccatcgaatgccactgaattttcattaaatttttctttctctgttgccattctcttatgtgtcaaaatagagattaaaagtcaaaaattgctcaaaaaagtgtggtaaattttcttcttctggaatatattttaattatattaaagtgtaaaatgtgacaaataaatgacaattggattaagtgcaaaacaaaacaaaaacacagaccaaatttagacttttcctgtccttatatgcaattcaattcttcgaatttagcaggtaaggggcccttctgcgcagttcctcaattcctcccttaaaacgttacgcttttttgttaatcaaatccccctaatctttctctgtcctctctctctttctctctgtctctctctctgctctcttttctctttctctctctctctgtctctctctctcccctctcttttctatctctctctctctctgctgctcacattgaataactttgcccgcgtgtcttgcacttggccaagtgccaaaagtgccaacgatgcttcgtcagcggtgtttcccattacgattgtttggtagccacgcgaatagccaatttgttgcagctctgaaaggccagccaaatagcaattttatggtgggtaagtcatcaaaatgcatttgcaattaactaattaattgcccacttcgtataattttgatgggtggtgccagaaacccgtcctggacgagttcatcggcagggaacggctttgaaccgggcaaccgattccgttggggacctaacggatggaagagggacaaatgaccaatcccgagggaaaccgaccgaacggctgaggcccaattaagccaaaaaattcgttgcgtggccgaacgtccaaaaaattgaactaaaatggcaaaaagaaaaaatggacaaagtttaaacgcattcggattcttcacccaattgagtctgctcaaaatacagaatccgtccgactcggccgtggtcagttgctcgaaagtgacgatcagttcgggtcggaagtgcgccttccaattgcccaactgaacgtggtgccgtgccattccattgttttcggttgggttgggttcccccccccccccccggtttggagtgattatgaatggatttgccggaaatatcctttttcctgcccgtctgtccttccccattccctccccattttcacacctccgtttccacttccgcgtcatttaccggaaggtcagccttgcgccacgcgtcgagtccgccgtcgaggacgaacacttcctcatgtccgtaagtcttttgaaacggagagtcaatccgttagcatttgccatcattccctttgcattatgtccctaccctcaacaaaaaccacactcgcgcggcatgcaaaagtccgcccagcggttctcgcgcgtaaatgacgagtcggtctccgctgtcgatgcccaacctttgcatgtactgctcgaatttgtccggagggtacagcgcctgtcgctcattccttgacaattttcttttttcttaaaagaagagtctcccgctgaggtgacggaccaactggggaaagtggcgatgttcacgttgaaaggcaccgcgccggggatgtgtgaccgcgcgtactgacgacttttctgaacattccttccgttagcgtggcattccctcctttctttgcattgccttttcctccatcagtttgtcccaattggcataatattccgcgtagaattgcacgtggtccgtcgtcccagggtccgtctcgtaactcgcgtcgatcactttcacattttggcccgactgaagcgggcacgggagaagccgattaatgctgagaagctgaaactgacctttatccattcatacaattgttctacgtacaccaagaaattggaatttggctgattgatcggagaagggactgacaaaaggggggaggggggaggacgaaattgttgcgattgggaggcggtgatcggctgacaattgccaaacgacggattggaggagaggggcgggtcgaacaaaggcgcggccgtgccggcggaggcggtggggaacagcgccggttgggagggagctaaacgggagagggacatcattaagaggcgaccgctttgtatcagacgtagcgaagggaataagtcattggcttgagaaggggcgcccgatcggctgccgatcaaagcgttgagaaggatgccgagggacgcgccttccccggcgggcacgaccaaagttatgttttgcactaataattttgcggaacgcattgcttccatcagcgccgctaccgcgtcgccagaaagcggctcatccgctgcgagtggcaccgagggcatttccgaagcaatgtcttccttaaaagattggcaaactttgaaagcatgccaattgacttgctatcacatcttgtttctcttccgcgtccttctcttgagccatttgtgcctctttcgctttctct

SEQ ID NO: 6102 - DNA, 2051 bp, Heterodera glycines
  unsure (1)..(2051): unsure at all n locations
aaaatggctgtcagtcagtgaatttaggataagcgctcacccttttcncagcgtttgtcgcaaatgggcactgatttggacgacccatttgcgcaggacggacgccacgcgatgcaacggcacagacaccggcggagaatgttcacgctgttgttgttgttgttgtggngaggaaggatggggaacagcaaaaggcgaaatcattgagcaactcattgaacatctgtgaaaaaaacaattaaattcattaaatatgatggaaaactttcagagaacgagaaaaaaaaagaagcgaatgataaataggcaataaaaaaataaaaaaatttacacttactttcccttcgtcagtgttagcattaacggccatcacaatttcgggtgattgcagccattcaacgagactcttcagcagctgaggatcggatgttgtgttggtcaaatcggctattttggtgaactgatcactgaaatcgattaaaaaagaaagtaaataaatttgcaaattgctcgattatttgtcttacaaatggcagatggagagaaaatgacgaaatttgttcaatgtgaactaaaattcagaaaaaatggtaattaaaatataaattttaattgaatgcctcggctggaccaatgccgaaattgtcaagttcgtccagcatttggttcagtacgcaaatttgcgttaaatggcgattcagaatggcatccaacacatcgaacagtcggttttcaccgctaattagggcaccagcggatgatgatgattgttgtgatgccaatgccatggaaggatggtgagaaacggcagtagtagcagcagaggcatttgcacccgaagaagcaagcagttgtcgttgatttatgactgaaaatttgaaaaacttattatattttaaaacaaaaaatgattaaaaaataaaataaaaaagaatttttgaaaaatttaaaagttcagtttttaagagaagagcgggactgggcttcattatcaaaattatgtttttaaaatttttcaaataaaaaatatgcaaaaaaatagggagaaaaagaaattccactttttttttgttcttgtatcgacaggtttctcaaattttaggacacttccaaagattcatagaaaattgaatggaaaaaaacactccgaggaatgtcttacgaacattgttggatgtaacggccaacatggcttggcccaagttcgacgcgcaatgcgcagaacacttcttgcggctgcaggagaccgactcgctttagaatctcggccatcgcgttacccctccgctgttgaacatcagtgatcagttcgttcaacctggatttagtgcaaattaagagaaaacagtgcccattttaaaatgtgccattcacaccaaaaaagccaattcgccggctgaatggtgtccacgtagcggaacagcagctcatccacggcattcatcagcttttcggaagggcatgcggaggcaattttgagcagccacaacaatttggcgacagaagtgcgcgccttttgcgcaccgaccatcgaaatgtgctccaaagtggacgccatggcctgcacaccggtgctcagtgctgaactctcagagctaaagtggtgaattttgaaattttttaattgcattgttaataatttatcataaattttaaaatctgctaggaaaatttttcaaaaatttattttatttttaaattttaattcaaatagcaacgtcttaaaattaaccaaaactcattgaaaaaaagtgaagtaaactcactggttagccaggtaaagattgcccagaaaattggcccaatgcttccacacggaagcgaatgacgatggcatggccgtgtcgctcagctcgagttgtgcagctgcagagaaggcacggcccgcctcgtcgcgtctgaaacgggcaaaaatcttaaatttttgttttttattttatcttttctacttttccatccgagccataaaatgccctttgttggtcatcagacgtgcaatttggtcgcgcttcatggattgggaaggaaagtgccttcgatggtctccaatg

SEQ ID NO: 6103 - DNA, 4962 bp, Heterodera glycines
  unsure (1)..(4962): unsure at all n locations
ttgttggtcaaccccccccgggggcagcagcggaagcgttgtcgtaaaagcgcagcaaactgttgaagaactgcagacgccagttgaacaggtccgaccagnccgagttttggtcgacggtggtcagagggcgatttctgaaatccattaaaaaacggattttttaaaaaatttttacgatttatttatttattattcagtgtatctccacctccacgtcttcatcaggtgtttgacggcgttgttcagtgagtggttgctgtttgtgctggctggagtcccgttgttgctgttaccgctccaattcgtcaacagtggcaaattcgaatacagcaaattggccgactcggaaatttcgtggagcaaatgtgaattctgaaatgaatgttttgatgggaaagttgcgactcattgtcagccaatccaacagtaatcccatttttaaatagcaccaattaccgacgactacattttgaaacttggtcgggatcccgaatgtagagtaatttttaaatggataggaattggaaaaaagatttatgtgcaaatcccacgttgagaatgttgatgtgaacatgcgacacaattgagggcagtcgacgccattcactaatcagtgccctgtacaaatcgatcagttggcgttcgattgtctccttgttcagccgaaaattggtcacctaaacggatgcaaatgcataatttaatgggtgaatggcttgtgaaaactacaaacattaagcatcagttgaagcattgttgatcgcacggcagtctgtgggctcgaaatggcatccacttgggcaaagcgatcccttaaaaatggatggaatgtaaaatttattaaactgtgttaaaaacaaaaggattgcttttagttacaaaaatgcattaatatgtttttgacatatttaaaaaataataaagtgcccacttcagctggttccaatcgtgaaggtgccaagccgactccatcgccagggcggcatccgaaatctcttccgacttggcaaaatggtccaacgaagcccaatcgttcaactgcacacatgaactgaaaatttacaacttaccctcttacataaataattaggggtctcctaatttttactttaattcaaattcctcgctaatgatatgatcgatagaaatgggttgtgagcattgctcacctggtccagcattcttcccatgccctttgttccgtctgtagagcggtggaaagtccgctgatggcatccgacgacagcgtttttgacaggcggtcattcagttgtgccaccaatttttcggccatttcacgcgcacgaacgaattcaccctgggcagaaaaacaaatacgtattggtcaatgaaaagcaataattccaagaaatatatgaattgatcgaaccacctgctgaaacaacgcaaagcatttggcagttctgtcaaagaatgaacgcctcttccacaacgcactgaactggtccaattcgtccaattggcggtagagtttagccaaacagtctagcacttcctggaaaagcaacaaaaataataatttggttgttctaataattggaaataaagtccagggtgatggggaacgcgccaatttttcgctggccggctccgaggtgttcagcagaattgggtcggcaaccgaaaaacgaatatccctggccaatcgttctaattgtgtcactgcgacgtgccaacagttaaaggtggagccaagatagctaaacaatgggaagtctcatttgatatgccaaacaaatggcaactgaacaacaacctgagcatgaacggctccaatttaatgggtggagagcaaagaacaaacgcctccatgaaacaggtgaccacggcacggggggagtccctctggcacaaatggacagcggacgaaaggaacggaccggcaacactttcaatctgtgctcgctcttccggagaaaaggtggtccacagagagcagaaaagcttaaacaaaaacgagttaattgtaaaataattgtaggaggatagtatgtagattagacctcaacaaacgttttcctacaaaatgccaggtcggtgtgtaaaatgtcgaccaaatttgaaataagttgggccacggtaagttgagtggccagtgaaagaaggctaaaaatgaaaaagtttagtaattaaattgtaaaaaatttggattcggttttccatttttttccggaaatgaatttccaaattttcccgaaaacgtatttaatattctaaaacctgatttgcatgtcgagcattgtcgtcctgttgctgttctgcggtgaattcctgttggccgtcgccgcctccagcagcgattcttcgccaccgcttggcactgacaacgatggaggtgcctggggtggagatgtgccatcaatgttgtccgccggtgcggaaaggcgcagtgaagcaatcttggcatggattgttgtgccctccgtcgctgcaccaccatcgcggacttggtccagctgcttcgtcgggctgtcccccaaccgctcggcaacagcttgtccatgtacttctccaacttgttgtcgctgctggagttgtaccctttcgattgtgtcggaatctgcagcagcaacaatctgtgccaatgtgttgtccagcgtagcgcattgcttcaactccaccaaacggtggtgctgctgctgctgttgtttgtcgtcgtcgacagcatgttcggacaacaacagcaaatgcacaacatgggccaaccaatcgtagcgacccatttgttgccaattctcgtccgtcaatatgtgcaacaatcgctgtacggtgccattcgggaaacgcctttcgaacacggcaaaaaacctatcagatatatgcaaaatcaatttataatcctataaggtcagcgttctttccggacctgtttctgagttccgggttcgggctggccagtccccagtggaacacgggctcaagtttattcagtgtggcgtcgccttcggacagtaacaggcgttcttgctcgtatagttgaaccacaacattcaggaaatgccgttgcagttcattgttggcgtacagtcgttgttccatcgcgccgtacagcttgacaagcacgagtgcaccctgactttgttgtgactggtggtggtactgttgctgctgcgacggctgcccgtcttggtgttgttgtgcaagtgcgatttcgcttgtcacaatttcttgcgccactttgatgatgttttccactattttgtccaccgttcccttctcgatcagcgggaggagcacaagttgaatgacgttatgttgagattcggcgctggaaaaagcaacgaaaagggtttaattaaaacaaaatatttgttttaaaaagtagtatcatatatcgaaaaatatggtagaaaaaatgtataggaaatatgggagagaaactcaccttaagaattttgttcgagtgcacagcatttctatacagatggacagcagatcactgatcagcttttgcgcctgatcaagtgcaccggttgtgcccacattggacatgatgtgttcccggacgagtctggaaaaaataaccaaaaaattacaccattaaataaaaatttgtcgaattttttttacgaaatttctttaaattttttttaaagattttatcttgaaatttttctaagtttgaaaaaaattggggggggggggggggagaagaactgctccccccccaaaaacgtacctctgcagcaggttaataaacggcatcaggcacaccgcctccaaataactgggctgtgccgagtgcatcagccgcaacagagtgatggtggtcatcggtggagaggcgttgttcaatgagccggcatacttcgcgaacgagtcctggatgacccgggcgatgtggtggttgagcatgtccaactcgtccaacccgttagccgaacatttggtcttctccaacagtttactcagcacattgtaagtgctgcgcagaatttgctgcaaaaaatgggaatttaatcaaagaacaggaatttctttaaaaattttgaaaaaaatgctaaaaattttgaatttttaaaaaaattttttgtagaaaactaaaaattttcgttttttaaaatttggacatgttcagggcagggatacgctgtttttagaaaataaaaagtttaaattttataaaaaaatttccgtgcgtttttgctactgtcacctgtgagttggtgtagctgatgcacgaaatcatcgcgcgttggaggggccggaaaatgtcgagcaccattttgggcattagatgatgcgtgacgttggtgagcacgtccagtgtgatctgcacttggctcagctggtggttgatcgcctgctcattgcccgtgccgaactgctccgtgttgggcagttgaagctgtttttcaatgctgaatttgatcagaattttccatgcccgtgggtttcgaattttttttttgtactttcaaatgtttgaaaattttataaaaaatattagtttcatacattgtcgtccttagcgtggcaacctcgccgaacacagccggcttcagtgcgcttctcaaaagaagtacggctcggcgattgatgtgttccatgcctgtgttgctggtactgctcgagccagagtactgacaatgagataaatcaacatatgttttccattgataaaacacctaaatgttttcacccactcatcacctgatcaacaaaggtggcaattcggaacagaaaagtgacgacggaatcgatgaaatgtttgtccattggcttgtgaatgtccgctgctatgccactcgtcgacgactgttgctgattgtgtgctgttgttgttattgaagagcttgactccgaaacgaaggaggaggcgcgttcatccgactgtcgatgtggggactatgattttcagagaaaaataaatttttgtttaacaaaagttttgtcttgtctagttattttctatatctcaaggaattttgaagaatg

SEQ ID NO: 6104 - DNA, 7428 bp, Heterodera glycines
ccggtctctagtgggcttaaatgtacatatattgtgggaaccggcctctttggcgcaggccattttggcgcaagactatatatcattaagatttcacagcaaaattagataatctcggtatgattttaagaggcatgatactgcctattagagtcgggggcgtttggacctcagattttgggcccccacgtttggaccaccgtttttggaccctcgtatttgggcctcagggtcgtttcgtccccagcgtcgtttacgccccaagtacagaaaaatgtaaaatcacagtaaaagcaacttattaaatatcagcataaaaatgtaatataaacattatcatacttcatggtctcattaacatcgacggctttacgggtcgaatgttggacgaccttcggttgtccatttacatcgtaagaaaccattgttgattcggagaaaacaacagaattcggatcactaattgcatggttatgcatattttgctgaaataatttaacaaattaataactaaaataaaactattttttaaaattggaccatttgctgcatcattccgccgaaaaggccaaatcctccaaacggactcatcatcgtatcaggaccaaagtgatgctgtggaggctgctgacgacgaagagcttggttttgacgattcagaccatcggtgagcataggatggttggggaacggggggcccatcattccgaagccgttcagcatgtcccacgcatcgcccaacatcgaattcatcatgttgtccatctgtctcatttgttggtgcatttgacttaatgaaaatcaaaggttagttaattaagtactgattgtgcttatttgaattttttgtctgtcttactcaaatgggtttctgaaggggtctcctccgccaccaaacattttgacgagaaattgttacgttcaaattccaaagtaaaattactgttaatttaacgatgaaatgctaaaaagaaataatagaaatattagaaaaaagtatgtacatacaataacattgtgactgatttaaattaggcaatttaaaattaatttaggcacttggattttctttctttttagcaaagaaggaaacatttttcttcccttctctatctccctcaacgcagagagatttgcccctcattcgagaagattccatcctaagccaacaacatttttgtccacatgcaattgctgcttttttcctttctctgacagacaaaaactcacacgttctttcgttttatctctttctctcgtttgcgagattcgtaaaaatgaaaacgaaaaagaaagagaaacacagcagcagcagaaaattgcaaatgctcaagtgttgtataatttctccctttaattcgtatgagtgaatttagttccacattaaaatcccttaaaatcaaaaaattggtcgaatcgtttgaataaaattagttaggtacctaatttgatgtaaaatcgaaaattatcacgtacgatacgcgattaaatcagagctgcgatatctgagtatttttactcattttgtggtcttttagagggtcaaagaggatttttttgaaaaatgaggatttgcgtatttttgtggtcttttgagaaatttgagtatttttgtggtcttttgacaaaaaagtgacaaaaatgcatgatttttttttatttggcaaaatgttcgaactttttcttcaaatcttaaacattttttcgaaaaatcctcagtcaaaatcattttttttgacaaaatttttaacaaatcgcgctcaaaattccaaattttttccggcagcgcctatcggcactgccggaccccctcccccaatgttcccaaaaagttttttgaaaaaccgcgccacaaaaagagcaatttaaaagcaaaaaatttaacagatgcacagtgaaagcattggcccaactgaagtgcaacttcgatttttcgtgctcagacttccataataaaatgcttataaatgacaagaaattgatgacattgattgtttcaaacgaaaaatatgactcttaattgattttatttgcatttttttatggtttaaaaaatgaggatttttcatgccaaatgaggattttttgaggtattttagtggcaaatgagtattttttatgtctgaaatgaggactttcaaaattttgagatcgcaacctgacttacaactcatattaggccaactcgtactgctccaatgttttcggcaacgcctttcggcactgccggaaccctcctttcaggagaaatttaaaaaaatactttgcaaaaatttttcaagcaattcgtttaatgtgtataaatttttggttttttggtgtaaatcttttaaaaaacagtgccaaaattcgtcaccaaaaatttccctcttatttttaacttaactcaaaaacgtgaaagagaatttataaaattttcaactttgaaaacccatatggatttaatttcgataatcgaacatttttctaattatattgcttcggggaaaagtgacaattttttgggttttgttccaagtcttgggcaattctcagtctcgaacataacgaaaatttagacatgttcgtgcaacatgggctcaacattgcaccaaataagtagtataaggtcccaggggccggggtccagacccctgtccctgcttaaaaaaacacccatttttgcttttcatgattttgccccatgtgccggggtccaaatccatgagaggattaattaattaaattaattcatccagaggcagagggactcgaacccaagaggtctaagccaaagcactaccactgggtcaacgatacagttatccgaaaaaggataattagcaattatatatatatatataatttaaaatcgattaaataattcaccaatgggagggggattcgaacccaagaggtcaaatccaacgcacaaccaattgaccgaggaacataatcatccgaaaaaggatatttgtcagttatgtagtaaaaaaagtgtcgcaagagtcaaaaatggacgggagaggggatgcaggcgacattctcccttttgcctatataaagggatatttgtaagcaaaaaaagcacaaataaaaatttttttaaatgttcaacgcaccgtttacattaattttatccggcgctacgggaagtggaaaaactcaatggctattgaaacttttaaaacattacagtatgctaatcgcaccgcctcctgtaaaaatactctattgttattccgagatgaacgattctgtgatcgggttaatgaaacaaggaattgagacacataatggggtaccgacccaaacgttggttcaaagtatgcccaaacccttacttttaatcctggacgacctgatgttgagtgtaaataacgattttttggatttattgttcacccgaggctcccataactgggatgtaagtgtgatttttgtaacacaaagtctctacggacgcaatattcgtaccgcaagagccaacagccattatttggttttaacccggaatccttctggtcaacttcaggtcagaacggtgggctctcaattgtttccgaagaggctaaactattttatggaggcatacaacgatgcaaccagcgaaccattcagctatctggttataaatatgcatcctaatgcgtccgagtctgaacgtttaacaactaaaatcttcccggatgaacagcgtgaggtgtacctaccaattgaataaagaaagggtataaaaggttgagaaaatctgtaattttcactacaaatgtatgaattcagtccatatataagtgaaaacgcagaattttttaaaaaaatcgcctccacgaaatcggaaaaaaagaaaaacatccttctgcgagacgcaacagccgaacaaatattaggacttgttgaaatttgtgcaaacatattaaaattcaatttcagcctaagcagaagccaaaggaaacggttggccgaatacgcggactattatcgtgcaattgcacgctcgcgtagcgaaaagactgcgagaaaaaggctacaacagggaagtggtatagcattaggggcaatattagtgcctattcttggcgcactagctcaacacctggtcgagaaaattacgacctaacaggcgggagctaccaatgaaatatacaaaaaagatggttatggtgccagagagtgagtatttggccctcattaatctactgaaaggaaacagcgccgtatctcctcctctagccgacccgttacagggcgagaaaacgctgcttgatgtacagattcaaaagaatttggctgatccaaaaacgaacgcagaaataaaaatgaagcgtcactcatggttgtacaaacgtagacaccaactaaaagatattattgagaacaaacctcaaaaagtaattgttgagagtggctcagttacagcaccaaacgttgcgccgtatatgggcattcagaaacaacaaacaccgtcgcatgcgagcacaccacaccgcaactcggcttcaattcaatcaattggtgcagtaagtaagagcaacactgatgtagaagaggacacggacttttcaactgcttctgatcagtttgagcctgctgctgatgctgctactacttcgtcaaggaaaacgccgcaccaaaagacgccaaccgtttctttaaggaccagcccgaaaaatttcccaaaaatgatgggcattatcgggaaggatcacaaaaaattcggtgtcaatgcaagcagcggagaaattttgactaatttcaataaacccgtttcaggctctcatttcaccgaatcgttaaagcatttgacaggtcagcgcgaagatgtgcccagaggacatcgcttcttcattcaacgcatctcaaaagacccggaaatgatgaaactgcttcaaaaaataccacaaaggggggaaggccggcggcgcagcacagtgaagaaaatgggaaagaaaaaattagtgcttgtcaatatgatgaattcatcgtctataaaaaccccaggattacaccgaacggaaccaaaacgcaaatttaaacctgaattatgggcaagactatagcaccaaagcagccgactgtggataaattattggaacaaatttattacgatttacgctcaccggccagctatgctggtatgctaaaagtttgggaggaggccaagagaagagatcctcgaatttccttacacaatgtctatgaatttcttcatcgccaacgcacttacacattgtttaagccacggagaaacaaatttcctaggctcaaaacggtgccgagtggcctgcatacagattggcaatgtgacctgtgcattatggatacgttaagggcgcataatgacggttaccgctacattttggtttgtatcgatgtgcttagtagaaaaatttttaccgcagagtcggagtcgaagaaaagcgaacacatgattgaagcatttgaaaaggtgttcaaaaaagccggtgtgctgcctaacaaactatacagtgatgcaggtttggagttccaagcaaaacggatgattgaatactggaagcaaaaggacataatcaaacacataatgtacagtcctagcctgcatgcgggtgtggttgaacgggcgaatcgaacactcaaggagcgcttatacaaatattttagcgaaaataacactctaaggtggttaggggtgatagataaaatcgcaaataatgtgaacagtactacaaatcgtaccattggtacaaatccagcttctgtaacctttaagaatgctccgacgttaagaaaacgcctatataaagaacacactgatgacaaggaaatcaaaataaacacaaaattcaaatttggtgatattgtaagaattagcaaagagaaaggccaattttcaaaaggttactatcccaattttaccgacgaactttttagggtccaacgtgtaaacaacacaaacccgcactcgtacagaatacgtgatttgaacggagaagacataaagggaattttctacgatcaagaacttgtaaagacaacggaaaacggtacccatcgcgcagaagtgctaaaatcgcgtacactaaacggagtcaaagaacatttcgtccgttgggttggcttgtctgacaaatacaacagctgggtccgtgactcagacctagtgaaacgtcgagcatttgaataaagctaaataatggaagatttttacattgtacttccctcgaacacacctggtccaggaaatactgcttcaaattttacggttagacttccgcacactttagagcttgactccaaatggtccgtcgcattatcggcattaatctatccatattcattcccatcgatcagtgtggacgaggatgactctatctctgtcaaactggttaatcctaactacagagaagatgccggaaattctgacgaggaatcgcaaaagtttatcaatttatcagtgaagattccaaatgtacaattccaaagttacaaagtttacaaaaaacactgaatcagataatccagaatgcttacgctacaaagtttggcggctcatcatcattaaatgatcccccctgggacccgtccctggcctccaccacaggtaaaggggggggggggggcggaggacccggccttcatctcgagaaacttatcgcttagtctcttttcttgaccatcgcttttgattctcggaaacagataaataaaacgcaaataaattacaatgtcttattgtttttcattcatttacttctttcatattgcataaattatgatcgaaatttcattgcttttcctttttttcatttttcgcttcttccgccgtcgtaaattttcccttatttttctccgttaatcgtttcattgacagttgggcggcattcaaatccaaagtcggcacatttagttctgcctcgagagtcactttcagttccgttttgtgcgtcttctgctgttcgcctgactttgccaatctttttcgcatgaattggctcgcatttaagtccaaagtaggcactttcgaagtgccttccgggctcaccgcaatttccaaatttggcattttttcatttaggggtgacgtaatcgctccactccaaatcccatcccccctcggcgacggaaaaatttcgtgcattttttcctccgtccgattgctccgggcgattcgttcgtcccactgtttttgctctttgtctttcaatttgctaaactcctcacaaaatgatttccacgatggaaatttcagatcgattaaacattcgcataaactttcaatcgctttcaccaatttatcacaattttctgtgccgactttttggtcagacagtcgcttcaccaaaaagggcattcgttcagcccaaattgcgagtgtattggccagaaagaggtttttcttctgcacttcctccaccctccgcctcaaccgttcccaaagggcgtgttctttctctttccgttcctccg

SEQ ID NO: 6105 - DNA, 7192 bp, Heterodera glycines
cagaagttttggcccaaaatcccgtagtttgaacccgtgtgccttcttctaattccgtcaaattaacgcttgatcgatttggtggggaaaaaacgctgattattttcttccccatacaaaaagacatcaatggccataatttctgaggtgaatttattttggatcacttccctaaattattccacagcagctcgaagggacaatttgacttactgatggtcccagttttggaggagaagtcatttgcttcaaatcaattgtttttacccgagttcctaatagagattgtttgttccaattaaacgaaatttgtgtgatattgttagggtccagtgtaatcgtcgtcacataacttggtgtactttggaagactaattgatccgattataagcataaattttttcggtccaatagctcatttcgttcgcccaaaatggccggttgtaccagtgcccacagtatggggtgtgagatgaacacaaaccccaaaactgagctttcaattggcgatggaccagctggcggtggtgaggtatccgcaactattttctcaatttccattagactagccaatttttcagaatccgtcagttccaagttttcaaacagatttaaaaaattgtcagaattttcgctgtctgctttttccactaattcatttccatttccaaccgcactttctgtttcttgcccgcaggcgaaggaattaagattattacttgaattaatttttgctgatatctaagaaggggaagacgatacataaatgtgcaggatgaaaaaaaaatgaagatgaatggctatgaagagaagaatttattgaccgatcggtgcgaagagggcggggcaatgaacttaacacgtatttaaactaaggggctaatgttagcattattgaatacaagagacaatactttgggagagagaacaagaaacaacggacccaagaagatgtcaaccaatgataattttaaatttgacgattttgaaaattatgaacataaataagagaatatattttgttaaatatttgggattattattaatttttattctctttaaaaaaaattattagtattattattatttttttttttttaacaaaaaaatttgtgcaaatattatttccttttacgacttggcattgagaaggagagttgtgggatgcaccacaaatgattaatgtgtctaggcaaggggatgggcgtattttggtcattccaaagaaggctcagcttggttgttattcccctcaatactgctctcttattttatttatttattttttggcaagaggagcgttagcgttctgtcgtgggcagaagcggtgagatgatttcaaaaaatcatgtctcgatattttagaaaaggaaaagaaaaaagaaaaaaaaatttttattgagtattctctttttatattatttcccgccctcaggctgggttcttttatcttgttattgattatagatattgttaactattttacatttattttttatttattcatatatatatatttttaaatttatatatattttttatttttatttttaccttttttttttactactcatttatgctgataatttctttttgtggtaccgactcattttgtgtaagaaaaatgctctttgaagcctattggcattgtcattattttatggcaaattataacggagcgctagtgctctgtggggcaaaaggcaagggggcgctagcgctctgtggggcaaaatgcaagggggcgctagtgctctgtggggcaaaaggcaagggggcgctagcgctctgtggggcaaaaggcaagggggcgctagcgctctgtggggcaaaaggcaagggggcgctagcgctctgtggggcagtatgtttggaacaaaatacattgtgttattttagttcgaagttttaaatatcaacataatggtcgatatttcaccattgcaatttcaatatcgtcacgaagttctgactattagtgttgctgatttgacgaataattttaatgaatgaatgaatgggtccaaactctcggcttcgcccttcgtctctccaatccgaacttccacggccaagctgtgcattgcaataatgaacagcggtccaccttcatctcagatggatggcatgggaaatcggagaaaagcaaccaggggtcattccggtttggggacgagatgtaaaagcatgatgagaagagagaaagaatgggccagagaaagtgtgaggaaaccgacgcattttaagaattttgaattgggggaaagaaaggccattaacagttcggaataaaaggaaaattaatgataattttaaatagaaatggacaaaagagagagagtgagaaagagagaatcaaaacaaaaagaaatttgcagaacgtgagggaggggaatgaagaaagaaggaggtccaagcgcggctgccgtccatggctgaaggcgacagcttggccttctttcatctgcgcgcaccagaagtttgagctttgccacgagtgcgttcccgagtgccaccttgaggaagataaggttgatatctgttctccgccccccttgactcaccggagttgttgtaccacacatttttaccgtacttgctgtataaatgctctgaccgtaccgcaccgccgttggccgagatcagctgaccgtctctgtcgtaatagttgtcggggttgttgaactgctcgaagtcgaagtactccgggccgaccactgtcgtttccgttgtcgcttggtccaggtagagcgccgccatgtctccgtccggttgagcagcagcaaatcgccaatgatgatcattccatggctggcgcgagagatggcgacgtccacccgcgcggcatcagcccagaaaggctgagagtcggctccactgtcgaggacggagcatgttgtgacgacgacggcaagtgacgactcgtggccctgtgtcgcgtccgccgtggtcactaaaatgtcgggaatttcttgctgggccaccaaccgttcgatttccaatgcttgcgcggcgtagaaacagatgcagcggatgagtgtgccggggaaggcccgcgccaaacgccacagtgctctcatcgccgtgtctgtttgtccaggattggccgaagaagtggacacttcgtcgcgttgcgcaggcgtgctctgatggactaaaacgagggggactccctttttcggcaatttgaatgccgtttggttggtcatcagtgcccgctcggagtcgtcgcgtcctggtgtcaacagctcgccgtgcggtttgtaaaagccggcctccgtgcaacggacgagagctgaatgtgagcgaaaacagaccgacaaagttgtgacgtccgtcccttgtgcaacatccaggttctggatgaccgtgtccatgccgaagtcctcgcggattgcgatcggcagggagggcaaatggacacgaagttggcggcgatcaccggtgatcagcaccttggttaggcaggggagttggcttaccaagttgaggatctggacgtatggcgcctgtccagcttcatcgatgatcaaatgcgtcgtttccccaaacagtgccggcaattgctcacagaaggacaaagtggcgaagcacaggcggcgatttttgtgctcctgcacaattttggcaactgccatttcctgggccaggcgtgggttccgctcgcaggcgtccaggtaccgctccaccttgacgcggtcttggtccttctgtaggagttcctgaaagtcctgtgcctccaccgcggtggcgagcaggtggggggaaatccgctcaacttccttggcatatctcaacttacctgtgccggagaacaaggcaagcatcggctccacgtggtttccggcggccagtgcgtcctgcatctccagcaccagcttgacgacggcgacattcggcggggccagcgccaacacacgtgccgtgggatccgtggccaggacagtggccacgatcgatgccgcgctgaacgtcttgccggtgccgggcccggcctgttggaagaccaggcgcggcacctcgtcgagcatacacagcgcggtgtcgatctgtccctctttcaattttgaaagagccccaaaagtcattaatgggttattggcctttgggctttccggttttaccggtcggcccaataaaattgacataattcggcccaccttttcttttccttcgtccgtcgccactttcgagcagtcattggaccgcagtgtgaacattcgctcctgtagggctctgacggacgtctgagggatgagttcaacgcatccgtcgagttctccacaacgcatctgatcaaattcgtcctgcgcatcctggtccttcgctgcctggtaggaaaggatgactttggcatcaatttcgtatcctacacacaacgcccttttatcgatgctcagcacatacccatgcgcacaaggctttgccttggctgccggattgactttgcaacccaccgccaaatcgatctcccagattttgcacaattcggtgagctcctcaatgctcggcaccggcatgacgaattggatgacaacgcttcgggttgagatctcattgatgacgaccggctcgacgaacagagtgtgcttccgcagatcagccttcacatcgaacgactgcgctgcgacagccgccgccatgaccttctcacccagctggaccttcgcccagctcagttcggcactgaaagggaactcatagcccattggctcaggctcaacgccagcaatgacgttttcgtgatgaacgagcagttcatcgccttttttttaccaaaatcagacggcaaaacatacgcaaactgctgtgaatacagcacccatggcggactgttgatctgccgaagttgaagacggacaacggagcggtagcggatgtcggtatccgtgaaatcggccgggaagtggcgacggtaggcgcgcatcacgcagctcagctcaggtgctgacaccatggccactttgacgtgtcggtcacgggctctttgcacatcgaccaaaatgccgacggcctgagtggggatgcgctggcgcaattggctcacgtccgttgccgtggcttggtaattcagccgtccggttgcttcatacagccaatctccgcgctcttcccatcctgtttcgctcttcgtccactcacacttatgtaagcggaacaaatcgccgatttcgatcggctgggcgttgtcgaagaggctaaaagggacaaagaccaattccgggaaatcccagaaaagtttcatccgtgccgcgatcacaccgtcgcttctcacttgggcgaccagatagggtttccccttatcttccttttcaactgctttatttcccgccctcaggctggggttcaattgcaaattgtcaaatccaccttctcctagcagttcactttcactgccctcactttcttcttcctcttccattccaccacttttcaccttttctttacccatttcatcctttttccctttttctccactcatttcatccacttccattatttccacttccttggtgccctcggcactttccattggcaccgtgtcgggttggaccgacttgagtcccagcggatcactccgatccgccagtaccggcaccgtgagtggctcatttccactcgcattcaccattttttcaagcccgcaggcaagggttttggagacagaagagttggggcgatttgaaggaataggtttttgcatctaaacaaatgaaaaactgaaaaaaaaaaaaataaataaataaaaattgaaaaaaagaaaatggaaaatggaaaaaatgaaaaaataaggagcggaggaaaaatgagaatgaaggcaagaaatggcttttctgaaggatgagccggccttaaataacgacgggtccgagtggacgatgggcgttacagcaaaatgcaatttgtttttcaaatgttacaacagcggcgagctaatgggggaaaaaggcaaaaacgttttctcccgagcgacaggggagattcatcgccgcaaaaagctaatgtcgcgacggggaaaagcaaaaaacgggagaggggacgggagatgaattgctttccgtcggctgccatatttggcacggagagaaaaaaatgggggggcactgcaaaactttggtcatatggaattaattaaaaacgcagtcaaaagcggggaaattgcaattttgaaaagaaatttcaaacattaatttcaattgaattgggttcaattgaccacaaatatgcgcgaattacacaaaaggaaatgccggcaatagtaaaaatgatgccgccaattgtccaagcatttttcgagaaaaatgaggaccaactttgagggacaatttttggctttaggtgtacacaagtccaacccaaagttgcatttctctcttcggttggaaaaattaaattagtcggctggcatggatgggcacaaaaatggtcacaaatttctttatccactgaaattcctttaatttgcttttcttggggggactctacaatttgggcgttcgaactcaatatcagcaaaattataagcaattttttgcaagaaattcttttgtccggcccgcaggcatgggaaatgagtaaagaaagatttttggtttttggcattttaatctgaattttgcgtttggtctaaaaaaagaaatattcaggaattattcggaatgaattttggtctctggagacgatgattgccaaaaataaggggcggtgcaaaatgtgacattagcaaacaccggcacattgataatttgtgcaaagggagaaaaagtcagggaaaatggtgcaagagaaaaaaaggaattctttggccttgaaggggggaaaaaaaaaggaattggatgtgcaaaaagaacggcgccttccaccaaaatcccatgggagatgaatggcaacaaaaagaaaattgccttaaaaaccgaaaaaggaaacaaatgggccaaagaatgccaattcgaaccgaaaagggaagtaatggagttttttttttttgttaaatcaattcatctgcgttttggtgattgttgcaagtccattgcagcacataggtaacggtatgatagtcgaaattgttcattttggagccattgatgaatgttttcatgttcatcagcgccaaatatttttaagttcgttcctacataaatctgctcagtccaccaatcgcgaattccatcactcgaagttgccattccat

SEQ ID NO: 6106 - DNA, 2556 bp, Heterodera glycines
  unsure (1)..(2556): unsure at all n locations
cgatgggtttggaaataaaatntaaagggaaataaacgaataaataatttgaattatttgtgtttttaaaaatatgaatttcgcattttactaacataattgcattntaaggataaggaatttaaaataatgtaaaattaaattattattatttttatcctggcaatcctgaagaatgggcgtaaatttttcatttaaaaattcctaatagacaaaaataaaaggacatttaaaattgtcttaattttaacgagagtaggttgagagcagtcgcacaaattagaacaaaagggtaagcactgacaatgagaaaatgtttgggcatttatttaccttttgtgcaccgcaccgcttcggaaaaggtgcaacaatttacctgatgattaatgctaattaatagcggtaatcaatcaccattaagatttggaatggaattaaaatgaaataccatagaattttattaaagtagttgacaaatctcgtaccaatttcgaaactccagttggaatttctaatcacctatgcttcacgaaaatttcagccaattaatcacacattatgaatatacacacaataaatgattggcagagaaacaaataaaaaacaaaacaaaaataaattaaaaacggtaaatggaatgaaaatttagtttaaaatcaaaagcttagaaatttaatttaaatttttgtagcacaattgatcattgacagtattccagcaaaagaagtgcagcgagatttattgaatgaaatgaacgaatgcaaaaaattaattgggacgatagaaaaactttgaattactgtaaatttgtcgtttggcgagcactgtaaacatttcaaacttaatttacttgacttattttattcaaaaagcaaatgcgatttttatgacataaatgaaacgttaagaaataattttttttatcataatattttttgtgtttgcctattaaaaatggtcaatttatcaaatcatcccaaataaacccaatggaacgaattgttgtaaaataattatgctttaaactagagatcggaattttgagaaaatgcggatcaggatcgggattacggactaggcacacatacggattacggacttacggactaaaaatccggaaaattcgtagtccgtataaatccgtatccaggaaaaatacggatccgtatacggatacggaattttttaaaaattttttcatattcgataaaaactgatttataaaaatacaaattttgaatatttaaagctaaaagatttataataaatttattataaattctaggcaaaaaattcaaagaatactcaaaaattttttcttacacgacaatttattgcttttcacaccacttttttgcggcgcgctttttcaaaaaactttttaggagccggcggtgcctataggcgccgccgggaaaatttttaaaaatttaattttaatttgataacagactttcaccaaaaaagagcaaacttgcgatttttaaccatttcatgaatttcgttgacaaattttcataaaaaaatatctataattttgaaaaatttacaaaaacaagttcgtaaaaaatttaagaaatagaaaaacgaaattcatttcttaaaaaaaattacaaattggaaaaaaaatgaaatagaatttcgtaaaagttcaactaatgcaattcaataacgtaaggattttgagttttttgcacaaagattttgcttttttccaattttttcgatttttgccaaaaattttacgaaatagacccgccaattccaaagtattggcgaattgactgcacaaaatttaaaaatataatccatttcactttaaaaaagccaaaaaaaaatccctaatccgtatgaagaattgtacggatcaggatcgggattacggactaggcacccatacggatttacggattaaaaatccgtaaaatcccggagtacggatccgtaaaaatccgtatacggatcccgtccgtatccgatctctacttttaagcaatgttatatcaaaaaatttttcatttgatgcttttttgactaacgtcgtagcggcataaataatgctttaatgaattttattttcttaaaaaattcatttcgaaaaataaattagagtacaaaatttaataataaatatcactctgatcgttaagtctaataaaaaataatataaaaaatacaaaatatacaattatctccaaaaataataggaataaattaaatgcaaataattatttctttttttctaattactgccattaccttctaatcattttttcaatttatgttcttttttttataccaaaactgataattattttggtgacataagttaaataaatgaaaataatcaattaatagcaaaaaagggtaaacaaacgatcagaattgatcagaggggatggattttccataaaacgccattaaaggagttttgttttttctggttaagaactttatcaagaagatttaaaaacaaaaaaatcctaggtcggtttttcggataaatttcaaatagaaaagtcgaaaaagaaaaaacggtgctgaatcgatataaaa

SEQ ID NO: 6107 - DNA, 3922 bp, Heterodera glycines
aattttgctttaattttcttcagcgatttataattaatgtctttgttgcatttgatttccttcagacgggcaagctcatggcccaaccattcgccaagctgttcagctgaaacattgctgaacaatgccaacgtgatttgccggggacggcatttgccgtccaaatagtcaattacgcctttggccgacatccgaacggtcgggtcaatgtccaacatgttctgtaggcagggaaaaacaaaacataaacaagtccttaaaaaaagaactgctggtccttatttaaaggacaattaaggttgttcacgactggtaaaaaaataattttaaaatatttaattagatttaaacggggtaaaaagatttggtataatcagcaatgtcttgaaaaaaaacttcgaaatcagaacttggggctcaaaaattagatttttcagtcaaacccaaaattttgttattttaaaatttatacaatcgaaatttttaaaaaattccaaaattcggcaaatttttcaaacatattttcattttttttacatattttaagaatttcgcaaaattaccggaatttttatggaaaaataaattttttttttgaaaatgtacccctactaccaaaatttttaatactaaaatatgattctaagcccatttaggccatttttatggcattttgtgcctatttcaccctttactagaaattttttccaaagaaaccatttttttaaaaattttttttacatattgtggctttttgtacatgttttgggatttttttttacattttatgtacatatttttcacatccctatttatttgcttttgctatattagaatctattagcatttgtacaaattgtctgtgacaaattgggagtatggcatcattcattattgagtggttgtgccaataatgctttcaatatccaaacaaattgtgtaatttaattccaattttcccgcgctcttaccaccaaaaggtaggcaatgtctggcattccgtatttgttgccccacatgtcgagaatgttgatgaccactcccgaataccgtagccaccaatcttcagagcctggcttaaaagccccttctagaagacccagtttaatgatcatcatttgttgttgttgttcattaagtgtgccatcatatagtcgggcaaaccgacacaattcgccaattcgtttcactttgttttcgatatttggctgaaaattttgtaaattcaaatcaagataaatttatccaagatcaaaaaacggttggaatcgatttgaaacggcccaaaacgatgagaaaaatgctaattttcgggaactggacaaaattttgctggccgaaattttgcctggacaaaaaatcgctaaaaaatttttcaaaagttttttccattgatatttgtcatttgaaaaattttctaagatttttttctgaaaatttctaaatttctaatttttttttaaattcgtcggcgaattatgtcccgtcgaaattttgtggtgcaccctaattatctcatgaaaatggcaagcgcaccctaattcatattttatgcttttggcatcgattccgctcgtttttgaactaatttgagtttcggagtgagctgatgagggaactgataaataaagatgcaaaacaacgaaaactagcaaaatgggcgccaaaatgcacaaaaaaacccaaaaatgttaaaataggtaaaaattaattaacaaattttcggcgaaatattttaaatatccattttctcgaaaatatggtaagtttaaattaaaaatttgacgaaaaaaatagagtaataaaaattatatttttaagttgggaagggaggattttttgcttttccttacaagtaattttgaaattagtaagctaaaatagttaatttttctcggttttcgaaattagaaaccaaaatgaactcagaaatttggagtcacagtcaaatactacacatcccaggacttgaccaagtttaaagcgaccagcttttaattatgccattagtgtgagttttgaattgttaatgccttaccctaaagtccgccatattaattggcatcgaatttgatgaccaagaaccgttcaggaaattgatgagcacaatctcataaattgtaattgctgctgaccaaatgtccatttttgttgttaccttaattttggtattaatttttatttttaaatatttattttttactttttttacgcgtttcccttgcggcgtttttgatttcgtttccgtagggactttccaaattttctttttaatatttgcataaatgcctgttgatgatgatgatgctttcattgaaggttgttcaagaattctttgctaaattttgaaaaaataaaataatttaaatgtgaaaataataaagcgccgcccgctaacttctaaaagctctggagaggtataatcaggggtaattactggtggttgatcagtttcacccactccattttcaacaaatgcactgccttaattaaaatataaatttaaaaaataataataatcgaagaatggtgactaatagatagggatgcgatttttaggcacaaaaatcgcgaaataggcacctaaaaaggcataaaaaatcgcaaaataggcattaaataggcacaaaaatcctcgaataggcactaaaataggcaaaaaattatttttattatattaacgtttttaggtagtaaatcacgtaaaaattaatcaaaagacttacttttgcttatattccaattgttttaaagttttttcgaataaagacaaatttttagccaaaaatttttatcatgaaaaaatattaaattcggtgatcaattttttgaaatttttttttcaattcttagcggtgtattttttgaattttttttttgggtcatttcttagtggtgggtttttcgtttttattgcatttttgttaaggatttttcaaaaatcctaaaataggcacattaggcacaaaaactccaaaatgccaaagttaggcattataaaagtcatcctaggcaccccaaaccaagcggaaaatgcgtttttcgtgcttatttgtgcgtattaaatggctcccggtaaattggacactggaaaattggacaccagaaaattggacactaaaatactggacaccaatggaaaattagacaccggaaaattggacactattgtacataaaataaataagttaaaaataaataaacaaaaattttaattgaaatatataatgttattattatttgtagcatcagcagcagaacgccatcatacattcataacgaaaaaagttttcattttgatcgggttcccattttttgcgtatttttggcacattgaacaaccatcgccaattttctacattttttggcatcttaatcaatcatcgcctaatttcgtacacttttttccacatttgatcaatcatcgtgcctatttaatgtttgattcactctaaatgccttaatccatttatccacaccaattatttttcaagctaattcctgtgtttattttttaaaagaggaatttggtgtccagttttccagtgtccaattttcctttggtgtccaattttctggtgtccaatttaccggtccccgtattaaattgcgcaaaaattttaggcatttgcctaaaaatcgcatccctactaacagagcccggatttttatgtcctaaaaatcttgaaatatgtaataaaatatatgctaaacaatgatgaatatacataaaaatcccataaaaattttcttctttatttttcaaatacatttgcagatgtttggggtaaaatggtcctattttttgataaacttattttgtacattgaaagctatgtatcagttgaataagtttcagcagggaacttcaaaatccaatgacgaattaatgaaaaacttcaatttggcatttttcgtcatt

SEQ ID NO: 6108 - DNA, 1359 bp, Heterodera glycines
aataataattatatattgaatgagaatattattgatgaataatatgataattcgattgaaaggtatttaattgtgaatgattatatagatgtaatagataatttatttatgtttataatatttatataattaataatgtaggggagcttttggtgataatgaattttgatggtaacacatttgcttttgggcggcaggctttggctgtttgacggcataacttcgcccgcataataaccgacaaaaatctaaaaatttatttcaatttttaatatttaattgttattattattacaaatgctttaagagaaaaaaaagcattggctctatatggaccagggatgacacggaattccgatttccgaaaaatttgaccctcggaattccgatttccgaaaaatttttggagcctcggaatgtcatccctgctaacctgggcaattccccgcaaattattatttaaaaacaataaattagaagaagaaaaaacggtgctggactcaaaaacgatcaaatggaaatttttttgacaaaaatttaattcatgacatcgctcaagagtaaccgaacatttaattcttgataatattcgatagcttaagtgtactctattagcctgctaaatttcaaaaaaaaattcgttaactttggaaaaaagttatggccagaggaactcaaaaaaaaacaacaacaacaacaacaagtttttagtacatttttgttcataactttttgcaaaattaacgaaattttttcggaatttggcaggattaatggagaacatttagggctatcgatgatatcaattttaaaatatgattgctttttagtaaagttataagcaaacattttttatttgcgctttaatgatcataatcataaaaaaaatcatctttgaccccttgagatcagcaaaatgatgatgataatcagcagagttggctccctgatcataacacttttcggaattgttcgaaatgaatgtcacattcgtgatcagcgaccccaaaaatgccataataaggtattttgtacgaacaactttttttaaattttattttctcaatatgccgaattttccttttacaatttttttgttcaaaaattttatatttttaaaaaaatataaaatttttacttgtcctgagcctcctgaatttattctttcagttattgcgattttcacttgcaatacctcctcagattcggttgttcttcttttgtatttgattgttttcatttcgctaatttggaaatttcggcactttttcttttccgaatttacaatttccatttgaaaatataaagaaatggaaaatatgattaggtttaattgagcaaacattattttctaaaagg

SEQ ID NO: 6109 - DNA, 1813 bp, Heterodera glycines
gattaaaatgatcaaaaaaagcaaatgagaaagagggaggaagagagtgatcagacaaaaatagaaacggagggaaggagaagtgatcagccaataggcccgaaaagtcgggggtattaagagataatcactttcagattcgttacgaaccctacgtcaaagtggagccggatgagcttagcgtaatgcaaaatctttggaaaccgtaaatttgctcctcaattaggcattggctcaccgacgacttgtcgccaccgttgacacaattgaacatttttgcgcactgatggaccttcataacatcaaagatagggttggtctgagggggacaacgaggggacctaattaagggcaattagggggtggtgaaataataattttctggccactattttccatttcttagctggcgttggtaaaggcggcgttcgctccgctgactttgttctgtgccgtctcttccaccgcacgggtgagtttttcgtcttcctaaattccttttccatttttttagcattttgtgccattttccgcgttatttcatttttcttgacttccccccccccctttctcttaggtcacccgtaaccgtgacattctttgcctctgcaatttcggctacgtcccgcgcggtgcccacctcagttacgccgagccatagttgttaattgcctcaaatggtttaaaaatggcatccattttcagtcatttttccaatcgattggtggacagagcgctggacgaattggtggagccgttcagaacgttcaacttcaaagagcaggaaattgtgctgatgaaggcaattgttgcgctgaatccatgttagagagcgatgaaaaaagcaattaattattttgctaattactcattaagacctgcccaatttgtcggcagaagccgcagaacaagtggccgacttcagagaccgagttcaggtgcaacaaattacttaaaaacagccaaacaatttgtcaatttgaacaggaaactctgtacaacgtggtgagagaaagtcacccgaaggaagtggcttcttcccgatttggcaatttgcttcttttcctccccaatattatggtaattatgccaatgttcatccgatgcctaatgggcttaataattgttcagttgatcagctcaataatgacggagaatctccagtttatccaatccttcggccacaaggaaatcggcccattgttaagcgaacttttggaggaggacaatgacgaaacggacggagtgggcacgggcggtggtgaagagagctatgggacggggggaatctccagcgaagaggtgggcacaaatgaaatgagcggggaaagagtggagggggggggcagggaagagtgccgacgacctcaagaaactccggcaagcggaaaactaactcaaaatggggggggggggggagtagagtctttttttcaaaataaacttttcaaaccccttttttcgcaccgtgaatgttatttttattgaattctgaaccggtttgagtagattagactagaaaaaattgaaaattttgaaatcatgtttcccactcccttctcccaggggtattattttgtaaagtctttttttccccaataaacttgtcaaaccccatttttcgcaccgtgaatgttatttttattgaattctgaaccgttttgagtagattagactagaaaaaattgaaaattttgaaatcatgtttcccactcccttctcccaggggtattattttgtaaagtctttttttccccaataaacttttcaaaccccatttttcgcaccgtgaatgttatttttattgaattct

SEQ ID NO: 6110 - DNA, 4835 bp, Heterodera glycines
  unsure (1)..(4835): unsure at all n locations
tttgcgtcgctgcgattggcttgccaaattgttttctgcaaattaattctgctcgatggtcaaaagtccggctgtgataaaattttaattgtttgggtcaaattttgaaaatttcctggactgttggggcccggcggtactgataaacatggccatggaattgttatgaaaatttgtcaagaatggtctgaatttcttctttctctccctttttcaccccgttatttcccaaacaatgccatttctctcacacctgtccatggcatattccctggcagcggcgaaacaactttcggccgcgccgagcgccccccaactgatgccaagccgcgcactgttcaaacagccgaacggcccactgagtccctgggcaccgggcagcaaattcgcttccggaaccggcacttcgtcctaattccattttattttggttcattttgttaaagattcgtcgtgacaacaaccgaccatcacaatttgccctgtgatcgaagtccgaagcgaaagtttgccctcaattttgggtgtacttagtcctttggcgccacgttcgatgataaaaccctgaataatggaaaaatgccaactggacagtgacaatggccaactttgacggcatttccatgctttggacttcgggcccacacaatgaacaggtcggccaccggagcgttgctgatccacgacttagagccgctcagcctttttgggttcggttggcattgcgtttggcctctcaatgggccgtgtccacctgtacaactgttgctgctcgtcccactccgccttcgtctccatccccgccgggttcgacccgtggtcgggctcagtaagtccgaaggcaccgatcaattcaccgctcgccaatttgggcagaaatttttccttctgagcctcggaaccttaacaaagcgttcagtttgggcgtctggtggaccctttgccaatgtttgccataagtgacgatcggaccgatgaccaaactcgtctggacgctcacaatcgaccggtagccactgtccacacgttccaactcacgcgccaacagaccgtagccgacgaaggaagtgccggcacaaccgtaaccctatagccgaatgaagcccgaattggcatttttatggacacttagcgggcgaatgccaaaaaaattaaagacagcgaaggctcactttgtaaggcgcgccgagaaaacccatccgaccgagttcgggcagaagagaagggtcgaactctggaggaaagggaaaagccagtgaaaaaagagtcagtagcaaaagtaggatttgatttaaggcatttatttggaattgtactactgaaaataacccatcgattatgggttttaatttccccttaaatttcatccaatttttctgccgatttcccctttgaccacttctacccactctcttcgcggaatgcctgcgtgacccgcggctgcaacttttcctggcagtacgcgtgcgcttggtccctcagagtgcgctcttcctccgtcaattggctgtccaagtcaaacgcatcgaagcaattgaaatttgagtcgacacaattgttgtttttggaggctaaaagggatttgtgtcctcaatttgtttagcaatgacaactaattaattaattaattgattgtttattgcttgccttgcattgcgtataattctgatggagttgagtatttgcgatgttggcacactcttttggcaacttttgaaaagatttgtctttgcagcaaccgatgcgtttgagtgagagccctttccattttttgggattgattaattaggcaattgaaatgaaacacataataatcattttgaaagaataagcaaagcgaagcgggcggagagaaaggaaggaaaaaaggtcaaatgactccattttgtgctcttttattttcgctattttcaaaaaatgagacccgaaaagcacgagaacaatggaaaacgaactgatcagacagacagaagaaaggagaacctactgtcaatcacaagtccttaaaaaatgcttaaagggggacaaaagaaacgatcactccacggaaagggaaggcatttgactttattgagcaaatcgtcaatttgcccttgtagatagaaaagagaagccattgggagtggggctgacaagaaaatggagaaaatgatcataatcatttgattgtgttggggtcttcgccttcgtttcctcctctctctctctctttactcgcacattctcaaggccattttcaatatcagagggggggggggccgaaggacaaatggcaattcacacgacggtcgaagaccgagacgattgaggtgatcaaaaaggggagggaaatgaatcagttaatgcaacaatcccttgacgactatctttacaatgatcgaatttacagcgttcttcccacgccccccccccaccgaacccactcaaaattcagtcatttgcaaatacacaaatggtgtaataaaagcgtaaaatgatagcaaaaaacggctctcatcagtgaattttatctgtccaaagtggccagcaaaacatactttaaaaaatagaattaatccaactttttgtaacaaatcgacggacgaaatgagtcaatgttccatttaacacagcaaaatggtaaatcagaatgatgaagtgaataaataacaataatacgtaggggaaaaaacaaatgctttaatttttaaagatattatttgtgccgcacgcgctcaacggaaaccaaaaatttgccggtttggtcgcagacgaagccgatggggccaatttcgcagtcagcgcaagccaagaaacgtcggccacggaaggcgtttgtgaaaccaactgaaaataggagagggtatcaatgttaccctccccttaaagcatttttgctaaaggctaattgccctcccccatttttctgcaccgttctcgaattgcatcatgtccgtcagtgtccaccattggctgtgttccgttgtctgtactgcttcgtctcctccttcgtctgccctttttttctgacgcggcaatggcaacgcaatgcgcggaccgtcggcggaagacaaaaaattcgcagaaagaggacgcaaaatgacggaaggacaatggggacacaaaacgggacgaatgttacggccatcggcggtaacttccttaaatattaagccatcgggaaatggcaaataagtgccattgtaggcttatttgttgttagccacctcttctctgctaaactccgtctgctgctgtcccttctccgttccgattttctccgccgatgtttctgaagaagtcatttttggtcttcaatcgccgctgaaggtcctcgatcagttcgcgctgctcttcctcactccgatcgatgtcctcaatttgtccaacgttttcgcgcagcgatcgcaacgaattggtcacctgcaaaatcgcaaaatgaaaataattaaccgaatcggatatggacggacctgattgatccgaccgaaaagctcaggttgggccttgtcagtgctttcgagaatgttttggacagctctgttcaactgtagaaggtttttcaaagagtgaacgaccgaagaacaatcaaacggagtcggctgattttggggggtgttgctgctcatgcaattaacacgaaaccaacaacgaaaacaaacgtattgaacgagtattttcaacaataaaatacaaattgtatgtaaaaccaatttaatggatatgtatttaaatggtttaacgaatggcatttattgttagaggtaggcaaatgtaaatatgaaatcaaagagagtattgagcgtttttaaacgacgatcgatgtccaattgttggagtttggcttcttcagttggccgtcccccctcccatctgtacgtgttcattttcctcctcctcttccttcgctgcttctgttgctgttgtactctgttgcattagccatgccattttttgcggcgccatcgatggcaaagtatctgccattcggtccctcgcctcttccatctccgccgagccggccaagtccgagtcgccgtcgaccatgtccgaaacgtgggccaacagtcggcaaaagtccgctggcgcatcggcgtagacgtgatggccggcacgggtgacaatcttggcaaaatataaaataaaacctacaaatcggcattgtccaaatcacctgaacatccacataggcctcttgtctcctgtattgaatttcataggccgggcccgggtcctaaacaaatgtcaatgatgacaaaactattttattattcgcgattggtttaccatccacgattttccaccccaaatgaaagtgaccggcacagatggacttatcccaccgaaactaaaaacattttgaattgggaaatgtttgagtgaacccaaaaaccgaccgattaatcatcggtcgcttagcccacccaaaattcttggacattgttccaaatgcaatttcgcctaaattttgtcacatataagcctatttgtttgtgcccacactgacccgtgggttccatcgcattgcattggtaaatgtattcgtaaatggcgtccgggtcctggtgagcatagcgaatcccaaggtcggaacgcaattttttcaccagccgagcgcctttaaagttttttgattgtttctaattttcacgtggaaattaaccaaaaggcccagccgcacgcaaagtggccaaagggttgaacagagagagcaatctgccgaagacacgcatccaaattgggatgtgcaactgaccaagggagggaatggcaaanagcaaaagagggagggaattaaagagggtctttttaattagccaatattcgtcgttagagaatcaaacccgaaaacggga

SEQ ID NO: 6111 - DNA, 1309 bp, Heterodera glycines
taatcatctgatcaatgcccatggcactgcgccaatcctcaattgactgcacaaattcgagttcggcaagcgttgggtcggtgctgaactgaggccgacttgaacgaccaaaacctatggaaaggaaatgaaagtgattagagaacaaattgttagaaattaaaatattattgtaaatggatttctcatttcattgctatgaatgggagataatttccctgcctaaaatgtcgaatgcgtggaccgttctcttccggcaaagatcgtcaagggacgccgcccaaacaccaacgccggcggcaaagccatggagcagcacaaagggacacggactttggggatggtcagaggacggtttaatggtcagcgtatgcactgaactgttccaaagacgaaccttaggacggaaaattgtgaattatgattattaaattcaaattccaaaaggaataaaaaatagaaaattcaaaaataatttcccgacacaaaataaagggtaatcacagtaattgatttggtgctgatgtgtgtccgaactctgctgagtaaacggcgttccgcgtccgcaagtctgaccaacgaagactgaccccaacggaaccacgaactgcaaagggtcaccaattattaatagaggagcattactatgtttatattgactcaaaattccaagtgccttttttttgctttcggcctttaaatgtcaaattgaaggtgccatgggcgaaaaaacagcaaacaatgaccaatttcgcagtatttgataaaaatttaagggtaattgtcgtccgacggtgccgataagcgccgccaaaaaatttagccatttaaattcatttaaaaaacctaaatatattttttttacaaaaataattctaagaaattcgtaatatggaagcacttaacagaattccgtccccctcctgtccaacaatgagacgagcctcctgctccagtgcctggttcaccaccatcgccggcggctcctgcttcttttcttcagcagcagatcccatcgatccgctgttactggcaaccattttggaccgatggattaacctttaatccccaaaataaaattattgataattaattacttaattgcgaattaaaattatcaaagtctgaggctgtgtaaatttagtgactgctgattgtctgttattattcattttataatgcactgttacacaacacacttttggcggttaacgacggaccaacagataacacgcggattgattgtttattgttttatcattctctttttatcacatcttttggctattttctagttaaaaatgcggtg

SEQ ID NO: 6112 - DNA, 8201 bp, Heterodera glycines
  unsure (1)..(8201): unsure at all n locations
ccaataaaatgactcctaaaacgtcaggtatgtgattggtgacgcaaaattaaaataccttttcgagctcctctcggaaatattcagtgaacggacccattctaaaaatctttccatacatatagccagtaaatcaaaaattaaaataaaaaatgatcaaaaagtttattagaagtttaaaacataatcaattttttattaaaaacgtgtaaatatttttttaaaaacaaatgggaacgatcgaaattcttccaaagctttctcattctcagaaatgcttttggtgcatatatcctttagcgaagggacgcctatgttgagaagtttccacgcttcttgcatttcactgaaactattaatttattacaccttaaacccgaaacctaccggtcgacaatgctaaagaagccatctacaattaggctgaccggcgaaactagccattcacgaatactgaacaaatttacaatcgttttggaccgtagtttaacacggtacagagggcttagatagaactgcaacttattataaagatgttcaccttctcgaaaaaagtaaatggtaactgatacgtcgtcaatatatacaacaccgttaagatatagattataactccctatagtgtccttaacattacaacaacacattcgtacatttctttcataaatcagaaacgaaaaaacataaaataaccccaaacgatcgacccattccatataggggtaggcatcctcagtgtcaatataaactcctaaaaaattgttttccaatttggctaggcgctttttcaggctttctctatttccttccaaggttcctaaatagtaagattagaaataatggataaattatctataccttcctaaattcgttttgaaaatattttaacagggtatccgacatttaatacccgaataatgaatttaaaaaatatacgctatttaagataaatttcaagaaaaatctcagtagttttccgggtaaatagcccattagcacgaggaaataacaaaaaaaacaatacaaagatttatttggtgtatttatttattagtcttcaaaatttttcgtctaagtttcttcgccttatcctctatttgttgtctggtctactttttttcgaattctacaaaccaattttgtctaaatttccgacgctcatcgtaaacacgtatcacctcctcccataatttgtcttttgacatgctgtttaaataaaaattaaggaatacatgagaaaaatattttttatgaaaaaacaatttgtaaatgaaaaagagttgttctaaatatttaatcaaattatcgcaaaaataataccctcacacataggaaaattatcagaattataaaagctaaataaataaaaaccccaaatgttgttatcatatatttttcactattctgagctgcctcatattctccatcaagcgtataattgttgcaaagatacataaaacctggtattttatattgatttcgaaacattaaggtagaaagtaaaacgacacattgatttaagtaacgacaaaaagataatgtttattttactcaaaaatatccaaaaggcagtacgtttaaattggcatcaataatgcccttcttctgtatcggtttatagtctttcttaacctcacgattaatgattaaactgtcccggccgggccttaataaaagaaatttaattcagaaatttttttaacactacctaaaactgtccgggtatgtaaatttgaaattagctccgtctctatattttaaaatcattttcttaaaagtttcataatcaaatattattacgatccaaagttatcccgcgtattttggttttataccaaatttctccagtttcccgtcttttaatttcaatgcatactgtttaggaccacccgaaacatactcaataatatcggaatccgcatattctctagtcatttccccaaaaaattttccttctttaagaggacatgagttcggagggtgggcaataactaatgaatctgaacaaaataaaaatcaactaaatttgtatttttacataccggtatcgcaataaaaaagacgacagcccggcgtattaaataccctttccatatttttatataaaactaaacgtgcagcactagttgtcctaaaaataaaataaaacaccgtataatttacagtctcaccatagtgagggatgcgcactatgcccccagaccaactatgcaccgtttatcccggatggagtttgggagggaatggggaaaagccaaggcgcctttgaccaagccccgaacccccaaacgactcattgactgttaaagatgtctttattcattcgttgttggatttatacgaagcgagaaatcggaataataattgaagtctgttccatcattactgactgactgatcactggggaaggaaaaatgcgaagagaatgggcggagaaacattacaatgagaaaaggaaaaacgtgtgaaaatggataaatgtgattgaattgataatggccaataaggaataattaaatgagggaaatgcgtcgaataatacttacaacttcccccttcccttaggatcgtccccgatccttaaatgaaaaatgaagtgaaagtgaatgaatggaccaaactctcggattcgcccttcgtctctccaatccgaacttccacggccaagctgcgcattacaataatgagcagcggtccaccttcatctcagatggatggcatgggaaatcggagaaaagcaaccaggggtcattccggtttggggacgagatgtaaaagcatgatgagagaagagagagagaatgggtcagagaaagtgtgaggaaaccgacgcatttttaagaaatttgaattgggggaaagaaaggccattaatagttcggaaataaagacaaaatgaatgataattttaaaagaaatggatgacgagagagagtgagaaagagagagtcaaaacaaaaggaaaatggtaaaacgtgaggggaattgaatgaagagggaagcaggtccatgcgcagttgccgtccatggctgaagtcgtacagcttggctttcattcgtctgcgcgcaccaaaagttgaggctttgccacgagtgcgttcccgagtgccaccttgaggatgagatcagctgtccgtccttgtcgtaatagttgtcggggttgttgaactgctcgaagtcgaagtattccgggccgaccactgtcgtttccgttgtcgcttggtccaggtagcgccgccatgtctccgtccggttgagcagcagcaaatcgccgatgatgatcattccatggctggcgcgggagatggcgacatccacccgtgcggcatcagcccagaaaggctgagagtcggctccactgtcgaagacggagcatgttgtgacgacgacggcaagtgacgactcgtggccctgtgtcgcgtccgctgtcgtcactaaaatgtccgggatttcttgttgggccaccaaccgttcgatctccagggcttgggcggcgtagaagcaaatgcagcggatgagtttgccggggaaggcccgcgccaaacgccagagggctctcatcgctgtgtcggtttggcccggattggccgaagaggtggagacttcgtcgcgttgcgcgggcgtgttctgatggactaaaatgagggggactccctttttcggcaatttgaatgccgtttggtcggtcatgagcgcccgctcggagtcgtcgcgtcctggtgtcaactgcccgccgtgcggtttgtaaaaaccggcctccgtacagcggacgagagcagagtgtgagcgaaaacagaccgacaatgttgtgacgtccgtccctcgcgccacatccaggttctggatgaccgtgtccatgccgaagtcctcacggattgcgatcggcagggagggcaatccccaaacagtgccggaagttgctcacagaaggacaaggtggcgaagcacaagcggcgatttttgtgctcctgcacaattttcgccactgccatttcctgggccaggcgtgggttccgctcgcaggcgtccaggtaccgctccaccttgacgcgttcttgatccttctgcaggagttcctgaaagtcctgtgcctccaccgcggtggcgagcaggtgggggggaaatccgctcaacttccttggcatatctcaacttacctgtcccggagaacaaggcaagcattggttccacgtggtttccggcggccagggcatcctgcatctccagcaccagcttgacgacggcgacgttcggtggggccagcgccaacacacgtgccgtgggatccgtggccaggaccgtggccacgatcgacgccgcgctgaacgtcttgccggtgccgggcccggcctgttggaagaccaggcgcggcacctcgtcgagcatgcacagcgcggtgtcgatctgtctctctttcaattttgaaagagcaccaaaagtcattaatgggttattggcctttgggctttccggttttaccggtcggcccaataaaatcgacatgattcggcccacctttgcctcgtccttcgccactttcgagcagtcattggaccgcagcgtgaacatccgttcctgcagggccctgacggacgtctgcgggatgagttcaacgcatccgtcgagttcgccggtgcgcagctgatcgaattcctcctgggcatcctgctccttcgctgcctgataggaaaggatcacttttacatcgatctcgtatcctacacagaatgcccgcttttcgatgcttagcacatacccatgcgcacaaggctttgccttggctgccggattgactttgcaacccaccgccaaatcgacctcccagattttgcacaattcggtgagctcttcgatgctcggcaccggcatgacgaactggatgatcacgcttcttgtcgagatctcattgatgacgaccggttcgacgaacagagtgtgcttccgcagatcagccttcacatcgaacgactgcgctgcgacagccgccgccatgaccttctcacccagctggaccttcgcccagctcagttcggcactgaaagggaactcatagcccattggctcaggctcaacgccagcaatgacgtttgcgtgatgaacgagcagttcatcgcccctttttttaccaaaatcagatggcaaaacatacgcaaactgctgtgaatacagcacccatggcggactgttgatctgccgaagttgaagacgaacaacggagcggtagcggatgtcgttatccgtgaaatcggccgggaagtggcgacggtaggcgcgcatcacgcagctcagctcaggtgctgacaccatggccactttgacgtgtcggtcacgggctctttgcacatcgaccaaaatgccgacggccagagtggggatgcgctggcgcaattggctcacgtccgttgccgtagcttggtagttcagccgtccggttgcttcatacagccaatctccgcgctcttcccatcctgtttcgctcttcgtccactcacacttatgtaagcggaacaaatcgccgatttcgatcggctgggcgttgtcgaagaggctaaaagggacaaagaccaattctgggaaatcccagaaaagtttcatccgtgccgcgatcacaccgtcgcttctcacttgggcgaccagataggatttccccttatcttccttttcaactgctttatttcccgccctcaggctggggtttagttgcaaattgccaaatccaccgtctcctagcagttcaccctcactgccctcactttcttcctcctcttcaattccaccacttttcaccttttctttacccatttctccctttttccctttttctccgctcatttcatcgacttccatcacttccatttcttttgtgccagccttggcactttccattggcaccgggtcgggttgaaccgacttgagccccagcggatcactccgatccgccagcaccggcaccgtgagtggctcaattccactcgcattcaccattttttcaagcccgcaggcaagggttttggagacagaagagttggggcgatttgaaggaataggtttttgcatctaaacaaatgaaaaactgaaaaataaaaataaaaattgaaaaaagaaaatggaaaatggaaaaaatgaaaaataaggagcggaggaaaaatgagaatgaaggcaagaatggcttttctgacggatgagccggccttaataacgagggatccgagtggacgatgggcgggcgttacagcaaaaatgcaatttattttttcaaatgttacaacagcggcgagctaatggggaaaaaaggcaaaaacctttcctcccgaacggcaggggagagtcatcgccgcaaaaagctaatgtcgcgacgggagagcaaaaaaatgggggaggggacgggagatgaattgctttccgtcggctgccatgtttggcacgaagaaaaaaaaatggcaggacaaatgcaaaactttggacatatggaattaattaaagacgcagtcaaaagcggggaaattgcaaatttaaagaaaagaaaattcaaacattaatttcaattgaatcgggttcaattgaccacaaatatgcgcgaattacacaaaaggaaatgccggcaagagtaaaaatgatgccgccaattgtccaagcattttccgaaaaaaatgaggaccaactttgagggacaatttttggcttaaggtgtccacaagtccatcccaaagttgtattcctttcttcggttggaaatattaaattagtcggctggcatggatgggcacaaaaatggtcacaaatttctttatccactgaaattcctttaatttgcttttcttgaggggactctacaatttgggcgttcgaactcaatatcagcaaaattataagcaatcttttgcaagaaattcttttgtccggcccgcaggcatgggaaatgagtaaagaaagatttttggtttttggcattttaatctgaattttgcggttggtctaaaaaaataaatatttcaggaattattcggaatgaattttggtctctggagacgatgattgccaaaattaagggccggtgcaaaatgtgacattagcaaacaccggcacattgataatttgtgcaaagggagaaaaagtcagggaaaatggtgcaagagaaaaaaaggaattctttggccttgaaggggggaaaaaaaaggaattggatgtgcaaaaagaacggcgccttccaccaaaatcccatgggagatgaatggcaacaaaaagaaaattgccttaaaaaccgaaaaaggaaacaaatgggccaaagaatgccaattcgaaccgaaaagggaagtaatggagttttttttttttttaaatcaattcatctgcgttttggtgattgttgcaagtccatggcggcacataggtaacggtatgatagtcgaaccaattcaacgaaatttgtgtgaaatgtggccagttattgttagggtcaagtgtaattgtcgtcacataacttggtgtactttggaagactaattgatccgattctaagcttagattttttcggtccaatagctcatttcgttcgcccaaaatgtccggttgtaccagtgcccacagtatggggtgtgagatgaacacaacccccaaaactgagctttcaattggcgatggaccagttggcggcggtgaggtgtccgcaaatattttctcaatgtcccttagactggctagtttttcagaatccatcaattccagattttcaaacaaattcatgaaattaacagaattttcgtcatcctctctttttattaactcatttccatttccggccatattttctgtttcttgcccgcgggcgaaggagttaaaagaattgttggaattaatttttgttaaatcttaagagagaaggaagacaagaatattcgtaaaatgagcaaggtgaaaaacagaaaatgaatggctatggagagaaagatttattgaccgatgggtgcgagaaggcggggcaatgtacaagcgcctgctttaaactaaggggctgatgttagcataaatgagtacaagaggtaacgtaagagagacatgcagtgtgacaaaagaaaaaaattaaataataagagaaaattaaattgatcgaatgttgacaagatatatagttttgattanattgaacgaatttcctgacaaaatatgtacacaaaaggaaaccaaaatttaaatgccaaaag

SEQ ID NO: 6113 - DNA, 2490 bp, Heterodera glycines
aaaatttttttcaattaatttaatcccaaaaatgtcttcccagcccattagcactaatggcttttggtcagaggcgtcatatccccccccccccccaaagtgctaatgcctaaagcattcacaaattaccgaaaaaggaggcaatttttgaagagagtttattaagaaaatcgagagggaaaaatgaaaataaaaaaaaattctttttaaatttgtcatacaatttaaatgcagctattaattaaggtttttgaacattcttcagttttacaaattcacaaaattatttaaaaatatcatttcggaaaaaataacaatatttaaattattattgaatttttatttcctgaattttatggtttgactggagcaattataaaagcaaaaaaataattaaaaaataaattttataattaaaaaaaataaataaatttagcatcacactgaagaagccgatgacatgttggtgttgaacgaacttcatcgacgcgacggactgatcggagaagaagcggaggaggaagaggatgaagacgaaggaggaggaggagacgttgatcagtctgcggatgagatcgaatttgggcatgtcgcggcacggagattagcggcgaaagcaaaaaacgcggcaatgatcaaagggtgggtgtgggctattcggctgatcgatatttattgattgattggtgagtgatcggtcaagctaatgattggttgattaattgactggttgatatctgttcacattcgctggatgatgagctgatcacgatttatccaaatctcagtttttgttcccatttcagaaggtctgtgttcaacacaaacagacggaggagcacattgaacggaacgaacgcattaagcggtgaatttccgactaattaaaatttaattttaccgatttttcaattttttgagactccgatgaggtggacagcgaagtggaaggccgagtgttggccatcaattttggccgcaaggaataccgcgagttggagcaggtggccaaaccgggcgggggcatggcatttggaattgaagggcggcatggcaatcggagtcttttatccgatcacaaacaattggcttagcttcctgatcagtgattgcacaaataaaataaccacccaatatcaattagttttgctaactgatcttgaagaaatttatttctgtccaattttgaaattaaattttcaaaaaaatggggacttacatcgaaccttagccgaggggtaattaattatcagggttcttctgggttcgtatttacgatttgcgactcggtaaatttctcgagttttcgcttcacgatcccgactcctgtgttcatttcccggggtcatttttcctcaaaattctcgggtaaacgaatttaccgcaatgcccacgtaattttcggggacggagacggtcccaaaaaaatcgggggcctcagagttttggggaaacgcataatttttccatttttatagcttcatttcgagggccaaactggcgaagtgtggcgagtggtgaaaaagcatttgggaaatgaagcgtaaatatattttttggaaatttttttaccattaaaaactaaattttagcctcataaaatacatttacgcttaccgacaagctcaggtaaaaaaacggaaattaaaaaaaattaattgaattaaataagtttaataagtttaattaaagagccgattgacatcggcattcagtgccatcgaagcaaatgacatgcgcaaaatgaaaagtttggtggacgatgagattgtacagtcgcgcgactcaaggggtacggtaatgtaacaaacagacaaatatactgtattattaaaagcaattaaaaaaaaaatttgatttcaattttcaatttaaattcaggcctgacacctttgcatgtcgctgttttaaaggtgaaaaatcattcgaactgctcggcaacgagaattgattgatcattaccaaagtttacagaaaaactcgatgtttcttcgaatcgataccgagactttttaatttaaaaatttgtaaaagaaaaagtgtaaaaaaaaaatttaaaaaaaaaattctcggagtttttttaggaaaactaaaaaaattcaaaaaaaatgcaaaaatctttgtaaaaaatgaaaaaatattttttaaagcccaaaatccacaaaaaatattattgtcaattacatactttttaagatttccctaagcaatcatttatttttaaaatatttgtttgcttttaaaacaaatttcaaaaaatccagttttccaggccttgacaagcctggattttttctggacctgggttttcatgaatgtttgtccagaaaatccaggtccaggttacaaaatgtcgagccttgtcacaattaattaattacctaattgcttcaggaacggcaccaaatggtcgaatatattggccaaacgtttgctgacttcatcaacataggtgaccatgtaaaaaaagaagaagacattatgccaaca

SEQ ID NO: 6114 - DNA, 1522 bp, Heterodera glycines
cccgggtaggaaaaaattgaattcaaatttaaaaaatataatttttttttaaataggatgaatttttaaatttttactaaaaaaaattggttggcttaaaattgatacgatcaaataagcggttataaaaagattttttaaattaaatttaaaatttaaaataaaaatattaaaaacttaaattttgaaactttttttgctaatttaaacctaaagaaatttacttagaaattgttaatttttcatttacacatacataaattaacattatttttgatctagtgacgagaaaaaacatagtaacttaatcagattatgaaaaacactcaaatcccaaaaatgtaaaattttttttaatataaataagaatttatttaaaaattcaaaaagacacaaaagaaaattaattggtaaaacataaatggtaaaggaagtaaaatttaaagccttaatttttcaaatattccattaaaattcaaaaaataataattggcctagaaaaaaaaagaattaaaaataaattatgcaaatttcactcatttcattacggaaggattatttgccaatgtctgtcatccgtcgtcgtccggaagcaaattttaatgatttcattttacggcacatttttttcctctggtgtcaaaacaattcgcgcacttttacacctcattagcggcttcgtcggccaccactgccctcggcagtgggtaattagcgctcttttatttcgcgccgtttcttttttttggtctgtcaatccgctgacggcggcacgacctttgttcaagaaatgcttgtgaaaaattatgtagttaaatgttcacactcccaaaaaatgtacaaattttggttgaacacaatgccaaaaagtgcgcgaattcgaaacggtgccgcgtcggccatccaattgttgcatgccgcgcgcgcgttcagctcgcaacccgactcgccaacctctgtcctcaccttttcggatgaagcctttttggtacaacatacacacttcattctcattcattcatttaataattggtgcaaaaaaagaacggcttaaccgttaaatgtactactgtataattcattggggttgggattcttactgtaactgtttttctcatactcacaatcaacaacaatttcgagattgggtttttatggcataatggcgatatatctcgtaaattttggaaattatgtagaggaaagtgccaccagaaaatgcgtcgaggaacactgtaatagcgaattctgtccgtgctaccgtaactcatttttcaaaaaattctgattcgattgacacattttccggacacggaggcaaattgcgtccccctcccgccccgcgccgacagattaaaattgaagatttttaattaatttttttaaattcaaaaatatattttttgaaatttttcgggggaaatgatacggggggtaggggtaaccagcgggggggggggatgagtctcgggattattaactccctattgtacgagcggtgtcaatcacactattagggctt

SEQ ID NO: 6115 - DNA, 3545 bp, Heterodera glycines
cccccccccctttctctagggcatacagtagtacctgggttagactttctactgtgttacggtaagatttttcaaatttgaggacggcaaagtgaagcgaagtgacacgcgagaagaagccgatgtttatgaggaggaggaggccaagtggggggaagagaaagattttttgcaactgtcaaccaacggacattttgaagaaatgggtaatggcgttttgatgaaatgggtagataatttgtagaaataggtaatggcactttgaagaaatgggtaatggcattttgatgaaatgggtagataatttgtagaaataggtaatggcactttgaagaaatgggtaatggcattttgatgaaatgggtagataatttgtagaaataggtaaaggcactttgaagaaatgggtaatggcattttgaagaaatgggtagataatttgtagaaataggtaaaggcactttgaagaaatgggtaatggcattttgaagaaatgggtagggatggcattttgaacaaatgggtagggcattttgaagaaatggatcaattgaacaaatgggtagggttggcattttgaagaaatgggtgcccaaatgggtacggaattttgatgggtagggccgggggtaggaaactgtcgtaaatttaaaatttggaatttgttggcttaggaaagcccaacaaagtcaagaacatcccctgttttatggttttaaaatttaaataataaataaactcttttacatttggcgtattgtcattcaggtttcaatgcaaaatttgtgaatttaatattttctaaccaaatttaaattatttttttatatcaaaatttaatttaaaataaaacttaaaataatttttaaaatttttatcttaatttatcaattttattaattaatttggaaatttattaccgaaatttacaaaaaataatatttaaaattttctttcaattttttttttctcgccacagatgcgccttcggacgagcaggtgaagcgatggctgaccattggcgaagtgtcacagcttgaacaaattgtgctcgacggacgtgcccatcttttggccgacaaaacgtcaaccaatttggcatccgccgaatttttgcagggggttcggaaaattcgaggaaattttctttttccaatttcgtaatttttttctaggtatcccaataccaatccaaaattgatgccatccacaagggtaagtgccatgtgaaattcagtgatgtcgccggcattttaacctatttttcaaaaaaatttaaaaattgtatttccaagtaaccccctgggttttcaattttctgacgacccatggctgttcgtggcttcgaattttttttttttatcattttctgccaattttttcacatatcctctcacaaaaacaaaattcctaaggaaatactccaaaattatttcactcgattaccatacgatacccgtgagtaattaattaattacatgtcctcattaccgtatccagctgttgaggagggcgatgttcgccgtgtcaaatcgttgattgaccgcaattcgttggcaaccgcccgggacacacatggtcaggcaaaagaaaatcaagattttatattttatatatttctatccccctaggaatttaaatttttaaaaattctcaaatttcaggggcttaatggctaaattttagactggcatatattttgcgggaattttcaaaaaagcctaattttcaccaaaattcaggcatgacccctctgcacaaggcgctcctttacggtcagacaaatacggtatttgtatagaacaaaaaatgcaaaaaaaaaaaaaaaaaaaaattgaaacggtttttcattattttttgtaggtgcgctttctgttggcgaaatatgcgcactgtgtcaacgaagctgatcatgttataattttggataataatttattaagaaataaactaatataaattaatttttatttttaattaaattcatattaaagttatttacaaagaatttttgtcctgaatttatttaattattttaaaatatatctatttattaattaaaaaattaaacaaaattaatttacgaaaaaacaatatttaattaattaattgattagttgtaatctaattatacatattataaaggaatattcaaattttaggccggtcgtactgcgcttcattacgcagcagctgatgcaaatggggagcatatgattaaagtaaaaaatattttaaatgaaaattgaaaattttaattggaaaaaatatcgaaaacttaaataattaaaaataaattttaattaaattcaaaaaataaatataaaaaataataataattgttaggtgcttcaaaaggccgggggagatgcattcattgaggaccgatatgggcacacgccatttttctaccgaacgcacggcaaaaggctgaacattcgaacactgaaagacaatgcggtgagatcaaaggaatgaaaatgataaaaaggacgggggacgagtgatcggagtgatcaattggagtaacgaacaatcgataattttttgtaggggaggtgagtattttgtaataaatgatcgaactgatcaaagggattaatcaaattggaaaaggtgaacagattgatcaaagggagtaagcgagttcgaatgatcggacaaataagaaggataagaggaattaagcaattgtaaaaagtgatcagagtgacgaaaggaataggcaaattgttgcgagtttgaaaagtgattggactgagaagcaggttaatagggatttagcaaattgttgcgagtttgaaaaggggccggattgatcaggcgctagcaaaatgattaaactgatcagagggatagggttttaaaaaaaaattgatttactcatctggttccaaaaaagaatcaaagctccaaaggtgatcaaccatctgatcgccggccaattgaaccgcactctgttgcaagacttggaggaggacatcaccgattgggtacacacgggcaacatcggcaagctggaggagctggtgctgaacgggtacgccgacctgttgcttggccgaaaccatcaagtgaaccaataattatcataacagatcaattaatcaattaaggcatcaattaatcaattatttgcccatcaaaaaaccaattagtaatcaattggagcgtcaatcaattagcccaaattatcggcatcattaatttataattagtccataaaaagtcaattagtaatcaattggaacattaatcaattagccccaaattacaagcaattaggcatcatttaatttttcaggttgaggatgccgaggccatcagtttcttggaagtgttgccacaataccaggccaaaatacacgccatccacaaggccattgagcagggcaatctcagagcagtcaaactgttgactgaccgcaaaaagttggcattgtgccgtgacggccggggattggtcagttctagagaatactcttcgactgaccctgctgatcagctccccgtaattctgtctgattttttttccagttggcaaa

SEQ ID NO: 6116 - DNA, 7263 bp, Heterodera glycines
agttgcctcgtgaccagcaatcaatggaaatttgacattcgggtctttcccactgcacacctaaaattaaaaagtataattaaatttttattaattatataattaatttttttaattaagaaaaaatcatttttgtcaaaggaaattgaaatattttaatttaaaaactgttattaggaatataaaatttcgttctaatttttacggtattgtgaaaattaaaaaggaatttttgcattttagttaaatttttctttttaaaaatgtcacttttttgcattttatttttacctaattagaaccaatgacgtgtttattaaaatacatatttcaactgatttatataaataaaattattacaaaaatatcagtatggcatatgccagtgaagagaatctaaaaataaaaatatttaatttttttattaaaatgtgttttttttcaaatgtcccttacctttacgcgcacttcaccttcttttggcggactcacttcaatttgttcaataactaatggcttatttggctcccatgcaacggcggcacgacaacaaattacctggccaatattttcatatttaacaaaaataaataaaaatatagaataaatattttattaaaccttaaaattaaattaaataatataactaaattataaattaaactttaatcaaataaattacctttccttcagtttccatgaacaacagagctgggaaaaaattatttgctttattgtaaaaattacaacgaacagaaaagttaaaaaagttttgtttctataaatatattttataatgctgatttctgttaaaacattatgataatttaaaaaagtggactggtttaaatatattctaaaaatttatttattcgtaatttaaattcaaatatttattattgttcatttttcaacacagaaatgtaattggattaaatattatattcttctttttgtccttttaaacaaaacaattgatgctataatccaattcaaaaaatcctataatttaatttgtgagtgcctttaacaaacataaaaaaacaaaataatcaacttaaagagaaaaaaaattccgtcataaaattacattaaaaagatttatttgtgtaaaatataaattaaatgtttcgtttatatcaaaaaacaaactttaattacaaacaaaatataattgatggacgaaaagaagacttaaatatataaaagtcgatattattttgaagccacttttgtttttaaacgaagcgacaaataaaagttgatcaaatttctaaagtgttcgaatgagcaattgtcccgtgttgaatgattgatatatttgtgtggatcaatagaacatttttattaaagccttcacttttcataaaaattttggaaaatatgaaaaaaagtattgtaaaagttatttaaaatcatcaaacataatttaaaaaaattgtttaggttaaaataaaaataatgtgacttttgaattttttttaataaaatacgtctcacatgaaagaatttcatttaaaaattttatcaattgatgtgttaatccattcattaatttaaattattatttctccaatagatttttcgatcattaataaataattataacgattttaatcaaagtaaattttaatggaacttcctgtattaaattatctttttgaactttaagtagtcagtcaattcataatcaattttgtaaaatctttattaaatgcttcataaaatcttaaacatttataaagcatcaaaaattaaacattttctattttattattttataaattgacggatgctaaatctttattaacgtgaataaatgaattaatatgaatatctaatcactttattacacaaattagatatttttgagaatatatatatgatgagtcaatgaatgtttggatgacattttcttgatattggtagtaacatttaacagaatgacatttttgttcccatacacacaaattttttcttaacctttttcatcttttaaggccaatgcaaatgaaatttgctatgcacaattacaatattcctttaatttatttattaataatttcaaatatgaattaattatttggaagtatctcggaattgatattagtttagcagtcattcataatttgtcagatcttgtttttaggtcaagggcaaaaaaggaaaattaaagcaaataccatcgcagattcaagagtcaatcaaaagtgtaattattcaattcgtaaatttttttaacctaacaaattgcatgtcttaatatccatcttttttgaataaatttgtatatgggatttaaaaaaatgatttataaaataataataattatagatttttgtttcattaatgttcacgaagaatttctttttgtcagtgcttattttgttggtgcttataggtgtgaagaatgtgagtctgttataaataataattatttcattcaacattaattaataccaccttaaacagtgtgccgcatatggaagccgtaaagcgtcggcatttgtgccggaaaagggctttctcgcttttgagctcattaagcacagaagcaacgatgcggcaaccgactcacaaaaagcgccttacacagttagcaatgatccatgcggaattaagctgggcccaacttttagagtaatttataactaattaattgaccatttaccttgataatttaccaattgcggctttatcttctttaaatgattaatatatatttgatttaggttgaacatgggcatgaggtgatggtcttgcacggaccgggtcagtttagtctggccggtttagtctggtcgttttagtctggccgttttaggctggccagtttagtcagagggtcggttttagtctggcaagctgtttttgcccataactcttaaaatgtttttttttgtcaattataaacaaggaaaaacttaaaatatctatgtttagctacaatataaatgaatatcccaattagaaaataaaaacaaagcgaaaccttcagtttggcaccgcctttttatagcttcaggcaaagtaaaccctaatttttttcacgttttttctccatagaaggcttcaacgggcttttgcttgtttatatccaactgttttccgcttcatcaacacaattcgatatgagaaaagtcaattgatgcagacatcgcacgatgcatcgctggtgaagtccctcctcaaaaaacgcgaaaatatcgtgccgttgatacgaattcttcgactcttacagggttacaataccatcaactaaaacggccagactaaaccgacccccaccgggtcttgcaccaatggccatttatggcttatgtgtcgatcgcctgtaccgtcaatggccacaagcggacaatacagtactgtggaggactacggcagcacattgtaccgacgtcaatgtaacactgtttgttgagaacaaatgcgccgaaacaaatcaatttcttatggatctacgtttgcgttataaaccggaagaaatgtatggcagtttcagtaaagttttaaaacttgaattattaaattattctgataaagcgaaaaatacacgccaaagaatcgagtttttttgggaattaattaaatacaccttaaaaatcgaaaaattttgaaatttttgtaagaaattttgaaaaaaaattgttgatataaaaaatgtaattttgtttagcatttaaaaaaaatcgaaattgcatatacaaattttgaaaatcaagttttttgaaattgtctaaaaaagcttatgcatttttttttgatggttaaagccatttttttgcagtttttaaggcatattttactgcatatttgggtattgttcgggttttcagggcattttgaggggttttattttatattttatgcacatatttggcactttttagggcatagaacttaaccctaattatcaccttttccttcatttaggcatgaagtcatgcacgattttgtgttgccagtcaaagcatccgagatgcaagtgaccgttgggagcaaagacataacaaaagggactgttcacgaggtggcacggataaaacgacacgaattctacagactgacttcatcagcaaatgacattactttattagaagtacagttttaaatttttaaaaattaatgaatttaaatgaattttatttgtttagctaaaagatgttttggaatttggcccacaaattaacagaatttgtcttccaaataaataaccacggagtggaacgacagcaacaatcatcggctggggaaagacaaaactaagtaaatttggattatttttttctaaatattttgtttaaaaaagaatgctctaaaatttttctgcctaaaatttttattttcttagacaatatgtcggcacacgcggagctgatcgattcgaagatattacgacaggatttggtccatttgtctccggtgtgtccacaaggatttttctgtcagtttagtgccatccataagacgtctcatgtaagctatttatttgttttataaaatattctataaaatacatattctcgaagacttttttagcatttctttaattttcgtatatattacttttgaattttttaattgaaagcttgttttaatagtaaataataacccatgttttttcatcacaaatcaatgattttatacagtaaccaaaagaaatcaaaatattatttataaccaaaaaaagtagaattaaatttatttttgtttgagggagacagcggttcaccattgttacgcgaaattgggggcagtttgtatgcaattggaattgtacggggccatgagtcgaagaaaagtaagtgcggaaattgatttaaattgaaatttttattgacaaatttttaattatccttcaaatccaatataaattctcaaatatggaaagcatatcttaactgtgatattttagatttgttcgcaaaaatcagcccatattgtgattggttgaaagaaaaaagccgtggagaagtccgttgcagctgaatattgaatgttttttgctgtgaatatgaagatgcaagacgaacagtccggaaaaccaacattcatatttttcagcgctaaaatcataaaaaaacttgtgtcgtaaaaattcttatattttatgaaataaagactgcatccgactgaaatttaaattaattaaccgtatttaataatttatatattttttacccatcttgcgccttttttaactgataagcgtatttttccactataaatggtgcgtctttgagctgaaaagccattagaaaagcgtcatattagaacgcttccaaatggtcaaaatttattttgtcattaaaatttgaatcagaattggtgtttgtgctgatgatcaaatcacaaatttcgtttcaattaattactcgaattcatgttcatttggtagtaattcatttttaatttgttttcaattaaattgccgtcttaaagcttaatctgttggttcattaattgcttcatttaatattccatcacaaaatttaatctaataattttctcgaaatcaaattttatttgttacgccatcaacataataaaaaagtgcaatcagatgccgaaccaatttggatgaaaaacatttgcgaagcttcgatcagtgatcacctagtcatataaattcactaatttcattttttcatttacaaataaattgcttttttttaatttttaaatttaaaacgagctggctaaaattatttgctttaatttttgaaattgaaaaaaacacataattgttaaaaaaacaaaactttgtttcaaataaaaatatttttgtaatgttgattttaaaataatgataatttaaaaaattgggtcgctttaaatatagaaaaggggcttcattattaaaactagagtgcagcggtcctccgaggtcccggttcccgggttttgaaaatctcaggtcccggtcccggtagggcaaccgggaaccgggaaaaacaagcactggtaataatgggggtttgagaaaaaaattagtgatgcaaattggagttagaggaaaaaatataaaaataataattaatatattcttttaaagtaacactgccaatcgaatcttcttgattttctacttctttcccatggttcaatccctctacagaaattaaaatattttgatatgggtttgctattgacaaaatatgactcctcgtagttttttttaatgcaccatttttaattgtagcaattaaaagcagtttctcacggacctccgtttgttgtactttttactgatcaaaccttcaatggttctccaatcgctgcttggtttggccatgcaattgctggaattaggcaaataatcttatgaacataaagctgcaaaaataaataaaaaggcgttttgctctgtttcaattgtagaggaaatacattaatttattagaattgctgaaaatttaaatgaaaattattaatttaatacaaaaaaatatataaagctcaaaaaatgccaaaacagacaaaaaataaccattagacaaaaagaatatagacgaaatcccaaggcaagattctgtggattttgatgtgggtcgaagagaatttcccttccacctttgagggaattttgttattgaaaattttttttgatattaatgaaatttaaattatttttcttagattaaaattcgaaattttagttccaaatgaatattttatggctgcaaatgagtgattactaaaatttgatttggcaaggcttaattaaattttctcagtaattcagtaattagctttcctatctcattaaaaaaaaattttttgttcataataactcatttaggtgaggcccggtttatatatatatatatattttttttttaacttttgatagatttttagcccatataacacaaaccgagttggaccacagacagcagcaatatggacacataagcagtacaaatcgaaatttttgaacctaaatccggaggtggtcccggatttcggaaattcgtatttttcggggctgtaatttttatgagccactgaattctggaaatacagacaaaattttgtaaatttttaaaaatgaattaatgtatttgttatttaataaaatgaataatttaatcaactacaataatttcatcagtgtgaccgaaatgtgacggcaatttgaaaaaaagtgatgaacagaaattcagaaatttttaaaattaataacacagcatatctctaaatagatgtatgcattgtctaaacaaaatttgtaatttaaaaattcgtatttttatgaat

SEQ ID NO: 6117 - DNA, 4738 bp, Heterodera glycines
tgcttggccgaggctttctttcccgagaataattcacctgcagcatatgaagggcaaagttttattgtgagaaaattggtggactgattgattttttgtggaaaagccaccaattagtgcaacaataagcagcagcggaagataattggaaagttcgtccacaacttcaatttgttcctccgatgggctccgatcccccggccgcggtcacttcctttccctccgccggttcggcaacctttccgtcgcttcacaatgcccgccacaattgcatctccacgtgccactacccttgtcattctgccggtgcctttttgggtgttcttttgtgtctaaataccaaaccgttcagtgccctcctcctccttttcctcctcctcccatccgcccgtttccaacgggtgccattctctttgctcctcaaattctgtccagacgcaggcccaaacggagtttcaacgcattcaagcagcttctctgcgatcgacgcacgaccaaatggtacgaatgaattggaaatcgccggggaagtccttcttttcagagggcgtgtattagcattgatttgttagtcgcgtgccaaagggaagtgaactttttgcgaatgatcgacaggtgagggacaaattggacggggggggggggaaatcgcagggaaaaaacgaacaaatcgaacggacggaggaaacttttcactaaggaaagcgccggtgctttacgaaaaagtcgttgtggagaatgccatccgacgatatgagatgtgttggttgccggcacaagtgagacggagcaaatcacttgctaattaaggggagaggccattgattaatgggattttattgaattgcgagggtttccccacaaattatggaaaagccaaagagaaaaaatgacaaaaaagtgaaaataataaggcacaaatccaattcaggctgcaaagccaaatctgcacaacattccgccgttggatgtgagaatttgaagagtttgtgaaaatgaatgactttcccttaaggtccattggatttggcacacccacgtccgttgcttttcctaatgattcaaatttgctgcgctttcagatgctttccccaacgcattaccgcgaagattgtttggccatctgtgggacagtggtcgaccacaaattgctaaatgcggacgaaatccagcagagatatgagcaggtgactggcaatttgtgccaatttccgctgccattttctcttcgtccccttggctttctcctctctcaattcgttggtgtctttggcttcggcatttgcccccccccccgccttcgatttgttcgtctgctcatcccctctttcctgctcagtcggtgtcctcgtggagcgaattctgtccggaagaaccgtacgactttctgcaaagtaacgaccgcgtccgcgagcagtaccaacaaaaaagcaaatacaacttggcggaagcggtgcaacgacagcgcaacttcaactaccaagtgggtggtgcggtgtttgttggtcgccgtccaaactccgtcccttggcacaggtgtctttgccccatttcaccgccccgcgctttctgaccgatgccatcgatcgctacatcaaattcctgcagctgaagcagacatacgccgaccattttctgacgccatgttacgacttcgacttggtgtggcacactcaccaagtgcacccgttggactaccacagagactggtcggactttgcttgttttgccaacatcgctaaatccaaatttagcgtggccattttcggggcggtgcttaaacacgacggtgagtcactcggaagtcaccaaagtacaattactgtgaaaagattccgtcaacgaccgatccaaaggcagcaaattgttgaaaggtaaaagaacgagcgaaggaatgatgagagaagaaaagcatttaaaggcgaaacgatgacgaaaaaggcatggaacacgcacttcaaagagagcttttggagacgcggatgcatgtacaggtggggacggagagaagaagcgaatccaatgcaaatgagagagagagagagacccatttgctaatgggactcggctaattgaatttgatccacagaggacacgtggcaccggcttttttggggtttgagtcccaagacaatgcggtaaaaacaaagggttaaccttttgttgaatgacacccattaagacgattacatatgggcacattcacattccttcgatagcactgaaagagattccggtgcagagagagcaacttcggatgaagctcaattacggaggtgagcaaaaaggaatttgtgaagagtgattattaattggggggggggggtaattaattaatgggcgcaccgaagggaaactgaaaaagaaatggcaccctcaggcaagaagatcatcactttcaacgccgacttgtgcgacaagccggtcagagatgcgtttgcggttgcgttagcttttccttggcaggtcactcgttcctccttttccctcgtttggcaaccgaatgccaccgccaattcggcgtcgcccaccgacgcccatccgccccagcagcagaacgggtgctcgtccggctcttcctccgccacttcctccggctcttccgcttcttccgtccccctcacttccatcgtcaaatttcccttcgagcgcaaaacaccggtgccttttgctcttcaatttgctctatttcgaagcatttcagcacgaccttctcatctcgttggacctgtggaatcgaactttgatacacaagcgtgacgtcgtccgacttttggtttgatcacccaaaagcccaaaacattggttggtctttcttttcatagggccgtcttccgctcgaacggttattgccctcggaaaatacgaagccccagcagcgagtggtccaagcttatttagaaagtgttaacagtgccatcgccacagaaggcgaatttcgagctcgggtgaacgtgactgccaggcaagtcgaacgtcgcctggggcatttaattccctcgccaattccccgagacaattcgcccgcccgctcaaattgtcacagggaaaaacggcacttagtacttagtttatatataataagcgaaagcctctccctcccttaagcgtctcgctgaatcgggagcttgagttgttggccggtgattacgtcgagcagagtttgcagcccgactcgcgactttgggccctttgccaaagcgcggcacttaacagaagccaattgcatccgggcgtccatgtttttacggccattcacacgtcaattgggggagggttgggaacggacaaaacgaaacgcaattggctatttcagactcgtggatgtgagagacggcaccaaatatttcgcacaaattgtgcactcggcgccactgcttctgtccatgatcctcatttttggcacggaacaaagtcagctgtttgtcactaggcttaaactggcgatcgatttaggactgctgagcatggctcatctgatcggagccgactctttgccctccaaggaacagttggactccaatttggtttggtctcccaacactcggcgaagggcacttctcacggcctttcctattagcaatttcttcctcatttgtcttcgcccgatgagcgagtgcttctggtgctgaaccgggagggcgacttcggcatccttaaaggacggtggcacggcttcgtgcgacgacagacgggcgacaaacgcagaaaagtcggggaattgcggtgggggcgaacgaaatccgaaacttaggggaaaagcggaagtgcgggcgtactcaacgtggagctgttcaacctgctcaagtcggccaaggagagaaccttttgactgtttccccattcagaaacaccgtgcagaaattccaagtcccaaattcggacggtaagcattggaatttcggaatttgctaattgcccttttaaggctccactctctttacaatcgggggtttcgtttgcttgtgaagcgtcccaaactgctcaattttcagatgcccaagcgcgccttaacggacgccgaatggtttttctgtttctttgaccatcaaatttttaattctctaaagcattgtcgcaccactcaaacttcggaatatttgagttgcattttcggcatcggcactctgttcattctttgcaacccggacaaagttcgagctcggtctgagtcaacgacacctgtcagccatcaagtaaaagggctgaatcagtaaaacgaaacccaggcctaaattaagtgtcagaaatggccgatgacattggcgtgtggttacggtaatttttatggactttttgaattggcgttcccgaaggcaaagctacgccgaggaacgaatccgcgttttaagagtcaccaaaccgaacgaaggaatcattgacccaaaaccttaatacctttgaggccgtcccgtgccgtcaaatcgaattttggctgcgcaacgctaccaacaaaacttcacttcagccgaagttgcccctatgcttttgatgatgaatgccatgactgacggcactttctccggctgtgacggggccgcaagttgcggtagtgtcacagatattgccaattgttgacatgaaccccttgaacttcttgaaccgaccaaaaccaattccctttaatagtcttcggcaaatgtctttcgctagaggctcccccccccccccctatagctcattgtcagatttattggatgacactgaagctgaagcaacgtaaacaatgatttatcca

SEQ ID NO: 6118 - DNA, 1685 bp, Heterodera glycines
ataaacaaacattaggatgcacatctatttcctttatcatctaagccttgaaacctcccaagaaggaagtcaccaaattcttgagtttttcgtcagtcgcggttgtgagttggccttcttctcggatgacctaaagagagagagtatttccctgggaatactttattagaataccttcagcaattcctgctcatgcgctcgaatgtgcgcaaggaattcacgctcgaagcgcgtgatttgagacgggtcgattttgtccaaatgtcccttcacgccggcgtagataaccgccacttgctcctcaatcgccatcggcacgtactgaccctgcttgagcagctcagtaagacgaactcctcggttcaacaactgctgcgtggaggcatccaagtcggatccgaactgggcaaaggctgccacttcgcggtattgagcaagctcgagcttcatcgaaccggcgacctaatcattcatttgtactataaataaaaaaatagtcgagaaataacctgcttcatcgactttgtctgtgctgcggaacccacacgtgacacggaaagcccaacgttaatcgcaggacgaactcccttgtagaacaactcggtttcaaggaagatttggccatcggtgatggagataacgtttgtaggaatgtaggcggacacatcccctgcctgtgtctcaatgatcggcagagcggtcattgagccgccgccatgagtctcattcattttggccgcacgttcgagcagacgcgagtggaggtagaagacatcacctttatacagatcgataccatcaacgtaccaacagaataatacctgggtaagcttcacgaccgggtggacggcgcaacagcagagacatttgacggtaagcgaccgcttgtttggagagatcgtcgtagataatcaacgcgtgtttgccgttatcgcgaaaaaactcgcccatggcggcgccagaatagggggccaaaaactgcagcggcgcagcatccgaagcagtggcggaaacgatgattgtgtacctttcatttaatacatatatttaattacgatgaaaagcaacttcattgcgtccgtgtcagtgagtcgtttcacaatttgtgccaccgtcgatcgcttctggccaatggcaacgtaaatgcagtacaatttcttcttttcttctgtgcttgagttgaaacgcttttgattgattatggtgtcgatggcaatggcagttttccttaatttcacgtaaaaccgagtgaatgtgtggataccactaacccagtctgacggtctccgatgatcaattcacgctgtccacggccaatgggcactaatgagtctaccgcctttacccccgtcaacattggctctcgcacaccaacacgcggaatgattcccggcgctttgacttcaacacgagagcgtttgctgacattgattggaccttttccgtcgatgggattgcccaacgcgtcaacgacacgtccaagcaaagcctcgccaacgccgacatcgacaattgaacctgttcgctttaccacgtcaccttccttgatcactttatcatttccaaagacgaccacaccaacgttgtcagtttccaaattaagtgccattccctaaaaaaaacaatgataaacaactaatgctctaattgtaagattcttgacctattcaactttttaattgaaa

SEQ ID NO: 6119 - DNA, 1355 bp, Heterodera glycines
caaaagcatttcgtaaaatgtttagtttttctcggaaacaattggtgtaaaaccgaatattcagaatatgagttcgaaaagaagtcaagagaattggcgaataaaagcagtactaacaaatgtcaacaaaccttcattccagagtcaaactcaaccatttcttctgcctgaatgttcttaagcccataaacacgtgcgattccatctccaattgaaagaactcttccagtttcctccaaattgatttgtgacgcctgtccaagaattttctcctccaaaatcctggaaacttcagcacttgacgcagacaaacgagccgaagttgagaaagcagtctgaagaaaggaaaatagctgaataaatattaacagacaaccaacctttggagatttgttcaagatagactggaaaagtttttttgagagcattgttgatcagagaatatatccgtaacgactaaaaatatatatataaacatagtaaatttcgagaaaagattaaattagattaatgtaattctcattttggctttattttactttaggcatccaatcaatgaccactctcagtttcttaggttataattttcttacttggtcaatgcctacaattttggtatcaaacgaaagcttaaaagcctcggaaatttacaattacaagggaagagcaaatattgacattaagaaaaaaaaattaaatgagaaaaattcagctttttctgagtatacataaatgtgtaattttttgtctgttgactttgatccagaatagttatatatataaactcagggctcccaactctgctgatttaggtagaagcattttgctgatttcaagggggtaaaagctgcttttttatttgatatgcgtttgccgatttttggaaaaaattctcaaaggtggccatttttatgtacagtatgccagggctgccagatgaaaaatattacgacgagcttttttttcaaaaaatggaaaaattttaaaatttgagtgcaatttgttaaatgttttcaccaaaaatgacaaatttttgcgattgggcctatttttaatgtcatcgtcatacgtcaggtgcaagtcggctcttatgcaaaggtctttgagagtcactaatgttctaaaaaaaaggagcgtactttgtctgggattaaaatagacaaattgttcaactgcagaaatacccccattgtgtgctcttttaatgctcaaaagatgaaaccgatcaatatactttatttatttttttgaaattcctccatatggcatatggtgcccaaacttgatgttgccgttcaaaaaattttgggactgaatcgttaatggataaatgttttttgtaactcatctaagtt

SEQ ID NO: 6120 - DNA, 1443 bp, Heterodera glycines
  unsure (1)..(1443): unsure at all n locations
ccggcggtgccgataggcgccgccgaaaagattttctaaagttttaattagttttattaagaaaattgttcaaaatttcataaattttcaaccttttcccccttcgttgttgaattaagtttttaaatttttacaacgctcggagtccccaattccccgaattagtgtcggggggtcgaggggcaaaaagtcgggggccgggaacctcggggggcgacatgtcggaggtcggggcggggaataggcccaaaaatgtcggggatcggggtcggggaccggggagctcgaggtcggggcttaaccctaattctacatatatgtaaacaaattatgtgtcatgcgtcggaggcgttctttcccttccctcccctcccctcctccggcggtgtccgttccggaaccatgggttgcactaacggaatgaaatcgttccggaaacggtgaaggctgatcagtgatcggaatggaaaatgactaatcggagtgtgaggagagtgagtgagcagcagcaggtgagtgagtgttgatgatgggacaaggggggagagtgttttgccgtcccccgttccatttgccttttgtccaaagaaagcgtcgctttttagcgattgaaaaaatagtacatgggaagagagaagacatacaaaaaaggaaatagtggtggaaaaagaaaatttaaaaaaaccaaattgaattaagggagtaattctacataaagatggtggcattttggagatgtgaaatgagagggtccggcggcagtgccgaaacttcggcttcgaaaacttcggggttttttgggcttcgtacttcgagcttcgtgtaattaattacccgaagcttcgacgaaaaagagcccaaagatggatgggctcaagaaccaagaacgtcaatctttaaaaatttttttgctgagaatctgttaacaagtcgaactaatttcatttcctcgggcgcctatcggcatcgccggactcctcctgttcgatgaaaattttacttaaaagtggatcacaaaaaatttatcacgcaattcattcaatgtattttaaatttttaatctaaaaaggtataaaattggcaatttttggtgtgaatcttttaagaaatagggccactacttctaattttcccctcgacggcgcctatcggtacccctaccccccccggctatgcccttgggttcgaagtgtttgtggttggtttggtaaggcatggaacaaagtgttggtggcactcactcacgcgttgaacctacgcatttgtaaccaatcgctcaccggncgatccccaaaaaacatcttattccctaattacacactaatgacattanaggcaaaacaggcactcgtaaatcgctttagggnngcggagaagtgtttgcgcactcattttcactgtgctccgtccgtccgtgcacacaacacacaaatctctcctcca

SEQ ID NO: 6121 - DNA, 4304 bp, Heterodera glycines
  unsure (1)..(4304): unsure at all n locations
tctgttacaagtcgaactaantttcatnnttcctcgggcccctcaaaggcatcgccggactcctcctgttcgatgaaaattttactttttatcacgcaattcattcaatgtattttaaatttttaatctaaaaaggtataaaattggcaatttttggtgtgaatcttttaaggaatagggccactatttctaattttcccctcgacggcgcctatcggtacccctccacccggctgtgcccttgggttcgaagtgcttgtggttggtttggtaaggcatggaacaaagtgttggtggcactcactcacgcgttgaacctacgcatttgtaaccaatcgctcaccggccgatccccaaaaaacatcttattccctaattgcacactaatgacattaaaggcaaaaacaggcactcgtaaatcgctttagggggcggagaagtgtttgcgcactcattttcactgtgcctccgtccgtccgtgcacaacaacacacaaatctctcctccaacccatcaacgacgaagcagcaaaaaagaaaaaacgaaatattttggcaaacattggcccacccgccaaaaagtttttggagcgtaaaaatattattcgcgtcaatgcgatcagcagaagcgtaatttgtgttaaattggaaatttattgagggaaaatgagaaaaaaaaaatggaaaaaaagaatttaaattaaaaatatataaaccgaaaaaagttaaataattggttagacaaattcttttgggaaatgaatgaatggatgagtccctaattatttaaaaatgggtggcatattctcgcgcacaaacggttcacttagcagttaaataaattggaggtcattcgttggatggtttgacgtcgacaatcaaaaagcaaagaataaataaaatttgcaaaaatctaatgttggaattaaagttactaaatatgtaataagttaaaagcgtgagcaaaaagaaaaatttaaaaaaatcttaaaggaaattgagtaagaaaataaaaatattaaaaatatggaaaatttcataaaaaagcaattaaaacacaaggaaaaattagaaataagcaactcctctctgaaaaaaaagctcaacatcatcagaaagcaagaacgatctctgctgctgaaaaagtgaacaacgacagtcagtggagaagcaattgagaacaaatattgtaaaagcggatcataaatgaatgaatgaatgaattgagaggggtgagaagcattggtcggtggaagcgaattggaattggttgaatgcttttgaattggcgccattttccattgttattctgtggtcaaatcgtcaacaaactgatcagacaatgtgagagggggagggatagagagagagagagagagagacaaaaagagagagagaggggagggaggagagagagagagagacgggagagaagagaattctagcaaaatattgaacctaatggcattttattaacagatttagaccaaaaaatattaaattttaatgacctttttccataagaccataaaaagttaataaatcacagtttaatatcaaatttctccgctggtaaatgccaaaatgaaaaacacaattttatggcgttaataaagcggtcattttcaatcaaataaataaatcaacagtaaaattggaccatacgaaagggtgagcaaatgattcgattcgctcttctccaattaacggacccttctcaaacaatcgttgcaataaaatgttaattaaaaaggcataaaatggcggcgcaaatgaaaagaaaaaggcgattggtgaaaaataatagcgcaatatttgtactttataagaattcacgcgaaaagtcctcctctggcgagaaaaaggaaaaaactatgccaatttgtcctaccggtaaattgtgccattttgcccggtcgaaactcctccggatccttaagccgaacgcgaacccggcgagggtcaaacgcggaaatgagtaacggttcggtgtccatgcgacgaccgtttagaaacacttccaacgcgtagtcggcaacctcaaaaaggatttggtgaataaataattatgtaaatattgtattgtattgtattacaaaaattaaaaataaattttgaaataaattttttaaaaattgacaggaaaattttagtttaaaattggaatttttcctttaaatttcaatttacaataaattatttcggtccaacaaattaggtaaaatggtcaattaaatgaaaaaatataaagcaaattagtaaatgacaatattttaattgccaaaaccccaaataaatgcgtcctttatttattgctaaaattcaattggctctcacccttggcaaagtgtactcgcaatgaatggtgccgggcccgcgctcggcaatttgtgcttccacaggacgtccagagacacattcgacaattcgaacgacaacatttgaggaccgaaaaacaaaaaaattaaatgtaaaataaaacaaaattaacaccgcaaacgctgatttgaatggatggaaaaatgggccaattcattgacagccgcacggttaaggccagggccgaccaactcagtgatgctaaaaaatgaaaacaattaataataataaagcaattaacagttttcaattattaaaaaatattggtaattaatagggcttccttttttaggcaaatgcctaaaatttttgcacatttaatacgtgtagataagcaagaaaaacgcgttttccgcttggtttggggtgtctacgatgacttttataatgcctatttttgcctatatcgggtttattgtgcataaagtgcctattttggggtttttgaaaaaatccataagaaaaatgcaataaaaacgaaaaacacacccctaagaaatgaccgaaaaaaatttgagaaaatacacccttaagaattgaaaaaattttcaaaaaaaatgatcccaaaatttaatatatttttttcttaaaaagaatttttggtttaaaattttgtccttatttaataatttcatttacaattgaaatatttaaaattttacttgtcttaataccaaaaaagcgttaataaaaaaaattttttgcctgtttttgtgcctatttaatgcctattttgcgatttttttatgcctttttaggtgcctatttcgcgattttttgtgcctaaaaaaggaagcccgagtaattaatgaaaagattttatttgcacaaactataaaataattaaaatttatttgaacaaatatttattaaaactttgatatggccatttttctcaaatttccagtaaaagaaaaataaatgaaaactgcggaataaataaaatattttaattgccaaggtcccaaaatatgataaaatcaaaaaattataatattggtaattgattaaactgctatttaataatcaaaattaaaaaaaaaacgcgaaacaggtttgaaaaatgtgcttttgtgtttctcccatcaaaacaatgcttcaaagttttgaaagcttaaaacccgcactctatgataatgacaaataaaaagaaaagcaataaaattaaaaataattaatttaaaaatctaaattgaccaataattaatattcccctcacatgtcttcgccatttccgttgacaaattcctccgcgactccgtctctcccgttcagcgcgcccccagctgcacgctgttcatgccggcgtaacgctgcaagattgcgtgccacatgctcttcgtggtccgatgacagtgcaggcgaacttgcaggaccgactgcccccgaaaattggatgtgccagggcgagtcgcgcacgtgttcgccgttgaaactgcgaaattcaattttaagttggcaagaaataatcaaatcaccgcatttccactgtgtgtttggtctcgtggacgggcgtaaattcggccaaaaaattccttaaaacaaaatgtttaattgaaaaaatgattataaaataatagattctaattagttgtgggtttttcggcaccttgggcttgtctcacgcacgcggcacgcgactcgcccgccattgatcacaatttccaaattgcccgagccagccgcagttgcatcaactatttaaacaaaggaattttataaatttaaaataaaaatatttctaaaaataaatatgtttaatggataatcccaattcttctcattttgctgactttcaaaagtgtgtggcctatgcaagttccgcgcttcaataaattgtggcattcgtcgcacagtgacctaataaaaataaaaatttacaatttaattaaaattaaaattcatttaccaaagtcggggtcccca

SEQ ID NO: 6122 - DNA, 1027 bp, Heterodera glycines
catttaaaaatataatcaattggaattcttttttaatattgtttttatttcctattgatttacccgcttcaattggcttccattcaacgcgcactgtcccgtccgcttcctgcggcacaatgcgtgccattctgcgctttccacttggccctacaccaccgaacacggcacaaaatattattttaatacacaacaaaagtggttagaattaacattttgcttagggagaggacttcatatttacaagattgaattgatatttaatgacagtgcaaattatttccttttatttgaatttttcaaagaaattggaagccatggtaattgatgcgtaataatcaaaaggattaatgggaaatactttcatttttaataaattattgcctgtaattgagcatgaaatttggcgtgcactgtaaatggcgggtgaatggacaaaaaattcggccggacggtcgacggcagccaaccgcaactgttcaccatagacggagatggcacttgagtcggcaatgtccagcagaaagggggaacctgaccatttaatggcaaattatacggacaaaagaaatttaattaaagtcaattttgaagaaaaaaagttcctgaagcaaattaagaaaataaaaataataaaaaaagtttataaatcaatttgcatagccttaattagtgttaattatgttcaattaacgatacccttgacaggttggctgttgaatgtgaccaacactttgtattggccaggaccttgtggtgtaaatctaggcgaaactcaatttcattatgttttatgtcttttgaaccctcacctaactcttcgaacattggagccttttggctcttcgcgaacagaggcggggattgagcgagagttccacaggacggacaccggaaaaagaatttatttattttaaatgtttcaatttaaataaatttaataattaaatcgcttaaaaataatgtctttatatgtataatggagtaaaattagaaagtttatcaaatttcatggtgtaatttctaa

SEQ ID NO: 6123 - DNA, 2427 bp, Heterodera glycines
  unsure (1)..(2427): unsure at all n locations
tgatcagattgtatgtgtaggagtactggtttatcattgcgatgatttgcgcggtagtcgcacttggtcagcactgacacaacaccggaaatgccatgcacccgtttccgtcgacggtttggttcagctgttgnccgaactgattctgactgagttgcaatgccacatcgtccagctccggtttctaaattataattgcacttaattacaattataaattgaaaatatttataatgggctcaaattgcccttttttgttcctcccttcgcctatttccatgaattttcggcaaaagtgccgatggtactttttgacagatattttttatcataaaaatgtttgcgcttattcaatttcttgatttcaccgtgcatgatgaagaaccatcgtttgcctgttcaccaccactatttccagtgtcgccgttctttctgcagctcgtgccgttgttttgcaacaattgatcgtacccctgccacaacagtacgctgatcgcgtgcacacatgccgcgagacgagcccgtgcttggcgctgctgcgtttgcccattcgtttggttcaacgccgtgcgaatggaattgaggtaattagtgtactcttggctctgttgttgttgattttgctgatcagcagcattgtctccattttggttagaattggaggaagctgaatagtccgaattgtgttgctcctccaaataatttgtgccgccgcccccattttgggacgaggaatagtcaatttgaaccgatgatgacacggatgagtaattgtaatttgactttgatgaagaaatggagccggagttggggctgatcaacggttgctgtggaattgcattgtttccacccgtgccattgctgctggagtcataattatttgaactgttatcataggaccccgatgcgtaatttgtgacgtcgctcgtgttcatgttggaagagtagatgatctcggaacccgaactgatcaccgtctgttgaccatcaactgattgatcagcaccagcatcgccaccagtgatcatatcgtcgccatacggtattgtctcctcactgtcatcgtcactttccttcgatggctgggacccagattgctgttgttgtgccgagcttgaggcggacgccgttcctgtcccagcgctatttgaccaactcccgctaccgtaaccaccgctggagtagctgccgtatccgccactaccgtattgctgctgctgttgctgttgttgtacagcgggttgttcagcattttcttgcgtttcgtcctcatccgattgtgagacactgctgtgctggtggttcaatgccaagtttatcgaaagagaggtgtccgactgttccgcggattccgacttgtcgccccaaccgaacaaagcatcgacggacagcgaattttggagggtcaacaaagagaagagcagcaaaattggaggtgaaaatggccaggatagggaggagaaggtggagaaggcgaacatgacggggaattggagagaattttgttgggaaataaatgaatggaaaaattgaattaactgtcgacaaatggcaaagctttgccttttaagccaaaacttagagagagaaaagttttgaaagatatttccaatctttgtttagctttaataaccaatgattaattaattcgtgacttgctgaagcgtaatgcatgcgttttgacagtttcacttctatttcggtctatattcaaattgattaccttttcgcttcaaactacgtggaacaaaattttcaaatgatttcaaacttttatgcagctgtcaaagctgaagaagttaactctatttttggttcgcttcacgtttcaatttgaatctgcgaccactccatcaataattgtttccaaattggttaaaaattaattaattaattttaataaaataagaaaataacaattggttgttaattttttatttaatttttatttcacataatctttaaaatgacaatttggcggtaatatttcgggttttctatctgtcgtgccttacaaatgagtagggatgatatttatagttttttcactattttttcctgagctccctatggcctgaaaagcacgaaaatctcggttgttgttgttaagctagttttcgagttattagtgagcaacacttcatgacattgacatttgtgtcgacggatcgctgtgaaaaaatagggttaggtgtggaaaaaaattcatagaggctggaaatttttttttaccgtaaaatgacattttcagcctaaaatctgtttagagatctaacccaaaaatccaattttcatctgcggcaaaattaatgttttagccaattttgcctaaaaattttatctttcataaaacaaattttttaagtgatctaaatgaacttgaaataaagcttcaaattcattttaagattttctgttacgttaatt

SEQ ID NO: 6124 - DNA, 1607 bp, Heterodera glycines
  unsure (1)..(1607): unsure at all n locations
tttttaattcaactgacacgtaaacagattntgctccaaaatagtcattttcaataattttaatgaaaaatttgccaacaaagtgccaatagaaatttttcaaaaataacatccttaaaatcttaaaacccattatatagttggaaataatggcaaaaaaacggatagagtggcaaaaagatggtatgcaaaattgataattttcttaatcattaacctgacggagccagaagacacctccaggcccaaaatcgtataaatttttttgagaattttacaaaaaaaaaattataaaattttcattttattttatttttagtatagttgccatatttattaagaatatagttttttatattaaatgtttaattataataatattattttcttaattaaattgattttattgacaattggatttattgctacacatattccattgtaacattctgatttcctttccttcacatcctcatttacattttttaacatttttatatataataataaaataaaaaattccaaaattatccaatgaaaattttatttgtgctctttttgtattttgccattttgacgatttttttccaccgcttttccgctgctaacgagacaaatgagcatatttcaacagcagttgatgctgatgcagaaattgagaagctgtcaaaaaagcacgtcacttttgccgatccgatcgaaactgaaatcaaaggacgtgtgacattggcggaactgatcaaaaaggaacgggacggggaaagcacagcactgatcagccaagagggaccatcagcagcagatgatgctgatcaactgatcaaaaaggatgaacggataagagagaaacaatggctaattaagggaagtgaaatggaaaatgcagcagaaaaaagggacgaaaaagcaattgctgaacaggtcgagaagactcataatagcctatcattaacacaggaggaatcagccgacctgctcaaaacagaacgtaagccaatgatcaatggaagtttagcagaaaatcccaaccccaataatggcacaatatttgctgatgtgattgaggaaatggaagcgaaaagggcacttaagcgcaacgcattagtaaaactgatcgaaatggagcaaaagggggtacatcagacggatccggcaccaatgccaaaagcggaggatggcattcgtgaatcatcaacaacagatgtagctgatcggattgtagaggagcagaagaaagcggcagatggaccgaaggcaccgatcgcaaagcaaacgctggccgaactgttagaaatggaaagaagcagtcaagaagaggcaatttgatcaattgttgatttgaagtgatttgatcatctttttcttctattgtaattcttgttgaaataatcccgaaagttctttttctcgaccatgccccatcaaaaaaggatattattgatttatactaaaactaaaaatttatttttttgtaaaaaaatttcgcaaaacttctacttgaattttaaaaatgcgctgcgaaaaattgtccgaaaggcaaaaaaaggtcgcaaatttctgactttcaataaaacctattttggagtctaaatctgatttgtgaaaaa

SEQ ID NO: 6125 - DNA, 2958 bp, Heterodera glycines
  unsure (1)..(2958): unsure at all n locations
attaaaaggaaagcttnagaganaagcggattcaattataaaatgtttaagaatatgcatattacgtttntcataaaagggcatttgcattgtgcgtttgtttatttattaaattttgatttgattattcaagtttgaggcaaaaattatgggattttatttattgaaaaaattaaatggaaaaacttaaaaaatttagaataaaagtaggaatttaaacaatgacgaaacatttaattccattctcgcagttgaagcaaaagttgcatttaggacaaaaacaaatatttaaaattaattaaatgatacaataataattcaattaaattgtattttcttacttccgcctcgctcggctggtcgtccaactccaccacttcagtcggctcatttttgacacttttttgtccaattttggccacccatttgtttcggataacgtcgtccacaaaaataatgtccgacgcattgtttccgtccgtttggtcagcagctgaaaattggtaaaatgacagcgatttttatgatgaaaattgccacagaacgaaaagaaaatagcaggggatgaagccaaccacaaatccaaggccaaaaattagatagatttatggaacggacaaaatttagtgaaataaaaaaaagataatttttatccgtgttttttaaaatcctcagcatcggagacaaaaaagcagcaggaatttgtagccgttttcggcaaaaaatgactaattttggtcaattgggttcaaattttcaaaaaatatcgtaaactgggggtctatggggtgccgttagacgccgccggaaaatttttttttggaaattttaatgctattttgttaagaaattgcttaaaattttcgaaaaatttgcccatttttaaaaatattccgattaaaaagaaccaaattaggagaaaagattttgaccgacactaataattggcactttttaaaatatttatttttatttaataattcgattttctcttcccctccccacctttttgcacaacttctggcacattttccttatcttccacaacaattattgtcctgttggtgttggttcggaaatcgtcttccattgccattcggttcaaaaattctttacattccgccaaattttgctccaatttttggcacttttgccgcaacagaagaacattgtcctgaaaatgaatgaacgtttcctttggttaaattaggtgatgttttatttacgccaatcattttaaggtaaaaaatttaagccctttttgtttattagacgaaattgaggagcacagaaaaggaagacgaagttccatttttatgcttttcctgtggtcggggcgagtaattataaaatgataaatcagtgattcaagagactcaaaatcagaccccatttttgccactttctgttttagtgccggtcccaccgggacacaattggacttttttgaattttcgacgaaaacatgggaagcgaagatcggtgtctgcccaggatcaatcctaattttccaaaatgatttttttttttttgaaatgctgcctgtgattcgtccaacgactgtttcatggccttcattttgccgttttccttctccaatttgtcatttcgttgtgccaattcctcgctgctcttcaccaaatctcttccaatttgtaacaatttgaagcaaagttcgttttgcactttcattgtgttgccaatggactgcacaatttgcgcaaagtttggcacggaaacagcggaacaatgggagaagccatcagaagaagaggaagacgagggagaagcagcaatcagctgacaaatgaaggaaattgggggaaactttttgaattttactttttcaaaaaatttaaagattttttttaaaaaatggaacaagaaatcggcgtattaccgaacattcgacccaaatttgaaaattttagagggatcaaaaagtattactttaattaaatctgttttattcaggaaaatcttctaagaaataataaagggaatattaaattctaataaaattttgcagattttgagtcatttaagaaaaaatcagcggaaggaagaggtcaggcggagctgacagtcgcaatcggagaagaatttgggattttgaatagtttttaacagattttgcaccaaaatttgtggatcttagtctatttttaaaatagaaaaacatgttaattatttttttaaactgtcaaattagtggtaattaaatgtcacttcaaaaaatcgcttatgtatttgctgggacctcataaaggcaggaactcccggcctggtcctacctgacccattcaactgagaatatgaaaaatattttaattttctgctaaatatgaaaattaaatccagtaaaaaatgtctctgctcacaaaacgcacttttgccgtcgtcgcctccttttgctgtgccgtagtcagcgtttcgtcaatttgttttgccaaaagttgcagctcacattcaatggcaacggcgccgttcggaaaagcatcagccgaagaagccatttcaatacaaatgaaaaaatatataaaaagaaaagcaacataatattaataataaaatttaaaaattgtgcttcgcttcgtttttccgctgtctgggaaagttgggaaaattgtaaaatgaaaaatgaagggaagagaagaagaaaagcaatcgaatggaaggggaagggattgagcggtgggagggagggagggaggagaggtcaattggacgagtgatgagcaaagcggaggagtggaggatagcagggagatgacgttcgatttgtggggagttggggcgggggttggccggggaatgttgcgatgtgtccatcccgattacatcggccaaccatgaggggcctaattacggacgcgtaagagggtcccctggaacttaattcccctattaacactggatagtgggacctcacggctttattaaatgtaccaaccagat

SEQ ID NO: 6126 - DNA, 2110 bp, Heterodera glycines
aaataaaattggtgactaacttaactaaaaagtaatattcattattaatcaaaggatttaattggcagccaatttcagcaattgtccatttccgtcaaaaagttctcttttccgaatcggcgtggagagcattctaaaaatgaattaaaacgaaagaattttagtttttgaattaattaattaattaataataataccatcattatttggccaagaatggcgtactctttctcgaaaccatgaggaaaatcagtacgaatttggagcttttcagcagaaaatagcattttgttgacgctgttttggagcagaaacatacaaaatgattggaagtctgaataaatattcaaaattaataaaattaaacattaaataaaatattaaataaaacctgcggcattttgaaagtgccgtccaattggcattggtcagccaatgttttgttccgactgtgccattcctcaagcggataagtttggaaagccaacaaatgaatgacacttcccaaaaaccaagcgatgtccgattcgtcggagtcaagtctcatttgcttaaaataatttttaaaattcttttaaaaattgcgcaatttttggcaccgaaatttgctgtggactcattgtgatcaatttgctcattgtcaattcactttgactacaaatttggcactcgtcaatgaaagtgatgcgaatgtttccgcccattccgttggaatcgttcgattctttttcgacacgaaagttttccaaggttagggggtacggtagttcagtggccgaagttttgatacaatgaaaattcatttcattttgcatccgtagcaaaaccctcgcacagaagaagaaaatttttgctcgtcagaaataatttgctgcacagaattaacagaaactttccgttggctttccaatttttttggaaatgctaaaaaaagtaaaaaaaaatgccaaaaattgctaaaaattgctaaacttttttaaaaaaaaatttaaaaccgaaaaaatcaagtagttgacaaaaaatattagataaaaatcaatgattttcaaaatctgagctcagattcgtgatcagctcatttttaagcatagaaaaaatatccgacaaatttttaacattttttcgtcgcgacaccaattcttaatattgccaaaaagggcgcaaaaaacatgcatacatttaaaaattcataaaaaaaaaacttttttgctttattttgaagaaaggagctcaaagagcatttctgtattgaaattttcgattctgaagtcactatgcgtcattaaaaatcagacttttacgcttctcacaaaaataagtaaaaaattttggcgttatgtcactattttattaactagatttttcatcactaaaagtcgcgcggccctagtaattaaaaatctgttgaaaaataatccccccgtctccattaaaagccctgtctccaattatgcccccctttctgaagaggttgaaaaataatcccccggggccttaattagagaatatacggtagcccaattatttttctcttttaaacataataaaattgtacaaaattttaattattttcacaaacataatacatatgccaatgattagaagatgcaaaattgcacattttcttggaagaagtgattgagcaaaagtgtccatttgttgcctttaaaatgataaaattttaaaaatgtttacagcctttttttatattaaattcttttagaaaaacctgccaattttaataaataaaagatttaacgttttaagcagggatgggatccgtccttgaatggcaaggacgtccttgaaattgggccctctttcatgaaaataaaaaatgtccttgtatgcaaggacgtccttgaaaatgagcatttcaaaaaaggaaaaaataatcaaaggaaatttggtaattttataacatatttggatattaaattatggcattatgtcaattttttttgctcatagttcagaattattgtttattattattattaatatggtattaggaatctttcgtgatacccatttttatttcagaatgttttcaaataagcgcaaatgttctttcaatcccgattggaaaagcaatataatttgtaaaaag

SEQ ID NO: 6127 - DNA, 1468 bp, Heterodera glycines
  unsure (1)..(1468): unsure at all n locations
taaatccatttgatttatttaatgtatttgctagaaaaacataatattgcataagcattcactgagaacgcatataaaagtatttcataaacccaaatttaacaaaaaataattcaatttttaaacttaaatcaaataaataattatatatttttaaattttattgcattttttaattttttattgcattgttaaataacataactaaattttttatagtttaattattatgtgaatgctttatgatttatttttaaaagtacaaagatgctatttgataaaagcatttttttaaataaattatttttgtatttgtttcttctttaaaattttgtttttcaagggaaaataagtgccaatgttataaatttaggtgtgtaaaatgacaaaattttatccaaaaaatgataaaattaagcaaattcagtatttagataaataattttanaaggtaaagtaaatcgtcgctacgattnaaaaagtttatgaaaactaatggtatntttttaatttcagacaattttttttacacaattataataacccgggtataaaatattattttagcacaattaaaataaattaagtcacttttgtattaatattaaaataaaactaatgtatattcgatcaaatctttatttatttttttttttcgttttatttagaacataaattatattttttgctttaacagttttcttttcttaaaaataattttgtttctgtggatgattttcaatttaataattcatgcacgcaatttacttttttttttgtttatgtatgctatgctagcataatgagtttgtaaagctttttgaatgatctgatttaaattttttgatttctttgccaccatagctccaaaaagtgatcaattgattgttttttgatattatttccttaattatgtaattattctgatattgtttttccctcatttttgtagctgtttttgttggtttttgactttatataaaaatcattcaaatggcctagcatgagtaccaacggaaactcataccaaaaaaggttttcttcatttaataatttttgtgaaaatgaaatattgtttttagtgatatttctgtccttcatattaaattatttttcaggctttaatttctacggtcgtactttatgattatgcattaaataattttttgttatgtaaaaaaatttattttttagataaattaatagaaatatttcttttgaaatctttaaaataataaaatttacatttgttaaaatcttcttgattttttactccttgttttgggttgcggttgaacatttattctcggtttaatccattaatttatttataaaaatcagtattttcggtattttcatttaattacttttaattacatggttaaatagtcaattttaaataaaaaatttcatttgtaaatatgtttaataaaagttattttttaaattatgggtaaatggattttta

SEQ ID NO: 6128 - DNA, 2353 bp, Heterodera glycines
  unsure (1)..(2353): unsure at all n locations
agtaattcggctggagtggttccggtgtccatagccacgtaatttatgtggttatttatcgcttcgcacgcttttttaactagtattggtttgatcaaaaaacaattatgattttttagatgaataattctcatattattatatttacttaatcattttatcaccaataattttattcttttagtttttaaccagtgttttttataaaaatagaaaatattctaaatatatatagtaaattttttattattttacattttattttaaattttaattatgatcgttaaagttctggattttttatgcttatttattttaaaaaaatgttttggatttaaagataaaattaaaaattatttagattttaataacggtgattagatttttaaataatttttattcataatcatcattttaatgtaatttcaaatttctaaattaatttttttataacttgtttcatcaaactgactttattttaatttatattgctttcattttgaattgaaaatgaaataattcatttttattagacatttttttaaatagcccaaggaggacttttaatggacattttctaaatatcgtatattttttccattaaattttgttaaaaaaactatcttttcaaacccagtagaaacaattaacaacaaaaattagcagttaatgtgaatgacattggccaattccgtgctgagacgatgcgaaaaaaacgcattgtgggcgatgcgaaagaactcagttattgataaattaaataaattaattaaataattcaattcacaaaatcacggcgccgtccgggtaaccctaatgtacggcgggacgcaagtcattttcaatttttcgcatcagttctcatcaattttctatatttctagtagacacaaccggacgccattgaaaccattttgtagagctcatcgagctgtacaaaaaagccgctggtatcggcacgcttagcttgggttggccatcgacagggttgggggcgaggctgagggtcctccggcagttgtgcccaacccatgacgggctccaagtgaatggatcaagaacctgacccggcctgggagatagccattaaaaaaatgaacaaaaacttgttcttaaacgggccggtccgggttccggatcaagcactttttgtgccccgaaagtggcgcgatcggcttccgaaaatgaccaatcaatcactgagtttttttcgcatcgacctagcactggccaattcgtagtatcccatcctttctccgatcaataattgtcttctcttccaccctcactcgtaacccatacattttgattttatttcaaccgttgcaaatacatggatataaggttaaggtcggacaaactccctttccagggacggatatactcttttccaaggacaaaggggtaaatcaccttaaattcgaggacatttaaatttgatcataaacaatagaaatgattaaattatattcaaattgtttatgtttttcgcatgaatcttataggcgtcgccgggaaaaaatacagttttcttgaaatcttaattttcttccgtttttacaaaacttttaattttgtttcgaaaaagaatatgccatcatttaatttcttttttaattttaatttaaacttaagtgtataaatgtataataattccgcaataaagattgttttattttatatcttactaaatttaattatgcatagttatttaattataggcattgtttatcggatgctagctacaatcgtatagccacttccgagaacgtagaagccaacgcttatttagctttttttaatttattttcaattagcaaatgtaaatccatttaatttatttaatgtaattgccagaaaagcataatattgcataagccttcactgagaacgcatagaataattacataaattttaacaaataatattgcacttttacactttaatcaaataaataatgcagtttcttcttgaaagttttatttctttttcctaatgaacctttggatattttttaaattttttttcgtcttatataaggatacgctttttagttgctaaaaaatgtcaaattagttagttcttaggttccaaaaaaccaaaattgtattttttattttaacatatttgattcttgaatatatctgtcaaaatatatttttaaattttatgaaatcggatcgaatttttttatatagatatttacgaaaacttgctttaaatgtaaaaaacaatttgtgaaacaaattgaattaaagaaatctttaatatagtctatttgtaaaatttaagtaacaaatttaattnngtgcatgtataagctgaattagttgagtattaaataaatttttaa

SEQ ID NO: 6129 - DNA, 2511 bp, Heterodera glycines
aaaaaaaatattaaaagtcgatttatctttaaaaaactcatttaattacatgttttattgcccatttttgtgaatgttgaaaattcaaacaataaattgtatttcctttcttaaaagcaattatttattcaatagcgcacttcgttaagtccaaacgaggccacaacaagcttgtttatcaaggttttgtctattagcatcatcttacgcacaatgatgcgagctattggttttgcgagctgaagaagacggccacaaactgtccagggcgcgcaatttaccgtgatggaattgtcactgtttctgccgcacacaaagatcacgcaccgtcagccataaatgtacaggttcaaaacgtacggtcgaatatgcgggcaaataacacgcgtgacgctccgcgcacggtggtaaatgaatgcctggcgggtgctagcaatgaagtaattgctaatttgccgaaaatcgcaacattggagcaggcaattagtagaaagcgtaagaggcaggggtccagttgaacataccgcacacacttgccgatgttttctttcccgaagaacttcgctacacccgaacgcatttggcagaaaattatgttcttgccgacaccggagcagaagaccaacaaagaattattctttttggctctgcgacggatgttgaacgcctcacacgatgtgacacttggcttgccgacggaagtttccgctgcgcgccggaaattatttttcaggtttcgagaatattttttcagagaatatatagcaaaaatggttattaagtcggggatgggttggaaaaaaatgcatttcgagcgaaaattcacaccgcatttctgcacggctgttggtttcacctgtcacgtgctcattggcggtcagttgtgtcacgttttaatgacctggcagaaaggttcattcagcggtttggagacactcaacagcaccaggattttcttgaaaacacttggatggttgtcagcgtcgcactccgtcatttttgctcgatttttggaattgcaaagacattactgaactccatttgccgaaggacaacaaatggcgtggaaagctggcatgcccgactgcagaagacttttgcctctccacatctcacctttttcacttttatagaagatttaatcttttaatttcgaaatgattttgcaaaaactttttattttaaaggattactgaacgaaaatgttcgagcaaatgcaatttgcgttaaattggaaagtggtgaatctattccattgtatacgcgcattgagtatcgtcaggcaaatgatcgtctgctcaacattttgcgccgttacaacgaatatttgccggacgattacaatttaattattgtacgaaacgccaaattgaaactttgtacgaaactccattgtacgaactgcccattgtacgaactgaatattgtacgaactgcctattgtacgaacagcattgtacgaactgcctttgtacgaactgcaaattgtacgactgcctattgtacgaacagcattgtacgaactgcctttgtacgaactgcccaatgtacgaactgccatgaccccgaatttaagacggctagttttaatttattttatgactaattttacaagtttttttaaattaattggtttatgcgttttaagaatctgattactaaatgttagaaatataaaatactctgttttatagtatttccattattataagccatattaaatttcatattcggcatgatgaaatattcgattttagtgtatgtttttagagagtaagaaacatgttttctaaatttatcattttttaaaattaatttctcttgagaccgtgccatcatcttgcagatttttcctgtgcattttataattcataatatatctaatgaaaataataaaagtaatataataaaaaaatatgatcaattactgttgaagtaagagtggaatatccaaatttggcttctgatttggatttaaataatgtcatactgttcaaaattgtgtatttaaattataaaattaaagaaattcgttaaatttatatattaaatttttttctttaacaataaaaataaaattgagaataatatttatgattttttcctatatttataaaaaacattttcggtgcaaatgagattaaaaaacaattaaaaataactagcatgttttcgtgctaaaaaggaaagaaaaatttgttgcaattttttacttccaacatacctacgaaaaagaattaattaattgaaaatctatagttaaatggtaatgaaaaaaaaatatttcttatgataattcaagcgaatctttagtataatcttagatatatttaagctttctgaagagaaaatttatctattttttattacaactttgttattgattaaaataatagattagtaaaattcattcacatttgaaaaatgaaactaaatatttgtaataacgccgcaagttattgacaaacactatcacacctagaaaagagcttaaattaaaaatatatattt

SEQ ID NO: 6130 - DNA, 3482 bp, Heterodera glycines
  unsure (1)..(3482): unsure at all n locations
ccgtttttgacaaaaaatattttttaaaaaatatttgcggcgtatttttttgcaaaanaattaagatgaatttttgtttatttcgctaaaaatttcgggactcgaatcatctgaacgaaacgcggttcgagaaacaagagacaaaattggcacagacacaaaagacaaattttctttagccataattctcgagtagcactaaattggaccaaataaattcaaaaaagaatatcaaaaaataattttaggccggcgcgccatttagacaaacaaaaaattaaaacaattgaattaacagaatttttaaactttactgtaggaaccaataatgtgctgatccaccacacattcacttggttgctcaacaaacgcatattaatacatttaccttcattttttggaattttgtgccattaatggcatccgtcgcgctttttatgtgccgacccatttccggcacactttttttatgtgtccccaaaatgcaaacaaaaagtcgctttttgaaagagtgccgcatcggcacaccgcggcgatcataaacaaaaaaaattttcagttttttggtcccattttgccccaatattaccgttatttcaccactttgacttcacatcgactccttgcggcgccatcgccaaaaaaaaaatattttgggggtttgatagattttggcatatattttgacgctttttaaaaaaatgattttttaaataactttttacacttcaattctggcaaaaatccataagttttcaaatttttctgttcgctcttattagcacctgtcgattgttgaaattaaaaataattgcacaattgagtcaaacttaatatttaattttttatcttaccaatgccaaaagccccaaaatccaactttttctttaactcgacattttttttgatttttttctacttttttggattttttttttttgcgttttttactttttcgagccgggccgacgtgattagagacaggatttttagttgctaaaatgccgaaaggttactaagctaaaatgatgaaataatttgctgaaaaatttattttataaaaattaattaattaacaacggtttttggttttactgaatttacacttttatatccgcttattattcgaagtttggagaatgggatgggcttaatgcccacttctcaatttccttgcaatctttttaaatttcgagaaatctcaattcattgccttgtttttttttgaaatagcctctctaaaaagctggttttcctttaatattcaagaaaatcataagggtttttcaatgaaaatctcgatttttcctcttggaattcatcgttttcttagaaaaattcaaaaattccctcttggtttaaaatgaaaatctcctttttcctctctcgaccttctcttccgaccctccaaccatattcttttctcccctcttccacgcttattcatcatcatattcatctcctgaaagcgccgtcctaattcgctgatttccatacataatccctccccccaatttccatgcccattttccatccaaatacactctgtgctccagggctgtttgttgtgtgtgttgtcgtcgctagcgacgacgacgtggcgaccgtccgccgacgaatggttgggggagtgatcgacgtggatttagcccccctcgcccgccccggaggggaggaaaaggacaaaatgattagtcggatgatgggctgctggcggggggagaattgatggaagaatgaatatttgtacatattgttgttttagatgttggatgaggatgaatgatgatgaagaatgaatgtgaattggtcgggtggggggagggattgttgagggcagggagaaaaagcccctctccaaacagtccaaacagtcagccgtctccaataaatggtggcaattcattcattcaaaatcatttgctcattcatttttgtcattcactcaacaagtccatggcgcagaactgttggcttttttgttggaaatcggcgacaacacattcaacaattgatcagcaggatgagagtgacttcttctgctgatcagaaaaggcttttgggcttataaggattttctgattaaagcccgatcagtctcgatgtcaaattagtttctgagtttgagcaggttttcattttcatcatttcatctttcctgtccgacatgggcttggattatccttatctcgattattggttcttgagataaatcttgggccatggacttggttttcagagctttgggtcgattaaccaatcatgtctccctcatcagacaaaggattggattatcccgagtcttgagccctaagtttgggtcaccatcatgaaagggtttgaacattcctgaacatcatcaattcaaaagcctctaatcctagcatcatcagctatgtgccctgatgattccggcactttggtctgtgatcataatttagctactattcgtaaatcccgagcatttatatgggtcagattaattcccgaaccccattttcaatttatccatgggaacaatgcccattattattattcagttcacaataaactcaacaacaaaattttttgcttttcataggcatactgtgtcctgttatttatagtcgaatgtgaaccctatttgtaaaaaatgggaaccaattaaaagtgcctaattgtttttcgcgtagcccattaataaaacaagcaattagtagtacacacgggctgcgagggatatgggcgagggatggaatttgaagcacttttaagatcggattatttctaatcaaaaatttatctagaaaataaaaatatccttttttcgctactgattttttactttcaatttaaatttattttcccaatgaaagttttttcctaaacaaaaattcgtaatttttccattttttatttttaaacaaatttatttataaattgctcatctcatttttgatcatcattttagttttgttttaattacttgctgctggttcattttgtagttaataaaagcttaactgtcaaaacattaaaagtaattaaaaaaagattaacaaattatttgaatgcaattttttttgcatatccactcgtacgaaaacggcggtacgaaaacgtcctggccccgaagcgggtcagttccgtctggggccggttccgtctcgggccagttccgtctcgccagttccgtcttagtagtaaaagagccggttccgtctcaaatatttttggacccaaattgtaatttcaacttttagagagtggagagagaaattttcttcaattttgggaatatgattacttttattggtaaatatgttttttcagtaattattagagaccggacttttaggcaccaaaaattttttaaaataggcacctaaaataggcacgaaaaaggtgagaaaaggtataaaaaaatggacaaaaaggacaaaaaaggcacgaaaaatttggaaaaaggcagcaaaaaagaaacctttttttagacaacattt

SEQ ID NO: 6131 - DNA, 1788 bp, Heterodera glycines
aattaaaaaatattttaaaagtaatttttaaataacagatttttaaatgttattatttaacccaacaatgtgctatttcaccaccacattcacaggttgctcaacaaaaacgcatagtctcacataattcattcctttattcttgggcatcttgtgccattaatggcatccgtcccgctttttgtgtgccgccccatttccggcacacttttttttgtgtgtccccaaactgccaacaaaaaggcgctttttgaaagaatgccgcatcggcacaccgcggcaaaatattttttcagttttttggtccccaatttttccgcaatttttaccgttctacggaaggtcatgctgaggaaagccatggcaaaatgggtggcaaagatttagattttggcaatggcattggtgaagaatggcacagtacgaataccatttttaatgaaaacccggtaatttttggtgaaagcccggaaactttcatctgtcgttagaaaagacaaaataagcataagttgtttattttgcatttttaattagttaaacactcatcaaaataaaaacaaaaacaaaaaacggaagtcatataaaaataatgttggccggaaacaataaaacatttgttggcatttgttttcacatgttttttttctattatataaggacaaatttttttatttcttttatagataaaatatacagaataaaattcccaataattctcaagagaatgtttggtaaacacagtaagcaattattgttcggtatgcttaccgtaatggttactgtaatgctcaatgtaagctcaatgaataatgacgatgataacaacaacaactatcatccttattactactacaataattatggttatggtaacgacagtaattttcctggaaataataattggtataacgcaaacgcatacactgataactggtatagcgtaaatgatggtgatgatgacacgagtggttacggtagtactacaagtggaaactacggttttgagacgaacagttacagtagcagtacactgggtggcaattacgattacggtaacagtagtgagtcatcatcagcaccagcgttgacaaaaaagaaaaaagaattgcagcaaatattcagaggaaacgttcaaatccgagaaactgacagtgatggtttagtgagttatcggccggccaaaaagaacgaagtggtaatcaaatttaataaataaataatgcaaaatataaaaggtttcaaattcagcttaaattatactaatattttattttaaaaaattcaaaatgcatataattttttcttttagtgttttgaagtttattgcggcactagtaatccaactgacggcatttttactgatcactatggcaattttgaagaaactttgcataaggaacaaattaaagcgctgaaaaaaatgcaaatttggaattaatattggattctacaaacaagaagtacttaagtgcgaagtgtcaaagcaaaaaatttaaaaataattataaaattaaaaataaaaattcgaagccaatgcgaaagtgatggaaattattttacggtaattaccgaattagcgtaagaaattttattaaaaggaaatcattaatttatttaggttgatttctattcaaagccaagatatgccttaattaatgtgctgaagcaaaacaaattgcgaaggaatttgactttgccattcacaaatatcgcatttatagggacaattttcaaagtgagtgtttgaaaataattaaatttaattaaaatatattttaaatataa

SEQ ID NO: 6132 - DNA, 1721 bp, Heterodera glycines
  unsure (1)..(1721): unsure at all n locations
aaagacaaaaagcaaaagcagccgcacgtttttgatntaatntaaaaaataccaaaggaaaatgatactgtaggaaattcaaaataaaaatctgattttttcatactgtttttcgttaaattttggaaatctgtattgaaattacaaatggggatttaattcatggataaagttatattctttttattgtaatttttaaaatttgttcataaatttgtttacaaataaagagttctacctcacaaaaatatggatttgttttatacaatttaatacgaaaaatatttagtttttttgttattttctgtcgctctttaatttttaaagattaaatttaattttaaattaaaattaaaagaaaaaatgggggctactaaaaaccattaaaaaatttaatgttctctattatcctgaaaattaaggaagattatgaataattttttttcaaattttaaaaacttggaggcattccgacaactaggaactgaataagaaagtcactttttcaaatttcatgaaatatcctattatattttcccatctataaaaaatgggggtttaattttttatatatcttatataatttaatacaaaaaattgagttttaagttttgcttgttattttattttgcttttcatttttaagtttaaattaaaaaaagttgttactaaaagcgacaaaaaaagatgggggctcagtccgcatcattggcctacggaaacggcactttgttcgctgcacttggaggtttgtgtcccgggtttgcgagcctccatccgtccagactgatccggccagagctggctggatcagccccgtgcgctatttgcccggcgcacccatccgtcgactttccccatttttaccccaagggaaatgtgtcagtcctcctcgggcacacgccacccctcaggggtggtgtggcgtgcggatttgtattgggttgattgtttgtttgtttagcgtgtgtgtggttgctgtttagcggggacccccggcagtgcaactgaccgtgcgtacggcctccgcccgctccgtcatttccttcactcgtctaccccgagcggtggcccatcactgaccaaaactgagcccacgagtgcgtccgcttgctcattcttcttttatatgatgaaagcaattagtgaaatattttttggatgggttcatatggaagagagagatttatagtgacaaatagacactctcgcactgctactcttgtttcttttccgttctctgctatttgttcactatctatacagcccgctctgctacaattcattaattagtaagcaaaaacgaggtacccaattttgattggcaataggaagaaatttatcaattaaattaaatataaaatgggtcatttataatatgagcgaatgtcaaattgagtcccctccaatttggggctcaccgaaaagggccaatcccggtgttcagatcagcaccaaatttttcgctcagctcagatcattcctgcaaattttagtcgaaattttgccggtttattccaggggtgcaatcgaaaatttttcaaaatcagaacatcgggctcaaaaaatcagatttttgggtcaaaaatcagaacattttgcaaaattgcttcaaatcagttatttttataatttatttaatcaaaaatgtattaaaaattatatttttcgcctccgattatcatccttaaaaattttggtgaggaaattagcaaactgaa

SEQ ID NO: 6133 - DNA, 1397 bp, Heterodera glycines
  unsure (1)..(1397): unsure at all n locations
atcaataaatgtttatttaaatattgttttatttaacctctttgattttagagtttttagaaatagattatggtatatttattcattttaattattttatgtattactgttcgggtggtcaaccccgagagatgaaagtttgcatttattttccctttgcatttgtctctttcttttcctcttattttccccactctctaattgttgtgtcttcctttattaatgtaagacactattgatttattttgtccaatgcatgtccattcccctcattcattcagttgctttttatgcacttatttctcttcgcctaaatttttgttctcctccaatttatttattccgcctccgacttcgcccatttttatttaaaattgtttaatttatttgttcatcaaataaacattttattgtgtcggcttgaagaccgaacaattggcgacgcccgtcttaaaaaagaagctcaacgtcggaatattttggcaatttcggacagattccgaattgctattcatcaattcttcaaaaaagcaatagacccaataagggtgagcttccgccaggcgcggtttattcatcataaaaaaaccaagatacccaggtggttgcggtttccgccaggtgcggtttactcaacaaagacaaggaaattcaccgaaaattgatcaacaaaaattgcgcaaaatccgacaatcgatcagctagtgaaaatgctggcggatcaacaaaaaatggtgcaggaccaatcacagcaaattgctcaattgattgcgatccgacaaaacgcaccaaatgcggcggcacagcccaatcaaggagcaaattcagtgccaatattgccggacatttcaccattcgagccaacggacgacaagagccgaatttcggaatggattgagcgattcaaattcgcgttggattgcacagcaccaacggcggacgacgaagtcaaggttaaatgcctgatgaataagctgagcgaatcggcattcagtgaatacagcagatcagttctgccgtcgtctgttacagatttcagttttaaagtgacgaccgaaaagcttgagaagctatttgccaaggctcagtccatattcatcgaccgctacgagtgtttaaaagcggtgagaggagaaggcgaacaattcaggcagttcataaatcggcacagaaaattgctgaccgattttaaattcgatgagctgacaaaagagcaatttaattgcctcatgttattgatggcactcaaagcgcccaacgaagctgcattgcgacagcgaattctgancaaattgtcagcagatggcgccaacatcagctatgatggagtggtggaagacttaatcagcttcaatccacaatttcagaagcaaaggcaatcgaagcgacaagttctt

SEQ ID NO: 6134 - DNA, 5048 bp, Heterodera glycines
atcagtttccaatccccatttcagaagcaaaggcaatcgaagcgacaagttcttggaggccagtgaattcgattcgacaaaattcaaagccaaacatttcaacgaacaaatacgtcaggaaagtccaaagccaaataatttgccgaacaaattcaaagaaaggaccaacactgaggcaactacaatatgttggcgatgtggcttcggcgtgcatcgacctgacgaatgccgttacaaaacgagcaaatgccgcaagtgtgagtttgtcggccatttggacaaacaatgcgagcgtgtccaagagtggcgcaaacgccaaaatgccaaaaagaaaggcaacagccgcgttggccaccttcgtattggaatgaccacgcatgccgtcaattccatttcgctgctaaaaacagcggttctgttcaacaagaagccagttgaattccatctcgacacggggtcggacattgtcgtcattgatcaattaacgcacgaatatgttggacgaccaccgatcgaaaaatgcaacgaaattggcaaggctttcgacggcacaaaaatttcctttattggaaaaggattcggtacattcaaatttggtaaaattgaagtggagcaaacattttttgttgccaaagcaggctcactaaatttgttgagctgcaaaatgatggacttatttgggcttttagacgaattaaagctgaagatcagcaatcctgcagtaaatgcatgccacgcgaatggcaaaaaggctgaaaatttaatcccgaatgaagcaacgcagattgctgggacagaagtcgaaattcaaggcctggaaaaggcatttcacgaaattttcagtgaggaattgggccattgcctaaaggagaaggctcatcttgccctaaaagatgacgcaaggccagtctatcgcaaagcccgaccagtaccctacaattcgttagaggtggttgagagcgaactgagccggttggaaaagatgaacgtcatcaacaaagtcgaacatttggagtgggccgcacctattttgattgttaaaaaggctgacggatccgcccgactttgcattgattactctacgggcctaaacgatgcccttctcgactgccaatacccacttccaataccggaagacatttttgcgacgctaaatggaggcaaaattttctcacaaattgatttgcgagacgcctatttccaagtcgaattggacgaaaattctaaaaatttgtgtgggctggcaacccacaagggcaattaccggatggaaagattaccgttcggtgtaaaatcagcccccgccatatttcaatcaattatggataaaatgttggcaggattggaatttgccaccgcctatttggacgacattataatcgtcagcaaaagcattccggaacacaccaatcacttaaaagaagtttttggtcgaattcaggcatacggattccgcgtcaaattggcgaaatgcaaatttttccgtgatcaaatcaaatatctcggacagattatcgataaaaacggacgccgaccggatccagcaaaaatctatgcaattagtcaaatgcctgcaccaaacgacattccatctctccgatcattccttggtatggtaaatcattaccaacaatacgtcaaaaacatgcggttcatccgaaaaccgctcgacgatttgcttaaaaaggaaattgattggagttggagtgaaggatgcgaaaatgcgtttcgaaaaattaaggaaattttggcatcagatttgctgctaacacattacgatccaaaaatggagatcattgttgcagctgacgcttccgaattgggcatcggagcggtcatttatcacaaatttcaggacggaaacatcaaagcaattgcccatgcttcaaaatcactcgcccctgcggaaaaaaattattcgcagattgaaaaagagggcttggcgttaatttttgcagtacaaaaattccataaaatgatttatggacggcatttcactctgcaaactgaccataaaccccttgtcagtatttttggcagcaaaaagggaattcggcagtgcagtgccaatcgtcttcttcgctggtccttaatccttttggcctacgattttacgatcgaatacatcaacacaaaggattttggcccagccgatgcgctctcgcgcctaatcgccaaaggaaatgagaccgaagacgagaaaatcatcgccatgatcaatgccgaaacggattttgaaacaaattttggccaaacaatttcaaaattgccattaaaattttcggacctagtcgctgcttctgagcgcgatgaaaatattattcaagtccaaaaatttgtcaaaaaatggctggccaaatgaaaaggccatggacaaagaaaatcaaattgtccgtgatttatgtcgaagaaaggaagaactttcaaccgaaaagggatgccttatgtatggagaaagagtggtaatcccgaaagtcttccactccaaaattctaaaattgctgcacaaaggacatcccggaatgaagaggatgaagcagctggcacgccaatatgtgttctggccaaaaatcgatcaggacattgaagattttgtccgtgaatgtgtgccatgtcaggctgctgcaaaagcgccaattaagacaaatttacagtcatggccaaaaacatcaggcccgtggcaacgcgtgcacctggattttgccggaccgtttttcgggaagcactttctgattgtggtcgactctttttcgaaataccccgaggtattcgaaatgtcaacaatttcaacggcaatgacaattgaaaagctaagatatttggcttcacggcacggaattccagaaacattggtttctgacaacggcacacaattcaagagcacggaattcgccaaatttacagcggccaatggaatcaaccatttattctcggctccatataatcccatgtccaatggacaagcggagagatttgttgacacgtttaaacgtgccttcagaaaattaaaaggggagggaatgtcatcagtgaaagaaataattgagacatttttggtcacatatcggaccacccccaatgattcgttgccggactcgaaaagtccagccgaaatgctcctgggacggaagccacgaacaactttggacctgctgaagccgcctccaattcagccgatcgaacgtgatcaggcaatggagaagaaattcaatcgccgatttggcacgcgtcctcaaattttcgcttcaaaggacgcagtttgggcccgacatcgcctttcacaaaattggaaagccggaacgatctgtgggtgttccggtgtcatttacaatgtccgatttgaagatggatccagcggtcgctatcatgcgaatcagctgaggttccgaaaggcgacccaaattgtcgaggacccattgaacattttgaatgaggaatttaatttgccagttcaaatggcaccaatggttaatggacaccaaaatgggcaggtcctagagaataggcctgacccgatcaatgctgaagatcaagtggaggaaccaccgatctgagaagagcagcaggacgtcattcaagctgtccgatcaccgacgccccaagctgttcgaccgccgacgccacaacgccgctaccctgatcgccgacggcaaccacctgtgcggtattcgccccgttagatcatttaaaaggggaggtgttcgggtggtcaaccccgagagatgaaagaacacatttgcattatttccctttgcatttgtatttttcttttcctctccattttccccactctctaattgttgtgtcttcctttattaatgtaagacactattgatttattttgtccaatgcatgtccattcccctcattcattcagttgctttttttgcacttatttcacttcgcctaaatatttgttctcctccattatttattcgcgcctccgacttcgcccatttttattttaaattgttttaatttatttgttctacaaataaacattttattgagtcggttcaaagaccgaacacaaaacaaggttgaattacggatcgggaaaaagccggagccgccggaatagggtgggaggaaaagcaatggcaccgttggtgaaataaaagagcacggcagaaattataaaattaatatttcaaaagtgatgcataatgagttgaaagtaatataaataaaataagttaatttattaataaaaaaaatagattattttaaacataaatattttgaataaatagtttgttattcatttccttttttcataaaaattattatcataataatatcaattaaagaaataattacaattattgttctttattgtaaataaaaaaaaataatttctattgttcatcaattaaaaaaatgtaaacaaaataataattgtttcaaaattatttatttattttttacattaatctgttaaatgtcggaatgaagagatgccagcgagaataagtacaaaaataaatagaaaattaatttgaaaattattgtcgattaggcaattatttaggcacccatttttcgaggttatgtaaagttctattaaataaaaaaatttaaaaaatattaatatattagtgatcgatgaaaagttttaaaaatcggctcccattttccattattacttaatcgtgagattcaatgtgccgttgatcagtttttaaggcattcattcaggcaaaaatattctcgatgatgaagaactaaattaaaagttcataaaaaaggtttgctaaaaactgccaaaagagtttgttttgaggttcaaaaaaccccaaaaatagttgctaaaaacgttcaaatttaggggtgtaaaatgataaaattaatccaaaaagcaagaaaattaaaccaaatcagtagtataacaatataatttttaaatttttgaatctgtcatttttccaaaaaaacttttgggaacaggaggtccgacggtgccgataggcgccgccgggaaaattttttgtaatttttaatgcgatttgttaacggattttgtccaaaaatgcccaatttttgcgatt

SEQ ID NO: 6135 - DNA, 1573 bp, Heterodera glycines
agcattgttttgtagctcttgtccaatattttgtgacatattggattgggtgtgaccgtgtttggcaactgcaaccaattccgcttgaagatgatccggaattgggtgcttatggacgagtggacgcatggattcgaaatcgaattcaaaacaatggattacaggggaggtctgcaagtttcccacaggaaatgtggaatatgagtgaaaggtgaaagtggaaatagaattttaagagacaaataacagcatcgaggggtggcatcgctctttcaatagccaattccgcttctttcatccgccattaagttattttgtcaaaaaaatgaaagaagaagacagacactggaatttgattgtgcaagatacaacaataacccacaaaatggaatgcgtggcaggggaatggcaaggaaaaacatttacgtacagcaggaccaagcaattcgcgccattttcttggatcgtcataacagaccttttttggcctatttacgtgcaatcgcttaacgaataccggaaccaaattgaatttgattgagatatttttaggaaataatcccggttccgtggtgactagaaaatatttttaaaaatttaaatttactgtcggattgtccacttctgtcggattgtccgggagccgttataggtagtgatcaaatttttttacatctccaagagaacttgggcctcctttaacaattgtacaacctagtaaaaacatagtaaaattacactcagtttttttattatatatacgttagaatgataaggcaactcatctcaaaaactaatttgagaagaacggctaagcgcgcggggctgaaattttgcaccaaggggtaactcgagacggggcatctgggaaaactataggttttttggtccgaggcccaactgagtaccagcggcttataaaccgactttgccgacagtctcactgttacgaaattttttgcttttgccttcagcgcttagtggaccccaaaagcgaaatgccccaactatggcctacaactttgccagcaaaagttttttgatcagaccaaaggcctggtctggaaaaatggcagatcgaggcctactcattttggacacttcagtaccagctgaatgccgcgccagggtttgctcggagcgggtagtcgccagcggactttttgtagagctttcaaagggctatcgaaccatgtttaaaaatttcgaaaattttcaaaaattttcgagctaggcctaaaaaacgattttttggtttttgaattttatgattttttaacgaattttcccagaaaaacggagaccactttcaagcaaccgtttttcgagctctatcgattggtatttttttcggaaaaatttcgatttttttccggaaatagaaaatttttttggcctgagcgggacatttgagtcccgggcccataactcgtcgggggttggttttagcgaaagattgccttagagcaaaattgtagagcttttgatgctctatcgaatggtgtaggaaaggtcgagaaaatttcaaaaattttcgagccaggccccctagaaattttcggaaatttttttt

SEQ ID NO: 6136 - DNA, 3810 bp, Heterodera glycines
  unsure (1)..(3810): unsure at all n locations
agcaaaaacgcacacatgtactggccaataatcctaaattatttttgtaacttgtatttatgaaataattaaaagaaaaataaactggcaattctcggtcataaattgtctcccttcaagaagctctatggcgaactaaataggaaattgaattcataattttgcatttaaacttgatttaaagtaacagcaaaaaccttttcgaaagccgtccaattattctccaaaaattctcctgtcgccttcatggcctcttctatagccctgtccaccgctcttttctgccctgtccttcgatgacctctcctcaccaactaaatcaaactaatgcatatgcataaaaaagcataaccaatttttgaaataatttttgcctttcgacataatccaaaatcagaatacaattgatcaaagttctgatcaaacggtaatgataaagaatggggggtaccatagtctaatttattattttcgagtaaaaacgcgaatcttggggtttcggagatttttgactttgccaagtctgatttttcgtgtcaagtgtttgttcaacgaaaacaatacaaaatgctaaaagcaggcaatttggtctgtccgcaagagggcattgagatataacggaaaatatttacgaattgttttccattttttagaattaaaaatttcttaggcaaattctttttttgtttccctttttgcttaaaaaggcgacaaaaggattaatgcgtttcaatcttcaacagaaatgataaacctccttggccgttagacgggcatcctccatatcgtcggcatgcccagtgctttcgtccaaaagcttctcctccaccgccctaccggccatagtggccacaatacggcctttaattcctttactgagcagtcagcattcctcttcctggtgctatttgtgacaccgtcccgcccttctcgactactgatggttgaagagataaagagttcgggaatgtcccgattcttgatgataacaattgaatgtgccgcttcatggccggccaccaacgcctgggttgttcttccagtgataagcgattcttcaataccattatagaagttgcgccatctatttctctggcctttcgacgcccttgagttccttaccatgctttaaattcaaccgtaattggggttttaggtgatcaatttgcagtcgaaaaaagtcattttccttcaaaatccgagaaaaccaagacggtatcaatttattttcgtgatcagtgacctcgataatcccaatatgaatttttttttaattttgtgaggaggaggaggaggtagcaaaacacggaagtacctaatatccatcaaccatcaccctgcgcaaaaatgacaagctaattggtacgaaatcacaattattcagaattttagattggacataaattttgacaaaaaaaaacggatacaaacaaatacatgtaccaaaaaatgcaaatgatcagaggaaaatgacacaattgtataaaaacgtgccttatatacacacccaaagcaattggtatttgcattgtcaaaaacatttgttgcgatggaaacatgttttcatgatttttgaaaacaaaattattttttcaaaaaaatggctgaggaatttgtctataaaagggcgagaatttggcatttccaatcatttcaatcgttccctttattctaatttgctattcttctatccacttcttcgactacaacaacnccatttcaagtgcacaacagcgntggacgcatgacggattcattggtggagctcagcccgggagcgctcgtctccggccgttggactgtcatcaagaagcttggagctggcgcgttcggtgccgtctacttgtgccaagaccaagatgggattacaaagggagcactgaaaaccgagccaatcaacgcgccattcccacttctcgcgctggaggtagagtttgagtttgaggggggaacacagaaaatttggtgtaatttttgtttccctttatttcaggccatcgtgttgcgcagctttgacacacttcgagcgagcagtggaaagcatttttgccgttgcatggaccttggacgcgaccaacagctggatgctgcttctggacgtacgctggagttcaacttcattgtgtgagctttgacagggccggatgtgtggagtacataaatctttgtccccccattttcagcatgtccctggttggccgtccattcgacaagcttttgcaagaatccggcgactgcttcagccccggcactgccatcggcgccgcactccaactgctcaaagcactccaggccctgcacgaagttggctatcttcaccgtgacatcaaaccagcaaattttgccatcggactgccggagacgaacgagcagcggcttctctacctcctcgacttcggcatgtcgcgcaaatacctcaaagacgacgtgaggagtttcactgctgctttttgtttttgaatttttcaaaatctgtatcccccgcattttcagggcactatacgacgccagcgggcctcagcaaactttcgtggaacaccaatctacgcgccgatctccgcgcacatcaaacgcgactacagccgtggggatgacatcgaatcatggttctatgtgctcatcaaattctacaaaggcgccgtcccctggaagttcatcaaggacatcaacgaggtgagtttttgcagcgccaccaggatttaatgatgattaattaattttaatggtcccccatttttcagattggccagtacaaatgtcgccgcctgaaggacgagccggccaaagtgcgaaaagaggccctcgaggagctgaccggaggatgtccgcccgagttcaacaaaatcttagcgcacattgtgagttttctccgtctcattttttcctcttaatgctttgcatttttcaggatggtttggagccggaagaccgccccgactacgaaatgatcgagaagacactgcgcggctgcctcaagaagttggacgtccgggagcatccatacgactgggaggtcggacgacagaacgtgccactccaacaacggcaggcgagcagcgaccaggagaagaagaagaagggcggttcgtcgcacaagaagagcggttcgtcggataagaagagcgcttcatcgcacaagaagaagaagagcaactcagcggaggacaagaagaagagccaagcgccgcagaagaagaggaagagcaactcggaggaagaaaagaagaagaagagccaagcgccgcagaagaagaggaagagcaactcggaagagaggaagaagccgtccaagaagaagtgagcgcagcgggaacggcacggcaccattctgatcaccaattgctcaccattgtgcttatatatatatatatattttttttttttgtgagcggcggagcccatttgatccccaattgctcatcattgtacatattttgtgagtggccccatttgatccccaattgctcatcattgtacatattttgtgagtggccccatttgatcaccaattgctcatcattgtacatacatattccagtgatcaaaattgcctgtatgtacacataattatttgctcaccaatgttgtaatcatttccatgtgcaataaaactgatttgatgtgattacaaattgtgtcttagtttgattacatcaaaaattaaaatggaaaattaagcttttgagcaatactttgaatttgatggaatgtttttaacaaagtgccataagttaaaagcggtcaaaatttggcgcaaattgcgcatttttataggaaatagcaattgtagtccatccttttcctgctccc

SEQ ID NO: 6137 - DNA, 2221 bp, Heterodera glycines
tttaacattgtaatctccctaccggaaaatgcttttgctacttaaaaattgtaattacattaccgcgaaatgcattttcgtatttaacaattgtaatttccctaccggaaaatgcttttgatatttaacaattgtaatttccctaccggaaaatgcattttgtatttaacaattgtaatttccctaccggaaaatgcttttgacatttaacaattgtaatttccctaccggaaaatgcattttgtatttaacaattgtaatctccctaccggaaaatgcattttcgtatttaacaattgtaatttcattaccgcgaaatgcattttcgtatttaacaattgtaatttcactaccggaaaatgtttttgatatttaaaaattgtaatttcattaccgcgaaatgcattttcgtatttaacaattgtaatttcattaccggaaaatgcttttgatatttaacaattgtaatttccctaccggaaaatgcttttgatatttaaaaattgtaatttccctaccggaaaatgcttttgatatttaacaattgtaatttccctaccggaaaatgcttttgatatttaaaaattgtaatttcattaccgtaaaatgcttttgatatttaacaattgtaatttccctaccagaaaatgcattttgtatttaacaattgtaatttcccgtagtcctgcctcaggggtatacggtagggggaaatggatggcaccatcgtgttccccgtgcccgattacccactgtggacccatccctggcccgatcagtgcactgatcaggtctgggatgggaaattactgatcataaatttggtcaatttggccactttttcacaaactcactacaattgactaatgtgtaaaaagtcggcaaattgaccaaatttatgatcagtaaattttcattgtaatttcaaatctctagacatatgtggtactcagaacttatgagacacatttatgataataacattatataggacacactatcctattttcctaatactgccccgatatgctggaaatggatagtgtgtctccttaacattgaattagataaatgtgtcttgggcggcgcgaattcagtgttgaaaagtgaaaatttacgattttcgactttttgttcgaatccgggtccggggttcaaaattggtcgaaatgaatgtcatattcgtgatcagcggccccgaaaacccccggaaatgtattttcatgactttttttaaaaattttcaaaaaggcccacttttacagtagcgcctaatgttttatcgcggattatgtatggactggttgaccgatggagccccgagaccagcgtgaccgagacttctgcgcgattttacgggattcccgctcctggtcccgttatttgcccagcgggattccaggtcctgctcccgcaaaattttaaactcgcccgtaaattgttatttaccagggtctatagtagtatgcttaaatgtacattttgtggttgcctgtattcaatgtttgcacatttattaccaggtttattacacacattgaacaatgaatacgcaaacactgtacatacacacaaataacgaatatgaagcagcacattaatggatattatacatacatacatattttgatcacattaggaaggtcgctctgatcacatggaatatgtacaaaatatggggaacgaacttcacacaaacaacagcaagcagtaggggggactgatcggaagggagaggtcgtcgtgcaccgtcgtcgttctcatcgctggctattcgtccgcttgggtcgtctccgctgtgctctgttctccggcgttagcggctggctcggcagcgtccttcttcccgtgcttgtccttcttggaacggcggttgctgtcgtcgctcttcccctcctttgatttgtgtttgtccttgcgcttctcctccttcttgtccgccgcagctgcgccgtcgcctttcttgtccttcttctttgccttctcctccgcgtcgccgccggtcgtggcttcttccttcttgggcgcttctttgtcgtcttcgctcttcggtttctccatgtacgtcttcgcgaagcactgaaaatttgaaaatttgtttgagatgtaaattttggagcgaacaacaacaaaaaaaaacttaccattcccgccccgaaggctgcagcgccgaccttaaagggagaagtcattgtgttgttgttgggcgctactgaagtcg

SEQ ID NO: 6138 - DNA, 848 bp, Heterodera glycines
ttaacaattgtaatttccctaccagaaaatgcattttgtatttaacaattgtaatttccctaccggaaaatgcttttgatatttaacaattgtaatttccctaccagaaaatgcattttgtatttaacaattgtaatttccctacctgaaaatgcattttgtatttaacaattgtaatttcattaccggaaaatgcatttttgtatttaacaattgtaatttcattaccggaaaatgtttttgatatttaacaattgtaatttccctaccagaaaatgcattttgtatttaacaattgtaatttccctaccggaaaatgcttttgatatttaaaaattgtaatttccctaccggaaaatgcttttgatatttaaaaattgtaatttccctacctgaaaatgcattttgtatttaacaattgtaatttcattaccggaaaatgcattttgtatttaacaattgtaatttcattaccggaaaatgcatttttgtatttaacaattgtaatttcattaccggaaaatgtttctgatatttaacaattgtaatttccctaccagaaaatgcattttgtatttaacaattgtaatttccctaccggaaaatgcttttgatatttaaaaattgtaatttccctacctgaaaatgcattttgtatttaacaattgtaatttcattaccggaaaatgcatttttgtatttaacaattgtaatttcattaccggaaaatgtttctgatatttaacaattgtaatttccctaccagaaaaggcattttgtatttaacaattgtaatttccctacccttaaagggttttgatatttaaaaattgtaatttccctacctg

SEQ ID NO: 6139 - DNA, 4705 bp, Heterodera glycines
tttttttttttttaattttctcgggggggaaacgatgcgggggggaactgattcgggggggaaacggcgggggggaaacggctgggggggaaacggcggggggggggaaacggcggggggggaaacgagccgccccggtttagattagaattacggtaaatttagggattcaaattcaaaacttttgagcttggcatttcgttgttaaatcttaatctttaattatcttaatgaattggatcggctgatatattcgatgtaacaatacaaaattaaggctaagaaaaaagataaagatttacgcaacagaaacaaattcacacattttcactttctattaagcaccagctctgagtttttatttaatttcccacaattttgaaattaaacaacaatgtccgactctgaactgatggatacgctggaaggtggtctaaatcctgatgatgaattaaacgacacagttggtgatcccgactccatggaagaagatgaggagcaggaagagcgagagcaggatggggcggatgaagatccgatgctggagagcacttcaggacaaggtcgaaaatttagttaaatgcgaaaatagttttaacactttttaaattaaagcggacgatttgtctaagaagtcaagaaagttcgctggagggaaaaagaaaggtcgcaaagggaagcgaagcgcccgatcgggcgggtcgcgcgagcaacttcccgacgcgtacacgcattccagcacggaattgtgcacaatgttgagtatgacaaatgcggaatttgaatactctgaagacgacttcaaaaacatcacttccggaaagacggtcaatagtcgatttcaccagacacttcaggagttgaaccccaaggcaagctgggcacgtttgcaatgtgtgatgactgccaagtacaatgagtaccaggtgtacagcaacaaacttgaaagagatttcaattaattgttgcagaaaatgttggccgatcaaggaagacaaatgccgaaaaaggtgccatcgcgttcatccgccgttggcaacgccggcggcgcaactcccaaagaatcaatggcaagctcttcaccatcctttgtcaagcatcttccatctgggagttctgcaacaatagctgagaaagtggcgcctttgaaaattcggttgtccgcccgcaaaaaacgtcgtaacgatgactcggaagaagacagtgagaaaattaccgagaaaattttcaagattttacttttagtgaattctgatcaagagttcgagtctttgttgaaggagcacgaaagacaattggacgaacaagacaaagagaaggaggaaaagaagcaggcgagagtggcggccaagaaagccagagatacgacgaaacagcagcagaaagtgaagagacgcaaggaggaaggcggcgaggaagcggagggcgaattacaggtaattggcatggattagtagaggtgggactgcaaacatcgtacaaatgcaatttgatattaattttgcgtattcgtaaattactttttccaaataaggaaaatcaaaaatcccatacaatatgtcatttttcttcagcaagagcatcaagattactgcgaagtgtgccaacaaggcggtgaaattattctctgcgacacttgccctcgtgcttaccatttggtgtgctttgatcccgatttggaagagccgccggagggcttttggtcgtgtccccattgtgaacagaacggagtgccaaagaccgccgacggaggcgacgcaaacgctgcgccggggaacatggagaagtgcagagtgtgcaatgtgaggaaaatgaaaggccattgtatccatagattaaaatcttccctctcttaggagcatgatttcttgttgatatgttcacgttgtccaagttcataccacgcattttgtctatcaccaccactaacggaattgccaaatgaacacgaggattggacctgtcctcgttgtcaagtattgcctggggatggggaaattataatattgagtaggcatgggtcagaacttgaatggaaggggaggctagtcggaaagcacacaaaatttgagatcaaattttagaccaaagagccgaaaaatcggccggaaaaaattctgtcgtggcggtggatcgagtacaaatacccggaacaagtctctgaagaggacgcactcaaagaaggcgaacagcctgcaaacattgaggacgaagcgcgacgagttcgactgtttttgcaccctcaaaaagaaatgaagccacgcagagaacgcgaattttttatcaagtggaaatatatgagctattggcactgtgaatgggtgccagagcttgtgctcgagttgtactttacgcaaacactccgaatgtattggcgcaaaatggtgcaagaatattcgaacctaaaaaattaatttgttgtttttaggacccagaagttcccccggaagtcgatgatgggtccaacgaggacatgaagacgggcaaaattgacgacagagaaaaagtgatacgccatggacttattggaattgagacacaaccatttaaatttaggaggatgacccgcacaatttagaacagaaattctacagatacggcataaaacccgaatggatgcaggtgaaaggaatcatttgaatgtgaacaaattgaaaggaattttaaggtccaccgagttatcagccacgtttattatgagaagaatttatttgactatttggtgaaatggcgcgagttggtttatgaccaggccacttgggaacgcgatgactttgacattcccggcttggaggaagccattttcaaatattggatgcacaggtgccaattgcagtttatgcaacaaaaaacgatgtttagggagagaatgagcggcgaagcgatgccaaaatacattttgaagaaactgaacaaaaaacgggccgagcagggatttgtcacattcgaagaagatgagaaaaaaaggaaaaagcgtgagggcaaagcaaccattgacgtaatgatttggaagccgggaaacagccatcgcattaccaattcagataaaaaagaagtacgatgttcaacccgactttgtcagtgagacgggcggaacattgcacccctaccaattggagggcatcaattggctacggcactgttgggccaacggaatcgacgcgattttggcggacgaaatgggactgggcaaaacaattcaggtgccgaagggtagcggaaagacagcaattaaaatgccatatttagtcacttgagttcatttattcattggtcaaagaggggcattcgaaaggcccttttctaattgcggcgcctctttcgacgctgatcaattgggagagagaggctgagttttgggcacccgacctttacgttgtcacttatattggggacaaggaaagtcgatcggtcgtacggtgagtattcccttttcttaaaatgattgttttcatgtttcactttcagtgagcacgaattttctttcatcgaaggcgccactcgcggagggccaaaggcaagtcggttgcgcaccgaccagggcatcaaattccacgtgatgcttacttcgtatgaggtgccaatgtttgcttacggtgtttttctgttttgcaacaacagttaatcctttcagttggttagcattgacaaggccattctttccagcattgactgggctgtcctggtggtcgacgaagcgcatcgtctcaaaaacaatcagtcgctgttcttccgcacgttgcgcgagttcaacatcggctaccgtctgttattgacggggactccactccaaaacaacttggaggagctgttccatttgctcaattttttgagccccgaccgcttttagtaatatcataaatatactcatttggattaatgcttaaattgtcgaaaatttgtgtatttaagtgacttggaagacttcaccagagaatttgcagaaatttcgaaggaggaccaaatccaacgtttgcacacacttctcggcccacatatgttacgtcgattaaaatccgatgttttggttggcatgccgtcaaagagtgagctcattgttcgtgtggagctgagtccaatgcaaaagtttaacactttttgggatttttattaattatcttttaaggaaatattatcgacacattttgaccaaaaatttcgaagctttgagtgtgaaaaatggccgttcacaaatgtcactcttgaacataatcatggaactgaaaaagtgtgccaaccatccctttctgttcgccaaggcgagcatggaagcgcaaaaacgtccaaatggtgcttatgatggcgaatcactgatcaaaagtgccggcaaatttgttttgctccaaaaaatgttaaaacgactgaaagagcaggaccatcgtgtcctcattttctcgcaaatgaccaaaatggtattcccttatacaaattaattatagtaagaacttaattttagttggacattctcgaggatttgttggactttcttggttacaaatttgaacggatcgacggttccattaccggccaaagtcgacaagatgcaatcgaccgattcaatggtcagaattttttcattaccagcatctaacattggaatttagcgcctggtgcccaacaatttgtctttctgttgtctacaagggccggtggacttggaattaatttggctaccgcagacaccgttatcatttatgactctgat

SEQ ID NO: 6140 - DNA, 2295 bp, Heterodera glycines
  unsure (1)..(2295): unsure at all n locations
atgatttatcgtttcgttactcggaattctgtgaggnagcgtattacatcagtggcaaagaaaaaaatgatggtaatcagtgcggggcatttttcaatggaattagattatatattcattcaatgtcagctcacncatcttgtgttcgcgctggcatgnggcagaagggcccttccatgtccaagacggagttggacgatgtcctccgttggggcactgaagaattgttcaaggaggaagaagcgaacgagctgggcaaatcaagcgaacacaacatcgtgtgggatgatcgggccgttgacgcactgctggagaggggggcagaggaagaaggggacacggaagccaacgaacgcaaagactgggccaacgagtacctgagttcgttcaaggttagtaagacaaattttttttgtgactatcacttttaggttgcaacttataccaccaccaaagaggaggaacaagaggaggaggaggacatggaagtgttgaaggaggaagtgcaggagacggacccggactattgggaaaagctattacggcaccatttcgaacaagaacaggaggtagagcggatgaatttgggcaagggcaagcgtgtgcgcaaacaagtgaactatgccacggaggcattgcaacaggactggcatgccgggactccgggacaggtttagaattgatttattcagctaccagacaaatttaaccgaacctaataaactttgtaggaccaagactattccgattcctattctggtgcctcagaccatgatggttctggcagcaacgaagacgagtttgactctgcgcgtgaggaacggcgccgtaagcgagagagagacagcgagaaactgccgccactgttggcacgagttaacggacagctggaagttgttcaacattcaatgaacacatttcttgattccgccttgcttaaggtgctcggtttcaacccgcggcaaagacgcgcctttttcaacgccgtaatgcgctggggaatgccaccccacgacgcgtaccaatgccaatggcttgtccgtgacttgaagggcaaatccgagcgggcttttaaggcgtacacttcgttgttcatgcgtcatctgtgcgaaccgggagcggattcacaagtaaaacggatgtaacaatctgataatgctttacatgaaggaatgcttcaacgacggagtcccccgcgaaggcatcaatcgagtgcaagtgttgacacgaattggcataatgtcattgatccggaagaaagtgcaggaatttgaagcaatcaacggagaatggtcaatgccggaggtaaatcattctttttaactaaacaaaattggcaggatcagttgtaattgtatagctgtatttaattttcttgaggttcaaatgcgaatgttggccgccgccgaagcggcgcatgtggcgaaagagcgtgagaaggaagaacgacttcatcagaagaaggaaagagaacacacggaacgcgaccaaactccgacagtccaaaacacagaagttgaggagaaagtatgcttgggtgggattgaccaatgtaaagccaattgaatcggtcattttgtgtggacaatgccaaattcgaagtggtcgttatgaagcatttttcacaggaccaaaagactggtggcaatcaagaagtggaaatgattgacgcagcaacagaattaaccgggtcagaaacggatcgaccctcatcgaaagtaggggaagagaaggacaaagaggagacgtcggaagagaagcaacaactcgaggaaacggcggaggagcctctccatcagcaacaacagccgcacagagagccaaggccattattcaaattcaacattgccgacggagggttcactgagctgcactcactttgggtcaacgaagaacgagttgctgtgcctggcaatgaatacgaaatttggcaccgtcggcacgattattggctgatgtgcggcatcgtaacgtaagcggatttatttgttcaaattgcgccttgttgttagctattttattgaattccttattttatatgcagtcatggctacagtcgttacaatgaaattcaaaatgatcctcgcttcgcaattgtcaacgaacctttcaaatcagaacagggaaagggcaactttatggagatcaaaaataaattcatccaacgtcgatacaaggtaaaagggcaaaaatattcataaattcattgcctaaattgtaagagcccttttaatttattattttagctattggaacaagcactgataatcgaagaacaattgcgtcgggcggcct

SEQ ID NO: 6141 - DNA, 3373 bp, Heterodera glycines
aatttttcgaaaatttaccactcaattcggaaaatttacggttcatcatctttagccattttacgtccatcatcttcacgattttttttcgcgtgtgttttatccacagagaagctcaaaaaatcgcattttctcaccactcttcttcatctcaattaaagggttttaattcaaataaaaaaataatttcggacttaggcaggtaaaaaatatttcgtacttatcgtgatttttagaaatattttcgtcttttttaaaatttaatttttacaaaaaggacttcaatatcgtttttttttcttcgcccaaaattttttcaagggaacggaattttaggtgctaaaaattcgcgaataggtactaaatagttgctaaaaactctcgctctaaagaataaatttaaaaatttagataatcaatacgtttcacagacgtggttaaataatcgcagccgatccacgtgaagcagggaacttttctcacggatcgacgtaggcgtaagtttaaaattaaaaattataatacgatcagctcaatttaacttttataataaatttttataattttctttttttcaaaaacttaagcaaattttcggcacttttctcgtcggtcgcccaaattttgcactttttttcgtcggttgacatagcaccttttcttgcaatcatgggactcaattcattagcataacaatcatcggaattcaatctcaccgattcttctgcatctcaatcgccaagaatcaacccaccagaattccaatcactggattcaattatccggcattccaatcattgggactcaatccaccatcattccaatcgcctccaatcgaccagcattccaatcactggcactaaacccaccagcattccaatcactgggactcaattctctggcattccaatcactgggactcaattctccggcattccaatcacttggactcaatccacaagcattcaaatcactggaactcaacctcagcaaatttcttcagcattttaacttttttgtgtgcctttgggtgttgaatcgatgggaggcacggccgcttcgcggcttcgcacctttttcttgcaatcatgggactcaattcattagcattacaatcatcggaactcaatctcaccgattcttttacatgcatctcaatcgccgggactcaacccaccagaattccattcactggattcaattatccgcatttcaatcattggaactcaatcctctatcattccaatcgccaggatccaatcgaccagcattccaatcactgggactcaattctccggtattctaatcactgggactcaacccacatgcatttcaatcactgggactcaatccaccagcattcaaatatattataatgaacttctgattttacacacaaaataaaaaatttcctggcatactaacataaccatcggacaaaattctctttaatttcttataaataaggtttaaaaaaatctgcagaaatattttacgtgagaacaaacattttctccgtgaaaaacttatattccgcctaatttccgatagaatgacttttattaatatttttttaggtattttcgcataaaaatagcacatattttggcgattttaaacataaaacattttatggcaaaaataattaaaaatagggaaaaatttgaattacgcgcttggtacttggaagcaagaaatgcatttttaaaattcgatatgtttggataactgaaacttgaagattaataaaataaaaatatccttgatttattaaagataggtaccaaaagctaaggacgcttattttttgaatatataataatattattttaaaaattgttcatatagtgcgaagtaaactaattatttatttagttttaatacctttcataatgtactaatttgttagaataaatttgaatttttgacaaattgcaaaaataacaataaactaactttaaggttggacaacacgacgcaccgaaatatgaaaccgttccaaaacttatggaagattttgtgcgcgatgttaaccaccatctgcatagaatggatgcgcctgaattggctgcgagagctcatttcgagctggtaataaatttaattaattaaaatttataattattgaaatttggagaaatgaaaaaagaagaaattatttttttattaaattaaatgaataatggcctaaaaggcagaaattccctactttctccttgaccgcaaccgtcagtgaatcaaaatttttagatcaacgatatactgtagaaataataattttaatgagaataaatccgcaataacaaaaagtgttcgtttttaaaattttcaaaattctattaatgttttcgaatattgaaaacaaaatatcaaattctgaactcattttttattaaagaaaattattttcgaaatataacattactgatgcattttctactggccaatttaattactattttcaacagttttatttgctttttccacataggtaaatttattttttaaactaattagaatccaaaaatcatttttggtgcaaaatttcttacaatttcatgaaaacccaaactttcccagtggagtgcccgtcggcaccgctagattacttactgcttattttgttttatttgcacaaaatatcctgaaattggcttcttgttataaattctgttagcacattgcttttaaccaaaaaaaaagttttacaaaatctaaaatggctttttttggctatttttcatgttttttattttttaaaatttttttggtgatatttatggcttttttaattttttatttacttatttgacgtttgtatatttcgtgactttaacccctctcgtagatatttttatttcctaatttaatttaggcctatatacatccgtatatggatggaaatgggcgcgtttgcaggctagtggcaaactggattttgtcaaagggccgattccgaatgttcgagcttccggagattgcccgagacgaatataacgcaggccttgatttggccgtacgtggaagacgtgaagggcacgcgacgggccttgatgcgaacatcaatcgaagtggcgagcatgattggccccgaccctttatactattaatatattttcacgtgcagaatgcacagcaagaaaatgttacatttgattagttgcattaaatttaatttgttattcttattcactgcttattaaaaattattgaacacgaagcaattttaagagattcgaataataattagagaccggattttgaagtaaatgcctttttaaaaaaatatttacactcaaagatgttgagaaactaaaaaatgatttcactattgtgcggtgaattcttgagttctcagtacccgtccttcaac

SEQ ID NO: 6142 - DNA, 2784 bp, Heterodera glycines
gcgataaaaatataaaaaattgctaaaaatatcgaatttatttttgcacgattttatttcttgaattaggtgatgtgctgtgggcaccccgaatgcgactgaaccaaaaaagcaacggaggacacaagaaaatgtttgaaagaaaaaacagagaaaatgaaagaaagatatatggattatggttgatgattagggttgtaaattatatggattaacatattttttctgcgcatatgctatgaagaaaggggcttaaaaatagcatttctgcgttaaaattttttgatttggtgaaggtttttagtccatataaatccatattttggggttttcgggaataaatccatatttcgccatttttgggtttttagtccatattttggccattttttggaaattttcacaagaaaaatgaaaaaaaaacgaaaaatacacccctaaagatcaactttttggaaatttttaaaaattacaccccacaaaacacgaaaaatttgagttttcgtcgtcattttggcattttcaataaatattttcgtcatttttttgcgaacatttcttttttttaatgagaattttttcgaaatttggcaaacttggaggtgtttttgatacaacgaacaacaataaaaaatatgcatttttaagttttaaaccccattttttggttgtttattgtactttttaggtttatttaagcaaatattaaatatgcacaccttttttgggatttttgggggtttacaacatatattttggcattttttatccatattttggtccatatttggccatttttggcctttttagtccatatttcgtgcttttttagtccatatttaatgtccatatttcgcgttttttagtccatataatttacaaccctattgatgatcaagacaaattcagctaaatttggataattattaattttttttttgcgattttaagtatccaaaaatcccaccctaattattattattattgtttttatctttattaattagtaaaaaaaattccaaaaaacaaaataaatttacatcgcttttgacaaatatctaaaacatgtatgctaccaaattatgccaagtaactttcatttaaaaaataattaaaatttacatagttacagcctgggaaagttttgacaaacgacaacttttggcagcatacttaaggattttaaaaataatatattaaaaagagtgaagtctataaaaacaaaaattttctaaatatgcaaaacgcaaaattagcttagcgaattttaattatgtttggtatgtaaagtttttaattaattatatcactcaattaaccatttttaggaaaaatgccaaaactgtgacaaaaagaaaatagggacgaatagggctcctatttttagtttttacctagttttttctctgagctccttatggcctgaaatgcacgtatacaggaattattttaaaatttatgttttaataaaactattaaattgattttgacaactattaattaaaggtggatcagctttggaacggtgtggtcaaataatgaacatccatgaaagtaccacaagaatgaaaattgatgaacaaaacgatttaatttgctaaaaacttccaaaataataagtttaggtctaaaaaaccccaaaaatagttgctaaaaaatgccaaaataataagtttaggtctaaaaaaccccaaaaatagttgctaaaaaatgccaaatctgtattgagataaataatttttaaaatcaaatattaacaaagtacataaataaatttggttatgaattttgagaaatttatcatttcttgagggtgtattttttgaaaaattttttgtgtcactttcttagggaggatatttttgataataagatttgggtaaaacgccaaaatagtttttttcaattttttttagtttttaagtgctaaaaataaaaaattagaaaatagttgctaataactcgaaaagtagcttaacaacaacaacaaccgaaaaaacatgtttttcgtgcattttagaccacagggagttcacgaaaaaaatgaaaaaactataaatcgtatccctactaattacatttttagagcaaacacacgaatgccgtgctcaatgattatgccgggatggtgataagtgcgtgtgcgcaaagcaatttggtcggtttttctggtctttggaagcggaaatattttctgcgctacttccattgaaattttgttggagactgagcgggtaggggttagtgatgttcgagaccgataatttcccgagactcgagaccgagaccgagacttgaccccgagaccgagactcgaccccgagaccctagaccgataccgaaaaccccgagaccgagacccaaaaacccgagactcgagacttttttcaaaaaattttcctattcgcttaaaatttgtttaaaaattttttttgactctattcttaactaatgtttgtttttttttattttgattcaatttggtaaaatatttatcattccagaaacaccccaaacaaaaaataaaattttttattcacttaaaaatcaataaaataattttttcaaatagaaaaattatgaatcaaaattaaagtgcaaaaaaaccccgagaccgagacccaaaaaacccgagactcgagacttttttcaaaaaattttcctattcgcttaaaaatcgtttaaaaattttttttgactctattcttaactaatgtttgtttttttattttgattcaatttggtaaaatatttatcattccagaaacaccccaaacaaaaaat

SEQ ID NO: 6143 - DNA, 4093 bp, Heterodera glycines
accgtgcgctgagcccgttgtgtacaactccctccactcgctcctcctgccttcgacgaatcgtttatcgatgcgcagcacaaccccccccccccccgcgcatgtcattaattgatatttgtctgcactaaataaattaatttaatttgttttgcttattttaatttgttttttcatatttaaattgttttttccgtttttattttaccaatttctgatttaaatttcctggtgacacaaacataagctcaccctccccaaccattatcaatattttaatcggcggcgcggcgtaagtctgttagcattgtcaaccattcatacaaatgacctccctccccctggtcgcatttttcgcgacgttcggtatctcccacctcaaatttattatttttaatttgtttcaaactttctatttttcattcacatttattaactctgcaatttaaattaaattttattttacaaattcaaaatttcccactatttttaatttccattttctaatgtatttaatttttattttccatttaattttaattggttttcaatccgttccaatttatttattatttttaatttatttccaatttaattactaatttattttattttcaatttaatttcaattttaatttttttcattccattccaatttatttattatttttaatttatttccaatttaattcctgttttattttatttttattttcaatttaatttcatttttaatttttttcattccattccaatttatttattatttttaatttatttcaattttaattcctagtttatttttattttcaatttaatttcatttttaatttttttcattccattccaatttatttattatttttaatttatttcaattttaattcctagtttatttttattttcaatttaatttaatttttaattttttcattccattccaatttatttattatttttaatttatttccaatttaattcctgttttattttatttttattttcaatttaatttcatttttaattttttcattccattccaatttatttattatttttaatttatttccaattttaattcctagtttattttatttttattttccatttaatttcatttttaatttttttcattccattccaatctatttattattattaatttatttccaatttttaatttccattttctatatttatttatttctacaattcaattaaaatttaatttccaatttaaatttaaaaattttttaaaatttctccttatttacaatttctaatttccattttctctatttatttatttccacaattacattaaaattaatttctttaaaaatttttaaaaattaatcgaccatttttaatttattacgcaacaataatacaatacagctcacgaattgtttattttaatcatgttatcataaattttcttatatttccttttgaatgccccacaacccttcacccatcgaggtaggggaagtggggcattgtccgtcgccatttggccactgtcgcgtaacattttcttcaactgttcaacctccagtcccacatctgccgattccgaattcccttttttgcacacatcctcccgaccttcagtcccgtcctccaccatctcccccggggcagagcccatctcttttttcgcttcctctgttgtttccgccccatcagtttcttccccgacctctgcttttccttcattcgtgccctcagtcccggcatttatcgggagctgttgctgcaattcttcctccgctcccttcttttcgtcctctttcttttcctccttttgctccttttctcccgcggccgtagccattcccgagacttttctcttccgctgtcccgtctttttcatcttttcctctttcttccgctctctgtactctttgccttctcgatatcgctgccaataatcatttatggcctcttcacagttctgaatggggggtgggggatgaagaaaaaggatttagaaaatcagataccaaatccccgacaggtatccaatcgttggggtccttgggaaacccaacccactttaccaggtagtgttggtggccgttgacgcgcttttggccacatattctttcgacctcgaattcgtggtcagaagaatacgcagccgaaaccgcgtcttctaccatctccactacctggtcgtgcgggttgggacccaattccggcacttcgtcgacatcgggaccaaaggggacggtgtctgttggcaaagagttggctggagaaagagactcgtcgtcaggatagacgggcagttcgaaagattgttcaagttccattttttgataatgggaagggtagagagagctacttaaataggagcaactcataggagttttttgtccgatcacaaacattattcgtctctcagggcacctagcgcaacgttctcatatgaaaagagcaacagttttttgctctccgtcgctcgtttttgtccgaaacacccccaggcgcttgtacactgctcatgttttttgaacacagaagtttttgtcacatacccacgacaaaatgtacaaaggcagagattgtcgtgggtagaggaaccagtcacacccgttttttgcacatcgcccgcgggccgacgtcgcgcaaaatgcacattattttttgcttgtcatttattttggcatttaattgtcttttaacgaatcttttcaaaatatttttcaatttcctttttttttgctttcttccctttaaagtcccaaacccatgagcttgaggatccgattcgtggcttaagttgtcgtcaccctcgggaggggtaggccgggtgtatggcgttacctgccaacaccaggcagcggcttaggagggattgggaggcttacgttgcttcccacccgcagatagataggccgggtgtatggctttaactgccaacaccgggcaggggctgagggattggtggcttaagttgccaccactgtggattgataggccgggtgcatggctttagttgccaacatccggcaggggatggggatggattggtggctattttgtgtggcttatgttgccggcacgggagggggattgacgctggtataatgttagtcgatgcactatgtggaccaatattattcgtgagcatttattatattttaatgtgttcccaaaattctgtgaaaaaacatttaccaacttattccaaccctcccctcctcttccccattgttccaactcaacgaaaaatttatttatcagcgattaatgtcaaataccatccccaatcatagttaatcttaacactttcaatcccatgcaaacatcattcaccaaagccctcctccagaacttccaaccactgtcttcccgaccccagcaacaaactgaaaatgaaaaaaagtcattctgtcgatttgaaccaagaaattttctggcctcaaaaaacgagccgtcattgtgccgacgctcaaagtggccttccttgtagccatcccatgtgcgctctaaccgcaaatcccttaagcggcgctcctcaccggctcgcttttcctcctccaatatttgcgcccaatactccgggttttcacgctgtagtctcttcctttggatcagattttcctccttctctcgccaatcgttggcaacgagcggttcgttccatgctggaaaccgcgtccaccccgtgcctgttcgccggacaaactgctgttgctgctgctgttgttgttgttggtgttgttgctgttgatgctgctgctgttgctgctgctgttgcacatgccactcgtccgtccacggcgcatagagcacaacaccatccctccgttcctctccgatccattcacctgccgagttgctgacgggaagagttacgtccattttgctcgaatgatgatcacaacaactttcaaccgctttaaataaccgcacaaacgacacgtcaaaaccaaaaaatactaccaaggacaagtttttacacaaatctactgctcatttgactaataaccttctcatttcggtttttgattgacatctcctgcaaattattccttttttcgtcacttttctccccacaaatgcacaaccacaagttttttgc

SEQ ID NO: 6144 - DNA, 975 bp, Heterodera glycines
gattgataggccgggtgcatggctttagttgccaacatccggcaggggatggggatggattggtggctatttgtgtggcttatgttgccggcacgggaggggggattgacgctggtataatgttagtcgatgcactatgtggaccaatattattcgtgagcatttattatattttaatgtgttcccaaaattctgtgaaaaaacatttaccaacttattccaaccctcccctcctcttccccattgttccaactcaacgaaaaatttatttatcagcgattaatgtcaaataccatccccaatcatagttaatcttaacactttcaatcccatgccaacatcattcaccaaagccctcctccagaacttccaaccactgtcttcccgaccccagcaacaaactgaaaatgaaaaaaagtcattctgtcgatttgaaccaagaaattttctggcctcaaaaaacgagccgtcattgtgccgacgctcgaagtggccttccttgtagccatcccatgtgtgctccaaccgcaaatcccttaagcggcgctcctcaccggctcgcttttcctcctccaatattcgcgcccaatacaccgggttttcacgctgtagtcgcttcctttggatcagattttcctccttctctcgccaatcgttggcaacgagcggttcgttccatgctggaaaccgcgtccaccccgtgcctgttcgccggacaagctgttgttgctgctgctgcacctcgttttgctgttgttgttgttggtgttgttgatgttgttgttgctgcacatgccacacgtccgtccacggcgcgtagagcacaacactgccatccccccgttcctcaccgatccattcaccaactgagttgctgacgggaagagttacgtccatttgctcgaatgacgatcacaataactttctaccgtcttaaatagccccacaaacggcaaaccgaaaccaaaatgctca

SEQ ID NO: 6145 - DNA, 3036 bp, Heterodera glycines
  unsure (1)..(3036): unsure at all n locations
ttggccaagacaacaattggatggggagaccaattgaccnccgctcacccccacattaatgagaanacagaatgcatttgttaataaatttttgttgattgatcgtttatgtaaagggtgaganaattccctgattcctaaaaatttaagtgacagaattaagttntaggaaaatgttaaacgacacagaaattaatcagaaagaaaataacgaaaaaataattggattggctttgattttagtcatttatttgttttcgtttttgtgtttctgtgccgttatcgttagagaatgccaccgtgtcttttttagctaacaatgccgctgccccctgagctattgtttgaaatagttgaagcccttccctcctcaaaattgtctacagtcttcttgagcaatcgtctcttgtcgtcgtgggctcaaaaacgtctcagagggactttcaattcgctgatgtcacagaaacaagaatggaaaaatctgttaaaaatatctcgtttggtttttgaaagtcacaacggattaaatgtgcaataattggtttttagtttttagtggttttatatccgttttattgttaattcttaatgcgtttttaattagtttttcagcacaaatgtcagaatttctcattttccttttgggtttctcctttgcaatgcttctcatgttgtgtttgctggtttcgctggtgctctttgttctttgtgcagcatggtattattggacaaaagaagaagaaccagaagaatttgatgattttccagaatacccaccgccttattaatgaaataaattttttgttgaaatgtgtcatgaaaaaacttggtttaagccatgtacattttttctgctttaaaatttccatttgaaatatctaagcttttaactctaataatgttcaactcatccttttttgctgatgtcaaagaactagggcgtattccaacaccaaagggaaaatttagtgagaagaaaaatgaaactcaatttatgaaaatatttaggtatattttatgcacttgagttcgctaagctttatcaaacggttggacgtgaaatttctcgtgataaattccgacatatcatgaaaacagggaaaaaacaacatgaattagcattggttttgatggaaaaggctgggataaatacacaggagaaaacttttgggcttaaacacctcgaatttgtgcaaaacttttgggacaaagaattcccagatatatttcgtatcgttgcgtttgatatggtaaacgaacatttcctaaacttcgtgtgattgttttatttagaaaaccggacttagaccgattttcaaagggaagggagtaagaaaaaacgaagtttgtgtgataagagtgggcgaacattgggatggtttaaaatctgttactcaatttttcgccgtcaaaaatttttgtgtaagctgtgaggtgacattttggaccaaagaccgtcaccgaatggaatgtagggagcgctgcaaaaagtgttgccggatggtggttcgggttcccctgtttggatgtttgtgaggcgatacactgtggagaatgcaatcggaatttctacaacaatgattgtttcgagtctcacaaaaagacagcttgtagggagtacaagaaatgcaacaaatgtggggaaacatatcaaacacgatcaaaacacacgtgcggggagaaattctgtagaatttgcaaagtctatcatccgggtcggcaatgtttcattaaaaaaatcaaactccgacagcagaaagcataccgtattgtggcttatgacctcgagacgacggttgaagggggcgaacacaaaccaaatcttgttagtgccgcgcatacttgtagtgtttgtgtgggagaagagagggaatgcgaaatttgtaatggtccgcggatgatcacttggtctgtagcagatgggtttgaaccgatgagcgaatttgttgattggattttgggatttaaacgatttgaaacggttgcttttgctcattatggtggaaggttcgactcgcattttgtgttaaaagagctgactgaaagaggggtcgaaaccgagttgatgatggcagacctgaagatttatcaaatgaaagcgcgtggtgtgtattttcgggatttctggctgctcagccaaaacaagttggcagatcttccaaagactttgggttttaaaaccttagcaaagttgtacttccctcataagtacaacaaaaatgtgaactttggaaaaaaattgacacacctaccaccccttgaagattattgtccggacaatatgaaggaggaggaatgtgctaaattggtaaaatggcacaatgaaaattatagaatggaatttgagctaggttagagaaaatctgttttccttttaaaattgaattttaggagagcagctcaaggtttattgcgaaaatgacgtcgaaattttgatggaggcaattttgaaattccggcaattgtttttggagattactgatgggatggatgtgttgaaggacagtgtaacaattgcgggggttgtgatgagaatttttcgaacaaaatttttgagagaaaatcatctcccaattattccggaaggcggttatgagagagccgagaatcagagcaaaattgccgtgaagtattttgaatggttggctcaaagcaaaagagtgagacttagacacgcatgcaatgggggtgaagtggaaatcgggggattaaaagtggattgtatcattggagctgagaaaaaaataattgaatttcaggtaggcagaatttccttccctattttattttttgctaaagggatgtgcgtttcatggatgtccaaaatgttttttgccctggaccataggacccaatgggcgttgtatggaagtaaatttccgacgaactgagacacgaatggagtttttgagggaaaaatgtaaaaacttctcggtggaggaagtttgggtgtgccaatttcaaattttattgattgttgaacaaatttacgggtggggggtgaaagagaactgaaaaaaaatagggcgatgaaga

SEQ ID NO: 6146 - DNA, 1346 bp, Heterodera glycines
taattaaattttattttattatgactcctaacctattttgataatttattttattttttatatattaatttgtgtgcaagtatttcctttaattttaaaattttttccaatattccatcaatttttgccattgacagtgaacaaaagacatatcattttttgttatcccttctggcttagtttattgaattaaactgaaattctcgattaatccaattagattttgttttggattttcactgaatgaaaaaacctcataagggtcttttatacatggaaccaaattttcaaccataatgaagcaaaccccgaatatagttaataaagttaactcaaacggataggtttcaaaaaaattctttgaaattttttgggccggcaattaacgggcctaattaaattttattttattatgactcctaattattttgataatttattttattttttatatattaatttgtgtgcaagtatttcctttaattttaaaattttttccaatattccatcaatttttgccattgacagtgaacaaaagacatatcattttttgttatcccttctggcttagtttattgaattaaactgaaattctcgattaatccaattggattttgttttggattttcactgaatgaaaaaacctcataagggtcttttatacatggaaccaaattttcaaccataatgaaacaaaacccgaatatagttaataaggttaactcaaacggataggtttcaaaaaaattctttgaaattttttgggccggcaattaacgggcctaattaaattttattttattatgactcctaattattttgataatttattttattttttatatattaatttgtgtgcaagtatttcctttaattttaaaattttttccaatattccatcaatttttgccattgacagtgaacaaaagacatatcattttttgttatcccttctggcttagtttattgaattaaactgaaattctcgattaatccaattggattttgttttggattttcactgaatgaaaaaacctcataagggtcttttatacatggaaccaaattttcaaccataatgaagcaaaacccgaatatagttaataaggttaactcaaacggataggtttcaaaaaaattctttgaaattttttgggccggcaattaacgggcctaattaaattttattttattatgactcctaattattttgataatttattttattttttatatattaatttgtgtgcaagtatttcctttaattttaaaattttatccgaatattccatcaattttttgcccattgacagtgaacaaaagacatatcatttttttgtatccct

SEQ ID NO: 6147 - DNA, 2766 bp, Heterodera glycines
cctccaccaccaactctaacatttcatactcgaaaattcaaccaggaccgtactccacagcggggtttaaccccaaaattgccttgtctgttctgtaacgatccttcccatttttcttcgaaatgtttcgaatttcccgactcaaaaagccgttcggaacgtcttaaaattctgaaaaggtgcttcaagtgccttaaagagggccatttctccactcagtgtcctcacccgtcaacgtgctcattatgcaagggacctcaccctagagctctgtgttcctctcagccagtgcattcgaattcaactatgtatactcattcctcctattcgtatcagaacccaactcaaattgtccaaagccaacacccggattccgatcattgtcaaacgaatttaccatttcatcagcccgccctactcactaaccctaacccacgttttgcccaaccatacactgtcagtgcaacccccgttttacatcaatcgaattcggaagcagcccaaaatttttctcaatctgaacccactgatcaatccaatgaattaaatccttcttttcaaactaacacttccctaggtcttaataactcattaggtgatcaaccaattctccttaaatgtactcgtgtgacattttttaaccccgacaatcctactatggcaaaacaaggaattttgatgatggacgatgccagtactaacacctatatctcctccgttgaggccatttctcttaaattgtcaatgacacctactcttcttcgtttaggtgtttttaattcacccgaaactaaactcacccagtcattcattactaaatttggactccgccttttaaatggaaaatccttaattgtctccgctcataccgttaagaccctaacccaacccactcattttgtacctttctctaccgatgttttgacctgtcccgaaattttaagagactgtgaaactgttcttcctgttattcttttggggagtgattgttattacgaaattgagcctgtcataacccaacgcttaccctccggctatcacttagtacaaacactacttggacccattgttgccgggaagggacgtaaaattttaacaaattcaaccgatttttcttaccaaattactaacttttcctcacaatctgaagtcacttcgcccattgactacttttcattagaaaacatcggtgtcgatgatctaactaattacccttctgacgacgaaattcttgaaaaatttaaatctgagattgattttgtggacaatcgttaccaagtcatgtttccatttctttgtcctccacatacattatctattccctcaaattttggtctctgttatggacgattacggtcagtacttaatactgtctccaaaaaacacccctttctcgaaaaatacaacgaaatattttccgagcagttaaaactcggcattatagagaaggtggataaccctagtaaattttctcaccctttacattatttaccccatcatgccgtcattaatgagcagaaaggaaaattacggattgtttacgacgggtccgctaaaatcggacccggactcgctctaaataattgtctccaccctggccccgtcattttgccacaattaattggactgttaattcgatttcgatttccacaaatcgcaattattgctgacatagaaaaggcgttcctccaaatttccattcaccctcagcaccgtgattgtacacgatttttatggcttaaggactcaagccaacccctttcccaacaaaatatacaaattttccgattcggtagagtaccatttggactatcatgttccccgtttctgttagctgctacaattcagcatcatttatccctatccccttcgccactttctaacgaaatactgaataacatttatgtcgataatattttactcaatgcctccacctcctcagaaggccaatccaaatgttctgacgccatttctctttttcaatgcgcttccctaaatcttagagaatttaccagcaattcacccgagactctcgctcatctttcccatgatcaaaagttgaccggtccaaatcaaaaatttttaggcattaaatgggtcactgacactgattccttaatttattgcctttctccacccccgcccaattttttattaacaaagcgctctgttttggcctttgtttcctcgttttatgacccaacaggactcatttcacctgttttactttcacacaaattattcctccagtctttgtggcatgaaaaaataggatgggatgacattttaccaaaaaattgtgaagaaagttggtcaaaattgtttacccattggagcccaaattcagaaatttcgattccccgtttcatatctttcttgaatgttaaagacaacaaacactatcaattgcactgtttttctgatgcctctaacaatgccatgtctgttactgtattcatgcgcatcagccattgttcacaagaaaatgccaagtcacaccttatatttagtaaaaccaaaataaaaccattacccaaacgttctcccgcacttctcaccataccaagattggaattaattgctgctttactgggtacccgagcccttaaatttgtcttttcccagctaagtgaatttgacttagacccaatccttaatttgtgggttgattcatctgctgtaattgggtggctccattcgccccctgagcgtgacatttttgtcaaaaatcgcatatcccccattcattccacaaaaaattgattg

SEQ ID NO: 6148 - DNA, 3441 bp, Heterodera glycines
tactaaattccaattggcatttgaggaccccttcagcggcctggaagtgtgggcattatgaaagacttatttctctgattaagtaccatctcagaagaactctatcagctggtacaattccccgttcattaaaatttgaggaactttcgacccttttatttgaaattgaaagcattataaacagtcgcccaatttgtttcgattctgctaaccctgctgactctcgccccctcagacctattgactttatacgccctcttaacaaatattcagaacaattcccactaaatatgcaaaattccgatcccgaaatagctaattcctcgaccattcaatcgatgtcaaatttgtggaattccctttctcaaatttctaaaaaatttatgtcatcctgggctagtgaatatttactttcgcttagagagcgtcataaaaaattatcttcctcaaatccacgatggccccatataggtgaacccgttcttgtttataatgaggtgttacctcgctctgtttggtccctcgccactgttcaaaaggttaattttaccccttcaaattttcctgacactgcgcaaattaaatttttatcgggacatatttccacacgctctgttcaccaccttttcccgttagaagcctccgaattttgctcaaattctgcggaaaataatagcggaaatgaccgttctcacattcccgatcatacaatcattcccacgattgttgatcacaaggcaaatacccgtgagaaaataaaattcaattgggccaatcatccgcctacccgagaaaatctttcacacgcattgcgcccagtaaactcggatcacaaaaggatgtgggctcgaattccgcccacaaaggaaaatctcgatattttaaatgatttcaatctgtaaacatttttaaactatgccctccgatcgggcagtgagaaattatttgtaattttgttaagcattcatcccatatttaagcatcaaatcaccctattgttaatcattctcaacctttgccttcaattaaaaaccaatgggaaacatctttgctctcgagttagcctaccaccaacacccacctgaacaaccctcacacccattttgggtttatcttgctattttgttcgttggcctaattgcttgcgcctttttggtgattgccttcctcttgtttcggaaatttgcatcccgtttcttgttcaatagaaccccgaacacccagccacttgaacccgaacgtgcccattccccctcagctatccctaccgtttacgtagtttttgtattcgcatttatcatttccctgcccattattagtgcccaacccaaagggggctcattaaaaggaatcgttaaacccgtggctaaagggtccttgcccattcttggaacgtccgctctttatttcgggattgatgccctatttggtaaagccgaaagcgaagccagcctccaccccgtccttacattattcgctttgcttggcttaattgtcactatcttgcttcttctgttcattaaattttttgtcgtccttcgcaatcgttttcgcgcccctccctcaccaaacaattcggaagcattgaatgccctgccccctggttcaattgaacttgaagaaatccgaaccgttttgaacgacttggttagtcgtgccgacccccctcgtactttccgttctaacccccctcacgcgtaaacacagaatttagatgaaaaagagaaagggtgctaaattacaattgtccgctttgaatagtattcgttcttatttaaatattgaccaaattcccgaaattaactcctcttcacattccacaaccccaggtgattcagaaaacgaaatggaagcctccctgagtctctcatccacaccccttaatcccataatcgtttcctcgttgcctcctgacactcttggccttaccactaattctggcactccgaattccccgccaatttgcaccgaaccaacccctgtcaccgacatttccccatcaaattgtgaccacctcccttgctctgataattgcccaccaccttgcactaatcttgccaaacacaccgaacattctccacaaattgacaccgacatcaacgacgcctcgagtatgccaaaatgtccagcctctccgactttcgtcgtgttggtcgatgactcggcacacccctctgtcaatattggaccacccgaacaaatggcgaacacacccactcctgtcagtccaccggttgtttcactttctaacccaattcaggtcattaccggggtggtaggacataccaaggggaaacaaattcacacttttaaacccaagtgtcaaatcacacaatcacacccttctcgcacgcccactgttcactctaaactcggacacgcatcattggccacacacatgcacaatcacacttcccaaacaccggcacgcggacaaccgatgatggtcaaccgaacgcgaatcatggactcaggacgaatcgaacagctgtcttccgttaaagaatggaaggaatttgccaaactcggaaagcccgtgccgttgaaccaaattcgtttcacaacccccccttgtcccattcctccttttttggccgtctcatccaacagcccaaatggtgccaccaataccctgcccgggagtgtcgcgaactgcgaacaatttccctaatttggtctgtgtccgtgtcccccttgctcccaccccattgccacaatacttggtcactctccctacacattttcccatgcaccacaatcattgaatcggccgatcctcgagatttcccacggcgataaaattttctcatttttcccgtttcacatatccgccggatggactcccccttgtcgatcactttttttccttcacttcgaaaaaaccacacaacaattggaaaaatgtgctccccctgcctttgattggtcccctcttaccaagcgtcagaaataaagtgaaaaagcattcgattggcaatttggttggacttaattattccgattcgttaatttgggcaattaaaatttacgaatcgcgacacaacggccgggaaacttccctttccactgaaactgttctaatttccatatccgattcaaatgtctgcacccttccgcgcgtccctagcgctcgcttacgccgatgcccaaaatttgcttactaaccaaacccaatttcctgttcccgcccgtccccagggccaatccgatttcgcttacaaccaaactttggaatcaatcctgcttgatctccgcgatgttgaaaccgatgtccacgagtccatctcacaattgtccactaaccacgaccgctggatggccttacgaactaacatgaccggagctgaacgcactctggacaaccctgcctacgacgattttgttgctaatactccctatcataactgcttacaagaattgcgccaattcgccaaagccctt

SEQ ID NO: 6149 - DNA, 1237 bp, Heterodera glycines
tgctcattttaaatcggaaaattaggatttattaaggcttattttatttatttaattaatttgtttttcaacaaaaaacaaaatctattaatgccctaattaaataaagttcataaaaagccaataaaaatatttatttttggcagattttataaagccatcaatttggacttaagattggtttaaagaaaattttggaatggtcaaaatttaaaaaataacaaccacataaaagaaaagtgacattgcattaatttaataaaatcgggcattccccataatttttttgtcaaaattttaccattcatttccctttccacagtgatgaccatcaaatcggagcagttgcacggcaacttttcgtcgccaacctcaacccatcatcaccagcagaggcggggcgggggcgtacaggcgtcgatggccgagcagcggacaccgacgacgacaatgggcgaggacggcgccagggacaggggcggcacggacaacgccagtggaaacggcacgtcccgctcgcggctgatgttcgacccgctcagcgaattggtaataatgaatggacagagtaaatctctggtaatattttgttgcatatattagcaatgccatacttggcaccacattaaaaaaagaggtggcattttacaatgtatgcgatttagctaaagccgagacggactcggagagcgaatgtattttctccggagccttttttgcttttttccctctataaaatgggggttttaaaagaaatggggacataaataacaattaaagctgatttcaatagtgcatttgttaagtggttggttttatccaaaaatgaaaggctttattaaagagaggggagagtcccttaaggctcaatcgtggccatacattaacaaggggtgcgccggcaccccccccccccgcgtcgtaaggggggcggctgtaaaggaggggagggggtcgtaacgaagggggaaaaagttaaaatttgaacaatttccgtagcgaaacccatagaaaattcaaaaaaattttcccggcggcgcctatcggcaccgccggaccgccccaccccttcccacgaagttttttggaaaaaacgcgccgcaaaaaggtggtttgaatggcttgaatagcaaaaaaaaaaaaaagtcaccggggaaaaataggggccgacgtaagaaaaattggtcctggcgcacccccccccccccccctgcgccaaacgtccgacgtatggggg

SEQ ID NO: 6150 - DNA, 882 bp, Heterodera glycines
atttttaaaataaatttttttatcataattgggaaaatttttcgactgtaggggtattttttttcgttttttttttttttttgctttttaaacatttttccgaaaattctgaaatatgcactaaaaatggcgagtgttatgaaaaaaaactagggttcctccccgagcctcggggagcaaaatgtcggggaacggggaggaaattccccgaaagaatttgtcggggatggctggagaaatttaaaaaatatcggggagcaacaccttcgtcggggaggaaattttcataaaaagtaaaaaaaggaaaagtccagaacaaaaaagtcttaaaaactcatttaaagattcttccatcttatttcaagtgcaatttacgactttcgtaattccccgaaacatgtcgggcagggacgtatccaggatttgggcttgggggggtaccgatccgaaaagtcaattcttaggggtgtattttttaaaatttttcgcccgattcttaggggtgtatttttgaaaattcttcgcccgattcttaggggtgtatttttgaaaattcttcgcccgattcttaggggtgtatttttgaaaaactttcgcccgaacgaccttttttttttttgctcataccagcgacgctgggaaaataggggtgtatttgaaacgataaatttttggaattgaaaagaaaggaaatgaagaaattgaagacagagaaaatgtttctttgtaatttggcgttggaatttaaaattaatatgttgctttcgttatgataatttggcgttaatttaaatttggcattcctttttctctctggggcgctggttggtcttgttggggggggggggggggggtaccgcgggggtcttggggggggggggg

SEQ ID NO: 6151 - DNA, 3474 bp, Heterodera glycines
aagttcctaaatttttaaaggattttattccaaaaacgtgtatcgattttcatgaaaaatttttctaacttaaaaaatttttccaaaaaaaatcttaataaatttttgttgaaattttcaaaaatttttatggtgacaatgatttatattgtttccaaaattacaacaaaaaaaaatcagtgaaaatttaacaaaattttttttgagatttcttttttaaatttttcggggggtggggaggaaaagataagggataggagagggggaacgtattaaaatttacatttaaatttttttagatttttgaaaattttctgattttttttaatttcgggaaggaaatgatacggtaggttctttataaatgacataacatcacacactttgttgaagtaataggcggcctggaacggcgtcagattgtacgtgctgatgccaacaattggcctgtccgacggattctccgctgcaaaaaacgcaacaattataattaggagtgggtaattaacgctaattgggcccgacccaaaatcaacacccggatcttcaacaaaaaagatttgacaaaatcattaattttcgaaatcacatgacaaatctgaagggcagatttggaaataatacacctccaatttacatagtctagtttggagataaaaagtacttcagtaaatcttttgttttaaattttccatgcgttttacgggcttttttaccaaaacacaaccttggtctaaaattcggtaaaaagttttaaaaaataaatttccgcaaaaaaatgcacgtaatcaaacaaaaaatagatgactcattaggctttagaaatggcaccaatctgtggtggggtgggctttttcaaagccaaacagccaaaaaaatgtgcgaattcaaaagttatgccaattattataaaaacaaattgccacaaatattaagggggcaataattttttttttttttttttgctgtttttcgtctctgatttttttacccgtgaaaaatgccaaagccgtctcgccggggttcacataaatttcgttctgcaccggcttgaatttccactgcatggatgagttgacgtcctggagtaaaataggaaaaaagggaaaatcatttttaaataaaaaaatgatcggaccgcattgaatcggacccgaatcagccgctccgggactgtgttcatttgctcaatgtgctccaatgctttggcaacctcaattggaaaattctattttttattgttgtgaaacgttagccatatggaaaatggtttttaaatgaatatatagaggatggtaaaaactttttgtacatttttgcaaaaacctagattttcgaaaaaaaattttttttttgttccaacggcaaaaaaatatttgcatttcgctctccgagaatttttcaggttccgaaagcttagaatttttctgtctcaacagcagccacaaaaaaaatcaacaaaatttcgctactttccaagggggggggggtaggggtagtcacaaaaaaaaattaaaaaattttttggtttttaataaattagcaagtcccttttatctgaattttatgggtttttccaattgtttattgaaaaaaacgccaacatttgtcgtcccgccaaagccggtcgactcgcagaacatccggtacaggggcaaagcagcgaacgtaacaccgaccataatgaacacccaactgaaccgatggaggagggtaaaattaaaaaaaaaaaattttttttcagtcaaaaaatttggcaaaaatcttagggaatagggaagtgaaaaactaaagtttaacattttgtttagaaagcctaggcctggctgggcctgtgtttcttttttctaccaagatcatccaaggttggaaaaaacatacaaaataagtttcaaaaacttaaagtcgtggagcgggctcgaacctccatcccttttccatttcatggaaacatatttttttttgtcgatgagtccaaaatgaaaaaaaagttcatcgaaatttacgctctatacatatcttttcctttgagcaatttcatggcttgcacactcgatccgatggaaaaaaaaaatgaaaaatcgcaaatttctgatgataaaattaaaatttaaaaaattttgttttcacaccccaatccgcgacacgcctcgtcagcgcgtcgctgtctgtcggtcatgaagtgcagcgacgggggcgaccggcgccggttgaaaagcgtgtaaaatgacagggttcggttggcgaacaaaatgggaccctgcaaatgaggaggggggggggggttggtagacgaatacggaatttcagagtttttagggaccttgggaggggtgtccaatggaaaaaattttttagagccaatccgtaaatattttatgcattttcttgaaaattccacaaccctaaagggtaagttcaagtccatctggcgcaaaaaaccattaaaaatacgatttaaaaagtgtaaagccaaaacaatcaagcgaccgtaccctgtgcctgttcaaaatggtgcccaaacagcggcatactgtagtgactggcgccgcgctcgcaatttttgtagctaacataacaaacaacattttttgtttttgtgtgctatgaaaaaagaaaataattttttttatttaaattttaaatacagcgtaaaatgaaacgccaaactccccaaaaacaaaatacattccacaaaaaaagcggaacaccatttatgaacgcatgaaatggttaatgcacaaacaaacgaaagaccagagagattgaagagaaaaatgggaattgagtttgagggatgtcaatgaaaaatgggcccagatgcgcaagagcagaaaaaagcatacgctttagccaaaataaaaatgccaaaaaatatgaaaataaaagatcgaaaagaaattctcatctttaggactacttcggcactacgcaatgtgccggaaggataacatttttcgaaggctaggccgatcggaatcaaaaatctgtttttctgccttaaaagaaattctagtagaaaaactggtattcatttatatctttcgtaaaaatgccaatttttgccaaagcataatttttcttttttgcccgagcagtgccatgagaaacaataattggtggaaacaaacaaataagtagagcagaaagagcacaataataccaaatgaaaaataaaaaattcaagtgaattggatgtaaacagacggcagttttggcacacattcatttcgaactattcggacaacaaaataaatgaaaagcacgcaaaatttgatgaaaattggaagggatgggtttatttggtcggcacggaatggaatttgtgagaaaaatgaaaagaaatggaaaggcgctaaaagcagggctcccaagttttttttcaaaaaaaaaaggacaaacgatgctaaaactaagattttgaccccaaaaataagattttttgaaaaaatgactttaccttataaaaacagt

SEQ ID NO: 6152 - DNA, 5411 bp, Heterodera glycines
cgatcccccaactcaaagaagacgaggcttcaaaaatcggctcgtacccggtgtccacaagcatttgctttagcccactattctggccaaacttggctctcagggcgattatcatcacctccacccttagctggttccagtggctttgattgtatggaattggatcaggttcccgcagcgcccattgatgcacttctcgatcggtggcactcttcatggtaatcggtggcaattctccccgtagtatttgtcgagccaggtttggcattcggaattccaacgcctttctccatgtgtaaaattgctccgagcacctaaacacgttgttgtccactctgaactccacggagaagaagttgctgaacgcgtacacatggcgaaagaagaagtagccacctctcccctcaatttcaacccatttagggtatgggggtttgtcccatacgtcatccgccacacttttaacagccgtgagaggctgatattgaccaggggtcctttcaacccgtttgggcatcattggcctttcaccccaaaatgcctttggcacttgaatcggtaaaggctgctgttgttgtggttgttgttgttggaatgtgccttgatgaaattttttccgattcgcgtcccattctctttgccatttgtccggacgaacgcgctttgctggtttttccttcctcttaattatttccatgcccatctgcatcatgaggagaatcatgtccgaagtcggctctctttcgtcaatgatgtgccaatggtgaagcattcggagatgatttggtgacaattcggtctgcggtatggatgagatccaaaacaacaatctgtcgctgtacaattgttgagccgttgccaaagtttgcataaaccccaaatcgtccaacgtcactcccttcctccagacaataattgactgtacaccttcaatgtgtaattcctctgtaaagaggtgcgcgtcccactcttcgggaaaatggcaaaattgtcgtgcgtccgcattgatgagacaattgcggagcgcaccaccgtcctcttccccttgccccaatatcaaaattggggccttgatgaccttcaacgacggttcgtcgtcatggtaaatgttgtcctccagatgtgcagttggtgttgttgttgagctgggttgttcggtcggttgcccttcatcaatttcgtaccactcttcctccatgctggccaaactaactgtgtcctccattgttaatgctgaaatttcattaatgggattagggtcagactcgagggtctctatttccagtgggtataataaaatcgttgctctttccattatttttccgtcgggcatttttaatttggcagttcggttattgattataccttctattttacctaatttccatttattccggggacacggtttttggtcattgattagtaccacttgtcctatttttggaaacctttgttcatccacatttttggctttttcctgttcccttaatgccaataaatagtcatccctaaagacttcccagaatttggtactcttatacattgttttcttgtgaacttcgaggagttcatcccgttttgtttggttaatttgagcatctaaatcgtctgtatcctctgtttcattagtgtcacgctgatactcaaatggttccccttctgatgcattgagaatatgcattgggcacaagggctccataatttcatcattctcaatgtatgtaattggcctttcattgactatcctttctatttggataagataagtcaataattcttcataatccaataactttttacctaaccctcggtataaatggtgtttgactagaccgattagtcgctcaaaaaatcccgagcgccaaggcgctaatggagaggcaaattgccatgtgatacccttattagctgtacgctcttgtacctctctttcgttcatgatcattgaccatttctccttttcttctaattccctttgtctggtctgaatttgcccccaaaccttattttttctccaatgtgcctcagtaattttagccaatatcttatgagaaagaacaaattggcaagcattgtcagaaattatcatttttggcactcttctacgcctcatgaatctctctaaagccaataagaattaattctttttatagtttcactccttgccttgagcaatttacgttcctgaattggctcaattcgttgtacaaattggagaggtcccttgtaaattcgccaaatatacgccactgtatttctaatcctcttccactttgagaagtggttcacataaactgtcagaaaggaacccaatttcctttggtttctttcccttgccggattcgtcaattcacaaacagtgacctcttgattttgatctgcccatacatttggatcaaattccctgattgtttgtggccactgtgtattttttagacttataaacggcggtcctttccaccataattcattgtaaatcttccggacttgtgccacgagaggcaacgtctgccggatttgattgaccctcaatatgtttgacattccattgtctcattttctctacccgatttttaatgtatctttctaatttcctgttgctattcagaaaatctaatacatccgtggaatccgtccacaactgtacagtctcaattttcagtgatttttctatttgacctttgacataatttaaccatttcgaagtcaaaagcattgcgtgtaattccaaaatcggaatggtccgatactttgatggaattattgctggaaccacaaggctcttaccaaatatgagattggcatttatttgatttggattaatgactctcaaatatattgccgttcccatggccttatgtgatgcgtctgagaacgcatgcaattcacactgacaatttttaatcatttctttcggaatgatattccttggtactgttattgactgattttcccagtctttcatcagtgttatccattcatttagctcttcattagacaacgaggtgtcccatttgagctttttattcgtttctaccctttgccgaaataattttgctggcaaaattgctggggccgcaaatccgttcggatcaaaaggtttagcaatttgtgccaagaccttccttcttgtcaacttctcagacttaaacacgggaaaatgtatgaccagagtgtcattgttgatgtcccattttattcctaacaatttaactcctccttttaccacttggtcttcacttggtaatctctctatttccttggtacagttggacacaaattctctcacattcatatccgcattagaaaaaatctatttgagaagagaataatatgacttaatttcttcagccctttctaaaccaagtattatgttgtccacataaatgtctctctctatttctctcacttagatgagccggtgaacagatgactccaaaagttactctagtaaaccgatactccacgaggggagaatcgtctcggtatgggtctctaacccacaagaatcgcatcgcattcctatccttaggatgtaccaaaatctggtgaaatgccttggctatgtcacatgtcaacagaattggtttaattcgacttcgaattaaaataacttgttccattatgatttcatggatttgtcgaagcaaatccggtgtttttctcagtctgcccaaatttgacaataactgtcttaatgccatatcataatttgttggcaattgagcagccaattcttcattccataacaattctgtttgatacctatcgccattgaatgatattttatcaatcattctttgtctcacgttttgcttttctgaattgagatcagacataccgacatgttctagaccattccagtccataatcagtttatcgaaatcatttggactcagttggtcactattcagttcccattctactgaacctttggaataccctgaatgattgcactggctttgccttcaatgcatgagtctaaataactgaacttatcaatttttgggacatgagagtcctcatgaattattgtacgaaagtaatcccaaaatggtatccactgagatggactaccatcaaatctcttaagctcagtttttggcaaatttttacgcattggcacgctccttgagaggggtacaatgccggaggtagtgtcaccatccgtgttgtgagttatgtctaacctctcttctaatgcctcaattttgtccctcaaaattggaatgagaacgtcagctgccctttgtttctcattaatttgtaactcctgcattaattcctgcatttccgtttctttacggattgcattgtctcgactcagtttgccaatatactcattagccaaacccaaattatcttcaatctttttgtaccaccctttctaagtcattcagaaagtttctgaattgtacagccttcttttgcattgattcggtagggcatttattcccaggtcaggtggaatttcggtacccaataatgctcccaatttgctggcacaccccctaattaatgcctggatgggggctgtcattgctcaaatcaatgaccaaattcgaaagttcggagatgagactccaatttaataatcaataaccgaactgtgaccgaacaatttaaaaatttggaactgaaactccaatttaatcaataaccaaactgcgtactgagttgagaatcagaaattcaaaaaaccagaaaggggggaggggggagggtaaacgattcaagatttgtaagacctttttaccacgcactgtcagagctaagactctgattttaccaagtgcggatggtttggacaatttgggttacaaacaaaaaacaaaaaataaaaaagatttagaccctcggaaatgagattccgaaaatttggactaaatgggattggacaaaaaaaaagtgaattggaaatgaaatgccgataattttttgacaaatttaaattgggcaatttaaatgtttgacttttcgaagatgagacttcgaaattttcagtccgaaatgaacttgattgccttttttagaggcggtaggaacagaaattaaagaactgattaattctggatgagaccagattaatcagacctccccttgggaaaaaaaaattgaacccgcctgtgcacaacaggtcgccagttgtccggggcacgtcttagtaaatggggatggcctgcgcgctgagacgtgcaccaagacagtgcactcaattggttctcgattcgtcaattgtccgatgcgtccaatgtccaattcggtgcgtcaaatgtccaaatgttcagtgcgtccaatgtccaaattgttcactgcgtccaatgtccaatttgttcagctcgtccaatttccaatttgttagtgcttccaatttccaatttgttcaacgcgtccaatttccaattgtccaa

SEQ ID NO: 6153 - DNA, 2073 bp, Heterodera glycines
  unsure (1)..(2073): unsure at all n locations
ttttttgaaaaatgggaatcaagcaaatttcattaaaatggaacccattttttggtttttcagtagttttaggcacatattgggggattttttttttaaattttttttcaaaaagtaagctttttttgcattaaaattcttgtaaaaaatgttcaaaaaaagtacaaaaaattttgttttttttctttttgcattttttgaattgacctttttatgacttttcatttttaaggcaaaatttaaattttatcaatgaaacagaaaaataaataaatcttgaagcgagaaaaatatttacgtcacaaagaattgaaatgtttttgattagaattgtactagcgaaattgataaaaaatgtgatttttgagaaagtaacttattttttgacagttttttttcaatttttggcacatatgttggccttttttgagctttttagcacatattttggagcttttttggcacatataaatccgttccctggcaattacaacaaaaaatagaacaaaaaaaacaaccttcaaacattaatgcataatacttttaactcttacataagcaacaaattggaaaatgaatgaaatgccgaataatatataaatttttaagaaatttaaatttatcaaaacctaacaatgaatggccctgaaagcttaaattcccagtcaatccgtgacaccttcactttttctcttgaattcagatttatatctttctaaagatctttttgtaatatttaaaatttccgcaatttggcgatcgttgagctttgggttttggtttttcaattgataatattgttttattttttccgttttttccgcaaatgtataatgcttctgccctgtaatatattaaataataaaaatttttaaatttaattaataaataacaatttgtttaaaaatttcaccctttgaaagaatttgatttaagccaattttcttgtcccatttttcaattgttctataataaattccaaacatttgtttaatttttgcattaaattctttccattccttcagcgaatgtttctcattttgcataaatttaatttttgttttaaaatatttttcaacaatttctcttttttcatcatcagttttttgctttttcaccatttttccaacttttaattgtttcttccaataaaaaattgttttgatatgtatgcccaaatgttttgctattattttttggcattttgtcctttttccttccaatttttcattaaatttcgtttttaatttgccatatatttgatcaaattgctttaacattattcttttttcttcaactgaataatttttgttcttcatcattccaaattctcttttccatttgtaaattttctcttgactgacgcccaatttttttgcaatttttctttcaattttcacccattcttttcttgaatatttctttcccatttgcttaactttctccttaatattatgaaatttttccacagtttctcttttctttttatcaattgcatttgaaaaattgtcacaactttgtccattatttgttggcattggcaattggtcgcccaattcatcataatctgtggacatttcttcactctcctcttctttcactttcacattttcatcaaaaatctgatcaaattgtcgaacattttgtccaaattggttattctgatcagcaatttctccatgaattatttgatcattttgacagatgttttcttctgctccgtcgtcccatctttggccaaatatttcagcaaaacttttttcttggattattttgccagcctcaatttggttaattgcttttttgaatattaatgcgcataataataaaaatattaataatattttcatttttttgtaaaaatataatgaattatttttataaaaatatttttcgcaatgaattttgtaattattaattttatagcatggcttaatttttcttcaatcaatattaaccacatttaatcattatttcattaatttgataacattttataataaattcattattanattttccttttatcagcgaattgngtagtaattaatatgagataactataattatgga

SEQ ID NO: 6154 - DNA, 2024 bp, Heterodera glycines
  unsure (1)..(2024): unsure at all n locations
gcaaaccaatcaaaattggatttttaaattactgccagtcgccgattctttaattagtgtgtttactgtatcaaaaaataccaccatatatactgtatatacaacaaatgcaattttggttttgtgagcaatattatggttacgttttctttggccgtccatctctcatttgctaagttcccttctcttctcccccttttctttttcaatttgaccattccatcggaaagtgagcagtttctctttcgctgtcatattcacacaattcaactgaaatatgaaagggctttttaaatatttatgtgtttcatacagctcttaaaaatggttcggcgccgctccctttttgttgcgcggcaaatccgatccgtcggcaacctttccgaaggccaatctgtcgggaaaagacagtcgatttaaaatgctaaaaagtaacatagtcacaaaattccccgtagccagggaccaaaaaagaaaaaaaagttaaattgaaaattaaaatgttacgatggctaattcggctataattgccgtcccaatgcctttgcgtcgatattccggctttaccagcaaacggtccacaaacaaaaactcaaaaaacaacagatgatggattcaaacaatcgttagtgttgcatttgtacccgtccagtccaactcgaataagtcttccgatggaaaagggccgtgcccaacacttcgccatcgtcgcagtgacgcgcgacgacggcgccgagggaagcggcggagaaaagtcgcaaaagtttctcttggggaatttgaccacctaagaaaggggggaaggagtagagacaaaaacactgaaaatgagtgatttattcaaacgaatgattaaaaataaaacctaccaaatgttgacgagcaggcatcagtccaagtgttcgccttttcgtcgtccgtaatttcaccgtccatcaaaacagtcaaattaaacggccgattctcataccctaaaacgggaaaataaatttaaaaaatgtcaatacgaaaggtatacgattatgcgataagggggggggggtgccagaaacttctgtcttttcgaatcgcccaaccctttttagtttttagctaattgtaagccaatgcctccgtgtgccgtgcgtgtccctcttcactcactgtgtttggcatatgctatcactttccacatttcaattcgttccattcgccaccactgcgatcgctgctcgccaaccgcgccgattcttttggaaaaagtaatcgcagcagcgaagcgcggaaggacattccaaacaattcgggagcaatgattggccttggacacctaaagaaaaaggtccgtttgatggcaaaaaggacaaccaaagaaatggagttcaccttggccaactcggaagcaattcgccgtccgacgcctttccgacggaattggggccgaatgaaaagttcctccaggaaaagcgactgaaattgcttttcttttttgcccgttttctgtgcctttcactcgccttcccttcggcgagtgatgtgttcaaatagaacagtgcgtggccaaccaattcgttgtgcgaagtgaacgcaattagtgcggacacagcgccgccggcgatgtcctcgcccaattggtcggggtcaatccgtggcccttttgtccgctggggaagcgcagaatcggccaattcctagcggaaaagagaattgcaattagttcagttgtaattggcatttacaaaatggctacccactcttatcaatgcgcagatcacttcggcatcgttcggcaccgccattcgaatgccaaactcagccatggtcaacagctggcaaagggaagtgccgaattttgacaaaagcaaaaaaggaacagaaaaaataattaagaaagcggaaagcaatggacgaagaanattgaaagtttanaagaaacattaataaaccaaggaaatttanattttaattggaatttttttacaangaaaacatagttgataagaaatttaagtatgctgagaaaggatatgtaagaagctgctgaa

SEQ ID NO: 6155 - DNA, 1539 bp, Heterodera glycines
  unsure (1)..(1539): unsure at all n locations
acatagtttgataagaaatttaagttatggctgagaaaggcattaggaagaaggtgctgaattgaggnatgaggaaacaattcttgagaattcagaaaaaagaaaatcaaaacacagaaaaggagaaaatagaaaattaaaaaattacagaaaaagaatatacaaaattaaaaattgcagaaaaagaatatacaaaattaaaaaatgcgcgtcataattcaccgcgccacattttgcccaaaatgccattgccttcgacaaaaaaggcccaagcgaaaatgggaccaagcgtaaaagggaccaaatagagaagagcgggttgacccgtctccatcagcaaaagggcgacaaaagtggcgaacattccgagggaatagcctaaaaatgagtgacaaaaatgaaaggatcaaatcgaattaatttggatattttaccaaaagtgacccccaataagggaggatagtcaaatcatttttggtttttataaaaggtaccaatgatcgaaatggacccgtaggcgtagaagcgactccgtttgaccacgtccacgtagaaacagaaggcgatcagatagcctgaaaggtgatttgcggtcggatcagatgggaatgagtgcactctgaccgggaatgattacgtcgccaaggccgagcatcacgcgtctgtactcgcgttccacttcgacgtcgaaacaacgccccatcggatcggcaaacattggcacgtaaaaaagcagaggaatctgccaaaagaacggccattgagacgatggacggatatgtgatgccgtaccttttccggcacttccttaaggtcaatcggcgcaatcggctggtagttttttccagtgcccgaagccgagtcggctctcttctgctgacagtcgactccggtgacaacctgaaaaagaaatgaaaattattatttacaagtctctcattatgcagcgtgtacgaaaattccggacgatcgtttaaaagacatacaaaattcggataaataaaaaaatggtcaccgccacgcgaaaggaataaataagtctcgccgtcccaaataaaattaaggctttagacgtggcgaattgatgttttttcggttgaaattctgccgtttttacctccatcatcaccgaacacccatcggttgtgagcagtgttgtgccgaacaccatgaacaggtcgtagatgaacatcgccagcatcaaaaaagtgagcagctgacagggcattgtttttcatgaaattacccaaattttcagtgaaaaacatacgcgcaaacttcgaattcggctgcttttcaccgcataaatgcaaaccatgcttaaaaggtgaatgaatagtaaaatatttggtcttattttattggtaaataaatgatcggttaataagtaatttttaatggacaatcaaatcggaaaagcactgacaaaacacacgtacagattgatgctgttcagcaggtaaaaagcgttgtaatgttcccgaaaattgaccaaacagtgcaagggcaaacgcaaaaagaaaaacaatcgacgacagc

SEQ ID NO: 6156 - DNA, 2971 bp, Heterodera glycines
taaacataattattttttacctgcgtttgccgttggtcttccacaatgtttgtgtttgttgcggtcgtttcgtttggcttattccgttcgttttctgtcgatgtttgtgagtctaaatcctctcaaattgaaattagaaaaatatgccagaatcctctttctttaattttcggttaaaatgtgaatgaatggcatgccttcgccttcctctgatgtgccgcagaaatttttgtgcaacggtgccaactttttatcgcccaaaaaagactttaggaaagtgtagagacaactgtggactgaacaaatgccgagaaaccacagaaggacgcagaaaccgagcactaaaaatagggaaaatgagattaaaaaatgggggaaagctttacaacataccagcgaatttgcgaaaaaagtaggcgagagtgagcacaatgacgatgaagacgagagcaaccaaaacgacggacaaatgttggcacacattcatctgggcaatttcggcactttgcgtgcgtttcaaggggctaaaatatgccataaaaagatggcatttgagacaaatgagttggatggaaatcaaaccctttattggtcggctcattcggctgcgcaggttggtcctcgtcactgagtgccgcccgactcgaacccaatccatcggacacggaaacgtccaacggcacgcgttttgcgagcattgctttggactcgaaagcagcccaaagagagcctaggaatttgagacacaaattggaaaatgataattacaagcgggttttcagacaaatttttattttgacaatttgtctctaatgagtgagccaaaataaacacaccgacaagaattgatccgacggcaaacagccaaagaacgccgaccgccgggtccattggccacgccgtttggggacggtaaaagcgaagctcagtggaagacgaattgagtagtaaaggctgaattaattaattcatttataatttgaatttctatttacttcgatttcctgtcgaaatgtgtcattgtaaacgaaaaacacggacatcgaagtgtcggaatcgttaatttcggcattgtaaaattgcgaaaactgaactttttttaaagtgataaatcagtaaaatattatgtgagtggacacaccaaaaagtcgcgacttctgtatcggttgcgtttacccttttccatcaaaaacagcacatttcgcacaccctttggcttaagacgattcaactgaaagggaaaagccaaacgaattgaaaccgaataacaaaaacaattaacaaatggatgaccgtggcattgaccaccgcctcgccctctttaaatttgcatggcaaaagctccgaggacagagttcgataatcgactggaacgagttcatttttggcgaaattgtgcccattttcaaggcaaatgttcgtgtttaaattgctattccaccagccaatttggacaaaattctttaaaaaaaaattattttagaaacagcgcgaaaatcacttttgtgtcggccgacgatggcaattgacggctgtgccattgttggaaattgacacagaaatcggagcctccggtgggcaaacttttgctacggacattcaaaaaagcgaagctggagtcgtatttgtagaaagcggaggttggacactgaaaattttagggatttgaaaaagtgaaaaaaggggaaaagtaacaaccaatggaaggaagaggagaaaagaaagggaataaagccggaaaatggaaaaaaccatgtggaattgtgatgatatgtaaaagtaaattaaggcaaattaccctaaaatgaacaaaggaaaatttcaaggattttaaccagcgatttaaatagacaaaatttaaaaatgatttgtgcccaagctcggttgacttaacgatcgtttttcacgtgtggccatgtgattgaacaaatcaaaggatcattttgagggtgaattaggggaagaagggggcaacatttgttccaaattccttttttgcctagcgatttttccgccgatcgttggttcattttcgccgggggtcggccgttctttcgcctttcttttgttacccaaaagctgtgggaaatggccgtccctttgcttaatgaatttggtcattatcaatttacgcaagccacacgccgcttgtgggggagagattattatgagggaatgaatcaaacggagggaaatggggagaagccgcaaaaagcgtaaaaaggggagaggtgtcaaaaagaacgagttttcacacaacagctgctcacaatcgcatggcaacaactgcttctctatacatagagacgaaaaaccatcacggaatgactgtaaaaatggggagggggaagagaatttgaaatgaaaggatgcaaaaagcgaacatttgaacgattggttataaaagagatgacaaacgaaaatagaaacattaaggaatgcaaactttgctcaagaattactactaattaacggccaatggcttttttgctatttgtctgtgaacaaatgaaaaaattctccaattgatgaactctttttttcaatgcatgtaaaagtgaacaaccaaagtcaaagaattcgcataaaaataccaaaaaggaaaattcaaaaaggagggaaacaacaaaatgcactaggtaatttgttttaactcactaaaaattggtctttcaaaaataaacaaatttttatgttcaatccatctgttcaattggtcatgtctccacttattccttcttcccgttgtgttccacggtacccgcactatttgaagacgcattctcatcaacatcgtcggtatcggaaatctaaaggaaattaaaaaactgtacaataccaaaaaagttaacaaatccgcaacccacaaacaaaaatggaagtcctacgaagaaaaaagcccaatgagactattcaaatataacaataagcgatttatgccaaaaaatccatctcacatccaaacaagaca

SEQ ID NO: 6157 - DNA, 741 bp, Heterodera glycines
aaataggcgatatgttgttgttaaagtaaaacaattagacttctgaaacgatcccccctcccattgtaagtgaattgaatgggtcaaaaataccgtcagaggatgcatttttgccgcgaagttcattacgaatctgaacaccaacaatgaaacttaataatgctagtaaataagttttctcactttcattgccatcactcccaacaaatttttgcctttgccaaccaatggaatgtgtttgaatgtttcgtcgctcagctcggatggaaactgtgggaacaatttaagtttattgtattaaattttacaattttaatggaaaacctcaccttgagcactttgccttcgttttccttggcccattcgcgcactccgttctcgaccattccggcagcaaagaacgagtctttgtcatatgcctgcaccaacaaagcgtcttcagtcgccagcaattggtcacataactcctgacaatgaattcaaaaaaaaactcaaaaccaatcgaggaaagtgcccacctgatgttggtcgctgaatttgtgacgcatcgcatgcaaaatgacctgcacaccgtgggaatttttccaagcatcgatctgaacaatagtaaattaaagaactttaaaaagaaaaagtaccctcgctttgctaacgcccatagaaaacagcaagtcgcgagtgcgtgtcttcgtcttcaatgggtctttgatggaacgcaactcttgggcagcctaaaaaatg

SEQ ID NO: 6158 - DNA, 4790 bp, Heterodera glycines
tacgaaatgttagaatccgggttcggggttcgagactgagacaaaataaggccggattcgtgctcggcgcctaagattacccctaaaaataattttctctaattttattaaaaaaaaatttatttggtctaaattacaaagaggaaaattgtctataaaatgaacgatgaatgtataaatattttctgattgcatattccatttaaatgcgcgagaaaattggaattttggtcgttttcaaaattttataccttcaaatctaaatattcaaaaaagaaaatcgcttcaataaattttctttataaaaattttgccctaaaaaatgcgcggcgcgccgcgcacagaaaaatcccgcggtcgcggatcgcgcatcgcggattcaaattgccgcggtcgcggatcgcggatcgcgcaaaaaaaacgccgcgaatcgcggatcgcgcatcgcggatcgcggtcgcgtcccagccctggtttgggccccaagtacagaaaaatgaaaaatcacagtaaaaacaactttttaaatttctgcataaaaaagcacatttttctatttttgggttgggcccaaacgaccccggggcccaaaaacgggggcccaaacgctctggtcccaaatgtgggcgtaattccaacacaaaaatgatttgattcaccaatgaaactcatttaataagtaaccaaattcatgcatttttaatttttattttatttattaaatcccattaagaaatattaatttgccaaattaagcattttaaaatgcaactcaaaaaagcaaaatcacttttgttgctaagttttaccatctttttctgtggccacgcattttgtggacaaactccggtccaattcacaacaaaacataaccttttgttcacggcattaccgcccgacaatggggaggccgtatacaaatttgacggtaattaaaaagcaattaaattcgatattggctaattacctaattaggcactttttacgcggatcgcatcgcccaattggaatacatagcggaggaggggggaagcacacaatccaacgactgtttggaatacggcgaatatttgaagcttagagaaagcggcaattttacaaaggaaacaatcgaaaaatttgaaaaggcagtgaaacaaatggacgcaaaaattgagcaaattaggggagaaaacccaattttagggacaaaacgcatcgaaatgaacgaattcagggcaaaattggacaaagaaattgtaattttaaaattttgaattaattgtaatttaaaaattataaataaaaaaggattttggattaattacaattttaaaattaaataaaaaataattttggattaaaaagttactttaattgattaattaattattaatttcattttttgtcttgtgcgagtgactcagctgatcgtaatcaaagcgaacaagaaattgtctatttgatttctgggaataaaaaataattgactaattaatgaatttttgttgttaattgcccaatttgctaaattagggccccgcagctgacgatgagtcaccaccactgctgcaccaattggtgatcaaatgcaagcagttcatgcgaaaattaatgtcggaggagggcgaaggctcgtgggtggacatttactcgtttatgggcgccgaagggacggaggagagacacgggacgaccctttggaacatttacgaattggcgaagatacaaagtgccaaattggacggaatgatcaacgaggccatgtgggcggagcacgaggaaaattggaggaataaaacggagaaaaatgggcaaaaaaagaaagggtaaaaaatgggaatgaaaagaaaaacagacatttataagaaaactatcaatgggaatatgaaaatataatatggattaataaaataattaaaaaaatataacacaaaaaaataaaacaattgaaattaaaaaacatttggtattttttaggaaaatccccaaatccatcttgtataattctttgaaatttcattttcatttaatttttaaaatgaattagctaaaaatgtgaaaaatgtaaaagggagcggaaggtcacaaaaagtgattgaatgagtgatttatttgcgatttgcgtttttcgtgtttataaggtatcattaatgaatgaattaattaattggatattacaactcattaattaattaagcaatgaacgagtgctcattgaaggcgctggtccgattggtttgttctgtgccgttcacctgtttttggccggtgccaatgtcactttggtcaatgaccgccccgagctctattcgcgcaaccatatgacctttttggacgcaaaatttatggcacaatttcgctttttcttgggcacaaaatttgatgaaatttacaacaaagaaagggtacggtttacggattacggttactgtaaagagtaaatttaaaaataaaatttgaaagcggacaaaatggttaaaatatttaaattggttaaagaaaatattaaaaattaaaatcagtgaaatgtttaaaacaaaattaatccaacggtaaaacgtaaatttaaaatgccgaaatttaaaagaaaattaaaaaatggataaataatttttgaatttgatttatgaagttatcactacaaaaaatatgatttctttaattcaaaaaagtcaaaattatttaattaaattgaaattaatttttaatgaatttgtttttgtttagtcatttggtcggattaacactttggacggggaagtggggcaacagaatgtgaaagacatcgagcaaattttgaaaatgcgactggtcgaattgaccagttttgtggagagcaaaattgggccggaacagccgaatcggctgaaattgctttatcagacggaacttaaagggattaaacgcgatggcccaatgggtaattgaagaaaaagtattaattaataattaaatttaatgtttttgaaaggaattgaagcgattgttaaagtgtcacccaaattcaatgcaaaagagcaaaaacattttaatagaagaaaagtcgaaataagagcagataacagagggattgacttggaaagtgcggagaagcaaatctttggtcagtcaaatttaaaagggaaaaaattattaaaaatttaagaagaaaaagtcgaaaatgccaaagaaatttatgctgcccgtcgcgcggcggcacttcaccaacagaagcaagctgatcagagtgatctgccatcacaaaagcaagctgatcaggaggatcataatgcggcggttgagcaagttcgcttggaaaaatgggaggggaaagtgcccgaattgcgccatttggcgccaattccctttgacattttgttttgtgccggcggagccaacgatcggattcgcaacaagcttttgggtatgacacgaaattgttgtcattgtttaatttatgtaaaaaattataggaaatccaattcgacgaagcatttcgaagaattacggattggttgtgttccataagggcagcccaaatgagaaagacggaataatggagcagagagtgttcgaccatttgaccggctttttcaaagtcaaaatgagcgattttgagccaattttgcaaaagcaaaatttcgataaatttgtcacaaatcacgggaacattttgccaaaagaattcataaaaaagtatgaaaatttgacgcaactgattgtccgagggctggtcaaggaaaacgaaggcaaatacgaggaggacgaaattcacaaaccgcacacgaaacacatttacaaacagcgtaagtcattagtggggtaattagcgtaattattagtgaagaacccacaaacggactacggtaatatttaaaatgaacgaaatgccaaaaagctgttcaaaccaaatgtttaaaaattggtttttttttattaaaatgggtaattctggatttaatccaagaaaatggccgttttgtgctcgccgacccaaaagaggagcccagtcaaatcgttcgtctgtttgagaatcggccaacacttcacatcgcttcgataacgccgccggcggtggaggaatttgttcgggacataaggcgagagtggctgcgatcggaaaatgatcaagcgaagcagcagctgatcaacgaaatgcgcgtgcgatttgagcgcaaatggagcgccgccatattcgacatgtgtttagggtaggcggtcacaaaggatggacaaatgggaagggtgagggtacggtagtcagacggtgggaagggtgatggtacggtagtcagacggtggaaaggatgatggatggtacggtagtcagacggtggaaaggatgatggatggtacgatagtcagacggtggaaaggatgatggatggtacggtagtcagacggtggaaaggatgatggatggtacggtagtcagacggtgggaagggtggtgctacagttgtcagacagtggaaaggatgatggatggtacggtagtcagacggtgggaagggtggtgctacagttgtcagacagtggaatgctggtacggtagtcagacggtgggaagggtggtggtacagttgtaagacagtggaaaggatgatggtacggtagtcagacagtgggaagggtgatggtatggtagtcagacgggtgacctagcaatactcaccggtaggaaacttttgatcagtcgaagggttgatcaagtagtgcttaatgacagggggtgaccaagagtacggtagataactgactagaaggatgatcactgatcaagcacttctaacggtgatcattgatgaggtagcagacctataaagaag

SEQ ID NO: 6159 - DNA, 1147 bp, Heterodera glycines
aatggcgcccggaaaatgcgtagtggaaaaatcgtcagtagaaaatgcgtcagtggaaattttattgtcacaaaaacagagtcccttgctttttcgaggtcactgaccacgatccagtatccattttggcctcttccgaatcccggacctgaattcgaacaaaaagtcgaaagcccaaattttcgatttagcatttttggttaaaaaacgccataaatgatctcttattgaaggattgatgggtttcagtttgtttccgtgtatttaaacctattttgaagaaaagccctaatttcgaaaattttggctttcgactttttgttcgaattcgggttcttgattcgaaattcagaacgaggttcttatagaagtttacttttatattacaatactaatgctacagaactttatactaaaatatttgtatcattgacacattttccactgacgcattttccggtcacggttttaattgggtcgaaagccgaaaccgaacaaaaaacgaaaagattggcatttaacgaagcatttgaatttgactgcttttggaatatatttgactttgcaggaaattctttggctttttttcctacctctgcacttatacgggaatgacccattaattgattaattaactaactaaccattcccattcattaggccgtttgggcgttgaatggtccgcgtacgccttgagggattatcaccagggaaaaataacggagaaggaactgatcgaacggatgagcaaaaaattgaattcaatagaacaaagagtggtgaaaaaagtgcgagaatatgtgacaattgaggacaaagagggcgaaaagacggacaaagcatcaaccattttggacaaggacgaggacaaagtgtacaaagccatttaccatgccaaaaagacgcaatgaatgggcaaaaaatgatcgaccgaccaaagaacgaacagaaaacgaaatgaattttgaaaaaattgaattgagatatgtgattttgttcagagatatgtaaatgcatttttaaattagttggaaagcttaattatttcggaaaattttttaattaaaatttcaaaattaattaattaattaagtaatatttgcttaaaaataaaaggagcagctttttgatgcttgaaattaccatg

SEQ ID NO: 6160 - DNA, 1215 bp, Heterodera glycines
ttattcatccattgaaattagtaccgatcgaaaatgacgaaatgcgtgcacttttctgcaaagaatcagggggtgtactctttaaaaaaaatgccaagcacgtggcactgtatggttagaaatattcggcgaaatacactttataaaaaaatgtaattacattgaactaggggcagtacaaatacagtaggatttaatttgtgggggttgcttttcgttaaaaaatttcagtttatgattttttcctaaagtgttttaaattttgttatttattgcccagaaagttttaattcatccattgaaattagtaccgatcggaaatgacgaaatgcttgcacttttctgcaaagaatcagggggtgtactcctttaaaaaaatgccaagcacgtggcactgtatggttagaaatattcggcgaaatacactttataaaaaaatgtaattacattgaactaggggcagtacaaatacagtaggatttaatttgtgggggttgcttttcgttaaaaaatttcagtttatgattttttcctaaagtgttttaaattttgttatttattgcccagaaagttttaattcatccattgaaattagtaccgatcggaaatgacgaaatgcttgcacttttctgcaaagaatcagggggtgtactcctttaaaaaaatgccaagcacgtggcactgtatggttagaaatattcggcgaaatacacttgataaaaaatgtaattacattgaaccaggggcagtacaaatacagtaggatttaatttgtgggggttgcttttcgttaaaaaatttcagtttatgatttttttcctaaagtgttttaaattttgttatttaatgcccagaaatttttaattcatccattgaaattagtaccgatcggaaatgacgaaatgcgtgcacttttctgcaaagaatcaggggggtgtactcctttaaaaaaatgccaagcacgtggcactgtatggttagaaatattcggcgaaatacacttgataaaaaaatgtaattacattgaaccaggggcagtacaaatacagtaggatttaatttgtgggggttgcttttcgttaaaaaatttcagtttatgatttttttcctaaagtgttttaaattttgttatttaatgccccagaaatttttaattcatccatttgaaattagtaccgaatcggaaatgacgaaatgcgtgcacttttctgcaaa

SEQ ID NO: 6161 - DNA, 1286 bp, Heterodera glycines
gaaatgacgaaatgcgtgcattttctgcaaagaatcagggggtgtactccttaaaaaaatgccaagcacgtggcactgtatggttagaaatattcggcgaaatacacttgataaaaaaatgtaattacattgaactaggggcagtacaaatacagtaggatttaatttgtgggggttgcttttcgttaaaaaattccagtttatgattcttttcttaaaatgttttaaattttgttatttaatgcccagaaagttttaattcatccattgaaattagtaccgatcggaaatgacgaaatgcgtgcacttttctgcaaagaatcagggggtgtactcctttaaaaaaaatgccaagcacgtggcactgtatggttagaaatattcggcgaaatacacttgataaaaaaatgtaattacattgaactaggggcagtacaaatacagtaggatttaatttgtgggggttgcttttcgttaaaaaattccagtttatgattcttttcttaaaatgttttaaattttgttatttaatgcccagaaagttttaattcatccattgaaattagtaccgatcggaaatgacgaaatgcgtgcacttttctgcaaagaatcagggggtgtactcctttaaaaaaaatgccaagcacgtggcactgtatggttagaaatattcggcgaaatacactttataaaaaaatgtaattacattgaactaggggcagtacaaatacagtaggatttaatttgtgggggttgcttttcgttaaaaaattccagtttatgattcttttcttaaaatgttttaaattttgttatttaatgcccagaaagttttaattcatccattgaaattagtaccgatcggaaatgacgaaatgcgtgcacttttctgcaaagaatcagggggtgtactcctttaaaaaaaatgccaagcacgtggcactgtatggttagaaatattcggcgaaatacactttataaaaaaatgtaattacattgaactaggggcagtacaaatacagtaggatttcatttgtgggtgttgcttttcgttaaaaaattccagtttatgattcttttcttaaaatgttttaaattttgttatttaatgcccagaaagatttaattcatccattgaaattagtaccgatcggaaatgacgaaatgcgtgcacttttctgcaaagaatcagggggtgttctcagtttaaaaaaatgccaagcacgtggcactgtatgcttggtagagtcggcgaaatacactttataaaaaaatgataattacat

SEQ ID NO: 6162 - DNA, 3531 bp, Heterodera glycines
ggcaaaatttgggttttaaacgcaaggaaaagtcgtcgcttagcttttaattgccaaaatcggccttttttggtgaaatctgttaacaaatcaaaacgaaattacaaaaaaattttccggcggcgcctatcggcaccgccggaccctctcccctcgctcatttcccaaaagttttggaaaaatccgccgcaaaaaaattcttaaaagtcaaattttttcatcccgagttcaaatgcaatttgataacagattttcaccaaaaaggccaatttttgtcattttaaccaatgtttttacagaatttgtaccaaaaatgttcaaattttcaagaaatagggttaaattcttcaaaatttctcatgggatattgtaaaaaattaagaaatttttctataattctaaaaataggaatagttatttttatataaaaagttttgagctttatttagttaatgataaaatggcagttttcgacaaaaatttaaaaaagtgttaaaagacaaccaaccgcattgagaaggattgaactatggttcgagccccgcccccgcccccgtcccgtgacatcagaaaatttaatatattttaaaaatttttacaaaataccgaagaaaaacaaaaatttatcggaaaaatcttaatattttttttggtgaatatctgttaatagagcttagatttcaaaattcgcccgacggcgcctatcggcaaattagcccaaaacccctaaatttggtcatttttagacaaaatctgtgtttttggagctaattcaaatcaaacccccgctccctcgactctttgaccagttttgaccgggaaattcccgtcttttttcacggttttcccagccaaaaaagtcccggtttttcaaccaaaaaagtcccggtcccggtcttgctcaaatttcccggtcccgctgcactctcttttaaagtaaaatattaattgatttttaaaatttttcttgcctccaaagttactcaacagtttacaaagtccacttttaccagtgtatttttggacccggacctaccgggtcggataccgggttttggattttccaaaaacgggtccgggtattgaaaaaaccgggtatccgggtctgcgaccaggacacggcctgccttgattatagtgagaaatttctattcaccaactgttcattaaataatatttataagtgatgttttttctctgcactctctgtgcaggaaaactgaaggactgggaaaagatggaagattcaatctcaaatttcgtaccttaggatttgttcatttagatattatacttttaaattattaaaattatttattagatttccatataaaattaaatatttattcggaattttttaaattaaaataaatttggttgatgaaacgactaattttggcttggaggacgaaatgacagcgcgccgattcgatcggcgccacggcggtaaactttagaattaaggctaaaatcgaattgaaaaaacagaatgacaaaagaaaaaaatggcggcaaattctacatttaaatttatatggtttatgagttagaacaacagctgcaaattgacaattgttgcgcactaaaagtacaattatcagttgcgttggtgagttatcgagggcgttggtcacgaatcggacattcatttcgaacaaaatcgaatccaatcccgaacttaccctttttatgggactagtaaaggcaatgtttaatatcgaattgtgttggtagagaagccaatatttaattgaaaaaagtattctcgagattaatccttacccgtatttagagattaaataaatctttttaaataaaactgcggaaaattaaattaccgaaattctaatgttgtcgtcctcaaagccgaggaattcgatgggccgaatgaaacatttgttgagctcgggcgaggatgcggacgttttgggctaatttgccgataggcgccgccgggcgaattttgaaatctaagctctattagcagatattcaccaaaaaaaaattaagatttttccgataaatttttgtttttcttcggtattttgtaaaaatttttaaaatatattaaattttctgatttactcaaggaaaaaatgaaattttcatccggtggcgccggtaaatttttttgaaaagttgatttcaatttgttaacaaattatgcgaaaaattgtcaatttttatagatatttttgtctattaatcataaaaaaataaatgcaaaacaaaacgtcaaccggtatcgaactcatgttgaagcattaaccactaaaccacaaatatatcaaaaataaaagcaaaatttactatatttcataaaaatttgccaaagatggttaaaaaatttaaattgtataattttttatcttttatcccaacaattgctttccatttgatggtttttataactaccatttataaaatataaaaaatataattttattttaacaaataataaaaatttaaaaatttgaaattgcatataaattttgaaaatcaaatttttttgcaattgagcaaaaaatgctcctcagccattgttttggtgtttttaaagtcaaattgtttttaaagtcaattctgtatttttacacaatttttggtattttttcactttataaggcattttttagtgtatatttggacattttcgggtttttagggcatttttgggggataaatctttaattatttattattaggggttccttttttaggaacgaaaaaccgcttaataggtacctaaaacgtagaaaaaaaccgaaaaaagcattacagaataaggcacataaatatttttaaataaataaataaatgctgtggactgctcttcggcctgagggaattttagtgccgtcgcctccccccgcgtctttttttatcggcagcggcgcgattttggacagaaaattttttcttttttttcgaaaaattttacgtaaaattgatttaaatgcaaagttttcaaaaattagtaaatttatctcaacaaatttaagacaaaattgaaataatgctcgtttcaaaatgggaacaattgatgtgattcgacgggcccttttgtgcatattttggccaacaccggaggaaatactttgtcgaaattcgggcccaatacatttgaaatgtaagtgagcaattggcggtgtttgacgcccgtgttgaaaagccatacgatcaatcccataagttccatgtaccgtagggcacccgctgcgggactgtaatttgtctgaatgagaaaaagtgatgctatgtggttttgtaaattctgctagcatggaccttttcaaaaatccgccgtttcgtaaattagccaagggaccaaaaaatgaaaaattaaatttataaaattgagtatagcgctaccattaattactgttttttttcaaacgataataccgggtacgggtttttctagtgccggcggtaccggtactaaccgataaaaatttgcaggggtaaaaatctctcatttaaatgcatacttttaatattttaagtggtatattttaaaaaatctggtca

SEQ ID NO: 6163 - DNA, 4812 bp, Heterodera glycines
  unsure (1)..(4812): unsure at all n locations
agaatatttctccgcttcactgtacacaatttttgtgccccatcactaagcccaggcgaactgnnaaataataaaacatttaaaaagtggggggtcatttgagtgcggcacagtttaagcttttaaacttttcttggaaacaaccaaatttaagaaaatcttattttattcaattacggtcaacaaagttcggaaaactagtttttattttcttaaatctttttattcataatttttatgtaacttaacgaaatttttgtatgcttatagaaaatatttaatgccatttaataatatcaaaattgtttaattccttatttctatgaaaaggtaaaaaaggctaaactctctctgcattcaatcgatacggttagaatttaatccagattaattttaactcattaattataatgtttttaggccttagctgacccatatgtgagtaaatgattgcgcgaataagtacaaattcttcattgctcagttttaaacggacgaatggctgaatggccttacaaaacaatttgtcacccattcccatggcactgaaatttcaaaaattttcaattaaatggtaataataaaaaaataatttaaaattcacacacactgaatcttgcttataatacgagttttcgaaggtcttaattggcattagaccatctggtgtgcaaaaaacgtcacaattttgttgcacagagtagaagccgttgcacaacacaaacaatggcatcgcaatattactgcacagggcaatcttttcaatgtgaattaataacaatgaaaattaattaaataaatattatatttcctataatatagcccgcccctaaaataaagccccccccctcccattgaggggggttgagaaatagagccctcccctattagagccccctgaaataaagccccccccctccctttgagggaggttgaggaatatatccctccccgaattagtcccccctaaaataaagccccctccctttgagggaggttgaggaatagagccctccccgaattagtcccccctaaaataaagcccccctccctttgaggggggttgagaaatagagccctccccgaattagacccccctgaaataaagactccctttgaagggtctagaaatagtgcacccctccctgaatcagacagcccatgaaataaagccccccttttgaggtggttgaaaattattttttttttattttgctgtaccttgtcattgatgtcaaactgatcaaagaatggaaaaattttgccaatttcaactactaataacaaacccttttgaagggtttagaaatagagcccccctccctgaatcagacaccccatgaaataaagactctcttttttgggagggattgcgaaataaagcccctccccacctctcgccatgaattagagctcccgtgaataaagcctcccctgaaataccccccccccccttttttgagttgagttaaagataaaaccccctggggctctatttcaagaaatacggtattataaattttttaaaattttactttaccttgtcattgttgtcaagctgcccaaagaatgaaaaacttttgccaatttcgaatacacataacaaatccatgaccattggcgctggccttacacagaagggtccaaactgacgcgctttttcaatatatattgctggaattgcttggaccgtttttgtcttaatttcaaggatttgtccagattttttttatgaattcgtttaccgaaaatttgttgaccaattcgatcaaattcaattttcgtgaaaaaattgattcaaatgtatcacattgtgtgtaaaaaagttctggaattggtgtctgtgagtagcgaatttggcgcactttttgctcaatttgcagcaaattttttaccaaaataaaattgattaattccttttgatccggtgcctaaaatgcacatatgttgctttttcgtggtgacatttaaattggtaaatgactgtgttcaaggcagattttccgaaaattttaattaaattttttaaacaaatttcgttaaaaatgcacatttccacattgttacatattgcatcaatgtttggtcacgccctttcttgggtttttcaatttttaccaaaatttaaaaaaaaatttcaaatttttttgtgagagttttcttccataaaacaagctagaaggcccattagaaaaatatatcccgcttagttatgcgcttacccaacaaaatttttgagtattaaactaaagtccccttaaaatatagtttaaaattgaattttgcccttctccgtctcttcgtataaccgagttgaggacggcattttttcctggatgctctttcattcgttctgcaaatgccattgtttgttcgtcattcaattttgttggacaaatatttcgcggattcattccgaccgttaagcatttgtacagtcggcatcgtttacatgatgataaatctttttaataaaattttaaatttttttctaagatttaattttttaagattataatatataagaaattctttcaaatttagcttataaaaaaatgcttatccaattaattcattcaaaaaggcaaatttaaattttattattattatttatttattttaatatttatatttgcgctttatttttccctttttcacctttgcactctccgccttttttgcagttgtattccttcatcaacgaaattgtgcgacgaaaaaaatgtttgcaacctgcaatttttaaaggcattttaaattcgagggtttggacatttttcaattatttcttatatctcgagttaaatggaaattttgaaaatttaataaaaattattttttaatttttcttcactttttcttttttgtggttcatttaaatttgattactttcacaacattttgccccataatagtaatattgacactgacaattgcataccgcacattttgagttaccaaagttaggcttcatcttttaaaattcaaaaacgaataaaattatgcaatatattaaatacaagtgaatattgaaaataaaatatgctttgtggagtaaaatagggaaaaaaagaatcaatatttttttataaaatattattattattttaagagtgaaattggaaagggaatatgtcgctaaaataagcccatgtgaatattaaattgattttattgcgaaagaagtaaattaaagaaaattacaaatttttactgattagattttttaatttactgatgggattttttttattatatatttatatttttcatttagtaatattataccgtttattattataccctagtccctaaaatactaaacatgggagtgatatatttcagatatattacaaccccacctccaaatggaacctgctcttttaatcctttaaagtttcaaaactttggcacggacgccccattatttgctcagtcaccctcagggctttttatggcatttcaaaaaataataatagacaaaaaatatgacaaaaagacgaagttgatagatataatgaagtaacaatttgtatttcgttttaacttaacgataatttttacaattataatgaaaattattctttagggtcgcatcaccaaaaaatgagaataatcctaaaattttcaaaaattattataaaggatggtaaacctgggagtagagttgcacggtaatcggtaattgtaaaaaatccggtgccggtactgaccggtaatgcaaaaaccggtaccggtaaaaaccggtaattttcaaacgttggtaaacctgggagtagagttgcacggtaatcggtaattgtaaaaaatccggtaccggtactgaccggtaatgcaaaaaccggtacaggtaaaaaccggtaattttcaaacgtaaaaaattaaaaaaacttattggttaaccttttgttcctgtttttgaagcaaattcccggatttcaactccgtaaattgttgtttgtgtcttgcctctaagtgttccacatgcccattgttgatccatcatttcggagaatttttttaccgcaaacattgcataatgctttatcattcgatgatttgtcgaaatatttccaaatggcagacatttattggattttgattaccaaaattaaaatcatgattctcttgtagaataaattaacaagggataagaaattttaactccaaatatattaatcttcaatgaataaatatgacgaaagattgtgtttaaaatgcctaaaatttggcaaaattttctatttttataaaattttccgtttccctaaattttgcatcatcaattttgtgctaaactcctattcttaacagtgcaaatttttaccggcggtaccggtactagacaaaccggtaccggtactttgatttttgaaaaaaccggtaccggtaccaaaaaaaccgcggctggtaatttcgacactgggtaaattggacactgagtaaattcgacactaagtattttcgacactaagtaatttcgacactacattttcgcactgaattatttctaaaactttcactgttttcctgcattttcgacactggaccatttcgacattgagtaatttcgacactatagagaatttggcgctactgtaaaagttaccctttttgaaaattttttttaaaagtcatgaaaatacatttccggggttttcggggccgctgatcacgaatatgacattcatttcgaccaatttcgaaccccggacccggatttatgatcagtaaattttcattgtaatttcaaatctctagacatatgtggtactcagaacttatgagacacatttatgataataacattat

SEQ ID NO: 6164 - DNA, 1956 bp, Heterodera glycines
  unsure (1)..(1956): unsure at all n locations
tgcccagttggcaccccaacgaattgaattgatcattgcatttttacttacaaactcttcccaaatcacaatggtcaacacttggtttttctcgtcctaaatcccaaaaattcgctttccgatttccatgctgaccacgtccacaatttgctgcaaataaaggcggaagctgactttgactgcgtctgagtgattgaacacgggccgttcaactgacaaatgaaaagagttggggagggaattcgaccgacaaaagtcaatgcttttggaaatgcttttgttttgggccattttccccaatcattttgggtccattttccgcttcttcttctgcttctgcttctgcttacctgggtcgtagcggtccttcagatcctgtcaaaaaatggcaaattaaaatggaaaaaggaaatggcaaaattggatgccaaaaaaatagaaaaaagcaaggattatgaaagggtgtgcctgcaaaagtcggtattcgtcatccgaagctgaggcaaatcgcaaaaaggcgataattaggaaggacaattggaatggcaaaagcattttggaagaggaaaaaaagaattgggggaagggacagaagaggaaggaagggaaatgctgcagatcggtgccaaaacggattaattttttttaatttacaaaacaatcactggcgtccattagcgattgatgngccaacaattgcaattggncttcgcccactcccccccccaccctccgattttggcttntctctctctctctctctcttcatgcttcttccccctccgattggcttttctctctctctctcttccatgcttcttccccctccgattggcttttctctctctctctcttccatgcttcttccccctccgattagcttttctccctccctccctctctctctcgtaactcctctccctctctcttccatatctctcttccctctctttcttctcctctctctctccctccctctctctatcttcccctcctccctcccgcccctccttttcttttgctgcccttcccgtttcatcccccccattaatctgtttaatcagctttttcctctgcccattttcctgcgcaatgaacaaaatgaagaaaacatttagggaaaagaaatgatgggacaaatgcttaatagaaaaacccaataatattcataaatcatatttttttattttcgaaaaagcctcgcccaagccaaaggaataaaaaatttattgggaaaaaataaatcaaaatcaaagggaatggataaaatcgaagtaagaaagtttatacaaaatgattaaaagtgatgtaaaagtctgccaaattgttggccaattccttgtgccgattgaagagccattctcgtcaactgcgtcctgagaaaatggggaaataattaaaattaaaaaaagcgaccaatctcccaaacaaattcttcacctcttcgatattttattggcttcttccctctctctcctcccctcttcccccatctctctctctctccctcccctacttcttcctctatctctctctatacctcttttcctccctctctcctttccctctctcttccctccctgcctcttttgctcactcttctatttcccccgtttttcacccccttccagaaatgccatttgctaacttgaatgagtttccgtccgttcggcactgaattggactcttctgctgactcttcccgcttcagagtgccattggatgcgcgggcgagaaggtcgtaataattgcacagatgtgagtcgcaaatgcaatgcacggaaatgggctccgtcaagttgagggagtactccgctgtacaaccaacagaaactttctaaaagaatcgaccgaatgaatggcactgcgcattcggcagcgttaccgagtcatcgtccaccttaagacacccggcaagcagttcatgtcttggcttggaattggccacaaattggg

SEQ ID NO: 6165 - DNA, 2048 bp, Heterodera glycines
ggagctcaaactgtaacagtaattgaggtcatcggcacgacgagtcagcacactttgcatctgatggcgaattgtccggttgcgctggttgcacatccccgagggttccgtgcacacgcagcctttaacagaaatgaaagggatggcattcaattggccaaatagcatttcctttcgtactgtttttcttctcattttgcctaccattcactgctgtttcctccgatgcttggtaatgggcacaggcgatccctccttggaaggtgctcaaataattcggaatgcgaagaaaattttgcagccgtggcatcccctggccgcatccctattttagttttattaattttttatttagccgcttttttcttttatgctcaaaaatagtggcgcgacatttcaaatattgagtagccaaatgccaaacccccaaatgttgagtatcccaatgaatcactgttgttacctgatcaacaccatcaaagtccacctgaatggaaagtaaaattctgtaaagatacggtagaaaagccttctcaccagacagtaatttcctcgacagttcctaaggcatgagtccattgggcactgttcgtcccccccgggctgactgcactcgcaacactccaaaacaggcaaaggggcgggtgaaaagttgttcaactgagaagcaaagccaaaagtaaaagagcaaagacctttctcgctcacctttgtcctgtcattacaaaattgtccgttacagtaacaatggattgattcggtctgtcccgaataattacatccgtcgatgcccggcggcaatccatcgacgcatcccttctgagaaagtaaaactcagatcagatcagtccaatgccttttcatttcttcttcttttacctgcaaaactgcgactgattcttccgggaacagctccaacttggcgaaacattgctgaccttcgcacgaatcgccgccttggccacactcgcaagtgtccaattggggctttccgtccggcataattttgcaatgggttaagcaggaatggcaaagatggagatgagcaagggaaaaggaggacaaagcgaacagcacgagaaggacggcaaagaaatgactcatcagatggggaaggagcagagaaagaaagaaaaagtgatcggaaaaagaaagagtgatcagagcaacggagaagcaactgcaaatggagcaaataatatggacggaatgataattatataataaaacgtaatggggggaaagttggcggaatttcgataaaaagtgcagaatggccttaacggaaaataaagggcacggcattgggcagagagctaactaatcctaatccattcactctttgccggagggcaaagagaaaggaaaagcaacggaagaaaggtggaaggggacggcacggaggcggaaagctaatcccttcatacaagtggggagaggatgagcaaatcgagaggagatgagaggaagaagggatggaggagaaggggacgaggggggggggggaagccagaagtgcaaaacttctaagaccacgtgagaaaaggactttatggaaaacgaaattttcgttttcggatggctgcttttctcccgcgacatttaatttcggagaattatttaggcctttttttacctgaacagcagagaaaaggtttcggaattataataatttttagatttcttcctagaaaaaaaaattaaaaatttctcttgaaaaaatttttttcgtagcggtgggaggattgggacattgtgcatccgtccgcttcttcgcccgctgtttttccgtgacgattgccttaccaatttcgcttggtgtaggtcctccgatttctgacgatggatgacttctcgtccgtcttcacatttcgtccgggccactgatacaacgagcagaacagactcggggctatgctaatagcgacctcgacctgataccttgccgacatcaacaagctatgttttcgaagtgatccgcgaagagagcattacggaggaggtggcgaatctgcgcaaggacataactgacttctcagcgatgtaca

SEQ ID NO: 6166 - DNA, 3358 bp, Heterodera glycines
  unsure (1)..(3358): unsure at all n locations
ctgaccgacattgtttggagtattccgaaatgtttttggattcattggcatggcttttccccctctttgaaaattcccattcttttggccacgccggacagccaaaaatgcgcattttccctctgaaaagcgttgccaaaaagcagctccaacccattgaaaattgtgccgttgttgagactgagccagcgggactgatctgacagggcccactttcccattattattaattattattttaattagcaccttcacaattcgccttttctctttggtaaaccgtcgtaaaagtgtttttgtccgtcctccgttcttctctgttcgggtccctcaaaattcgatgttttttcgttttttgtttcgtaaaatttggccaactcacccaaaagttacgaaatttgcaaccatttcggcaaaacttcgcatgtccttttgttctttgtcttccacactttgtccccgcggcgttggattaaacaccaaatcgtccgcacaaacggactgagaagcggcccacggattggccgagttggccgccacttcggccacgtcgacctgggaaacatttgaggatgaacggaagaggagggcgaacacgcgggcggagccaacgcgcgaacggacgaacgcctcgaggagagcggggccgaccaggaaaaagtctgttctaatctgtcacgtggataaacatggcacacaattgtcgctggtcctgcaaattcccctcactctgttgaccaatgcgtcggggccgtcccccgcggccctttccacgtagtgccgaatcacttcctccgcatagtccaactccgccaagtcatccatggcgcgcatccgcgccaccacctcctccctgaccgcctccgccactctcttccgaaatgtctcttccgtcccttctgtcccttctatttttccgttcgtccattgctcttccgaagtgcaaattgtgatcattgtgctggtagagggaatgtttgagaatggatttgccgggacggcggaggataagtcgtgggagaggaggggccaacggagaaaagtcggccgaaggctcagtgaatcggcggcaacgatcgcctgcgggggggggggggttgggggtgattctcagaggccaacgctttgcccggcacctcatggcccaacgtggccacacaatcgtccaactttcttctggccgccacttcctcctgtgtcagcgcagttttgtgctgcgactctttcaccactttccattccttttcgtccacacatttcgctcaattttcaataatcaaaagagggggaaggcaatcgcttcggaaattaatttccaaaattcaatttgcttttaggcctttaagttaatcgtatcgattgattctttaagtgccaacccgaaatggcaaaacgcatcgaagcatcagaagaaggagaaggacgaggaggaaaagaatcattttgggagaagctcggctggagcattacgggcaaaaaagcggagcccgaaagaaggatttggcgtttgaagaggccttggacgaggaatgagttcatgttttcacattcttagggcactttctcagtctgagtgccacgtcggaaattcggatttcccttttgcgatgcccaccctttgctctaccaatttgtctgatcactcactttgtgtgcccggcaaaaggccgagcagtgcgacgagtcgtgccccgtctccccgcgccatcaccgtcacatgggcacggtggccaccaaaatgggcaatgttcagctgaacccactccaaagcggtgcgaatgtcccaaagggcgagttccctttgcggggtgggccaatgaggcgcactgaacagacctaaaaaaggacagaaagggcttagggaggggggaaggacggaccataaggtcccattcggtagttgagcgacaccaccaccactccgtccccggcacatgccatccttctgatggtgctgatcggctccaaattggcattgctccgtttcagccaatgtccttccggcacatagaccaaaacgggcagcaattgtttggaattcttctgaaatgcggctttaaaagtttattccatggccaatgggaagaacagaatcagtgcaacggtaaatgttgagggtgtggcactgctcggccacgggcaccgcctcgagcggcggcgggtcccaattgatggccggcgcggactttgtgcgaacaaagcttaaattcaaattaacaggctttacttttgccatttggttccaatgcatcctttgtttatccattanactttaccatttgggcatccgttcccgtgatgaatgtcgaaaaagccgcgcggaaatggcgccacttgtgtcggctataacagtgtaattcaaagagatttggcattctgttcaatttgcctggtatcgtggcgtggcgatactgtagggaatgtccaaaaaatactccccgtctcccgacgccaatttccggccgaccataattaactcgtccccgtccacatttacgcgaagttcggtgaacaaatcaggggttgggttgcatccgtgaagcgaaatgaattgatgtgccaaaagcaaagtcagtgcaaaggccaacgcaccgaaaagcgctaattagtgggggtaattagtggggggaggggcggaggaggggtaaggcagcgaattttggggaagggccccaagggaccattttggcactttccagataaaaacattggtttaaacgtacaaaaaagcagcatatctcttccacgagagcagaatataaaagtcaaaggtctctgctgctgttcggcattttcttgtcctttgcaattgtccgacaaatgcggcgaattcggccaattttttgctcggattggcaaattgccagaaggaaaatgggccggaaaaggcattttgaaaagacaaaaagcaatggaaaagcaaagaaaggtcaattgagtattcttctgaacaggattagtaaacaaattttaaagctttttccataagcatcgaacgaatgaacgaaatttgaggaaaagcggaaaaaggggggggggggcaaatggacgatgggcggaagaatcggacgacaaattgggcatgaaattattagagagaaaaaatggaacaaaaatcgaaaaagcacaaaacgtccgatcagatcaatcggaagtgattctttcttcacactttctttcttcaccggctgatcaatttcacatcactcttctgctgttgatcggcaaaagggcggcaaagactaaaagacgggcggagagaaattgacgcgcgggggggggggggttaatgattgtcattcgtgggaggtcagaaacacctaaaagcaggatgaaaaccggattgttgggaggggag

SEQ ID NO: 6167 - DNA, 1732 bp, Heterodera glycines
atcagaaggaaagcgaattgaaatgccgaaaagggaatggcattgaaattcggatttatccgaatattctatcttggaacgatccgcaatgggtaaagtgataatcccagtcacaaaacatcctttgccagcccgaagtcttctcccccccccccattcgatccgtcctgttcctcccaccccccctttcctcctttgaaagatgagcattcattttgtctcccaaccgcattatccaaatggacagctaattaatctcggttttagcaaaggattagctgttggtcagggatcgatcacaaaattagaaatgttttagcttttaagtgaaaaacgatatgacataggaacattgaccaaaacaaatgttgaggcgagaatattcttgaaaaatcatcaataacatttacttttattggctatggtagggtttttgacttttgaatggcataatcaattttaaattgttgccttgttttggttagccgaatatcggccaaaagcttcaaccgaaaaacaaagctgataaatcaggcaaataagtacaaaacaaatcacagcattgctcaaaggcagccaaattttacgattggtatcattcgtccgtcggtggcgttggcggatttaagaaacgttaaatagcaccctttctttatttgtatgaaaatggctttgaaacttggcccaatgacttggtatcattatctttgatgctcgaagtgtttgttcgtttctctcatcacttttcgttttgttcagaattctccgccggtaacagcagttttgcatggtttacaccaaaattagagattcaatctttcaatcccaaaatttattgttgggatgcgactttcacatgtgctgacaaacattggggtggcgtgacaaaacgtcgcccgggggagagttccatcgatttcggcactttgccttatcatcgcttcgctccatttgcgtcaccgttcagcagtccgtccaaaatttaagcagtgaaaaaacagcaatttggttgcttttgtttgcttatcattcccatcccttgtcatttgcattgccttttaaagataatgcgtcattaactaattaattaattattaattgcctattaactgactccttttgtgattggtcgaacaagtgaagtgaatgaatgaataaaaaggaatatttttaggttttgttaatcatttcatttcatttcgaattcgcatttcgtttccccccccccccccttcagactttctttcgtctccattctctccaaaatgtctcgcgtgtgcgtttccgattcgtctcaacttccgattaaaaagaatgagccccgcaccgaatggttgtccattctgctcgcttcttggctggccttcgtctcttcctcccaatactctctctatttcacctctctttggccctttatgaaaacggtaccctttcactttcactttgggcaattggacgaatgttccgtctgtctctttgttttgcgctttcttccgctttatccctgctgatctgtccttccgatcagctcgacccctctgccactgaagcgtcctttggcgttgtgatcgccgtttattccctcgcccaaattgtcgccgctccgctcctcggctggtgggcccatcgcattgagcgattgcgtcccccgcttgtactgtgcaatgtgctgatgatggtcggcagtttgcgggaggttcttgtcgaggcttttcccgccacctttaaaact

SEQ ID NO: 6168 - DNA, 1365 bp, Heterodera glycines
  unsure (1)..(1365): unsure at all n locations
gtgcccgtgccaccgcttttgtcaccggcggagtcgccattggcatttcgctggggccgggtgcgttttcgctgtgcttcggatgatcattgnctaattgttcctcccagccttccaaatcgccttctcctggctctcttaccccggcgtcgcccttttcccctccgttggcctccatctgtccatgttcaatgcgcccgctctgttcgccacatgcattaacattgccaacgtggtcattttggaacgccttttcaaagaaagttctgttggcattttggagaaacgaaaggtgccaaaaataacggaaaaagcggcgagaattcgttggaaaaaaattaattgtccagcagagtcaaagcgaggaaaagcaaccaaattctgtgcccaaattgcctccgccggacagagttgccctgtgcctttgctatttgctccgcttcactcagcagttcatcatcaccaacatcgaaacgtacgtttagcatcaatcggcaattaataaatgccatcgctgtttcagaatcggctccgcttttgccatgctaatgttccgttggggccctaaggaagtgatttactacgagtcgctttctcacattgtccgtgggctgaccgctcttttcgtttacgtcgcttacattgtgcttgacctgggcaaaatgtgagcactttttcctctttggtgatcaatcgctctgtctgtctgtccgatcagagcaaaagaccgtcccgtgtgctttgtgtccctcgtcggtctgctgctcttccatttgctcactttctcatggccctttttgccaaatgatgtgccggaactcagtctgtggtcaagtggtggtggtggttgtcccgacttaagcatcaatcccgaaactcattcattagtctcgagacaaaaaaaaacattgttcaaacgaacacatgacaggagaaccaccaaacaaagactatcaacagaaaaacatcgggttgctttcagtttcgatacaatcgaacaatgtgtccaccactgacggaggccatttgcccacaatggtcggatgcgaccggagagagcacccgtggtgtgacgggctcaagcaggtcagtgaatagcacaccaaatcatgccaaatgcaaatcaaagtgccaatcataggtcgaccctcgcctttactatgcgctgatgatcactgtcatcggctcgacctttcccctcatcaacgtgtccatgaacaccattttctctgctgcagttggccctcggctacaggccaagcaacagagcattctgatggtatcgggtgggatgggccgaatgctgggcccacttctaatcgggttcgatgaaaaggcaaaaaagtttgacgttcttgaaaattt

SEQ ID NO: 6169 - DNA, 515 bp, Heterodera glycines
acgtattacatagctaattcaagagtgtgatctaaaaatatccattcatcaagcagggtcagcccaatcaaattgggctaatagcggcgcgtttattgactggctcggctttatcaagctgtaccctttcccataagaatgaatgtattgcagcctctttcgccatggctctctttcattcagtcatgagccggtgactctgattgaagccatcaacggtccttttacgtcgtcctcccctccggcgccgccactccattccttcgccgttggtactgacgacgccacggcacagttccaacagaagcagcaacaggcggaaaacagagacgacggagcagagcaagcagcggtaaatattcgcgatgatggtgaagccctacacaaaacggcaccgacggcggcaatggtcgcgcgctgtcgcggctctcaaattgtgaccagtactattgtccatccgtcaccggcactcccaccattcgcctctgtgcccaattaccaacacccacaaatgc

SEQ ID NO: 6170 - DNA, 1393 bp, Heterodera glycines
tgggagtgaccaattacccctctaaaccatccaaataacagagtccccagcaaaatgagcaaatgaaaatgcgaaatgaaacaatggaacaaattgaaatgggccaattacgaagcagaaaggtgtgccttcatttaattcgatttcctatcgaaattctaaatcatttccccttttcctccttcacagggttcccattcgagtgccgttttctgtccttcttccgtcgacaattccttcgtttttgccagtcgttcgccttcgctgtgccgtatggacaatgacaacaactgtcactcacatttctccgtgcaaaattcctcctatcaatcggcgcgttcatttgcgacaaaaaccgacggttatagaaacacagggcaaaagcaattggaaatggcgcagagaaacggacagagacggcatttgggcagttcgccaaatttgggtgggcccactttttgaaaattgtccaatatgtcacttgcagtgaatcttacgtttcattcgagcggaggggcagcagaagaaggagtgaaactgcggaagagatcggaatccacggaatgggaggggacagaacgcaagcggaggcccaaaggagcggaggggaggaaaggatatgggaaacggcgatcggaaaccatgggagacgattgggcgggagacgagccggccgaaatgcggtgaataaacagagggatgggaggagagagcggtgatcagtcagtgccaacgattaaagcaaattgtgatcagacaaaggcgggggataaaggcaatgtgattaataatgccaagtcggatatttattcttgctgggccaaagaaggaaggcaggaatttcggagtttaaagccgagtggaatcgattgataaatagggatgcgatttttaggcaaattcctaaaattactgcgcacttgatacgcacagataagcacgaaaaacgcattttccgcttggtttgtggtgtctacgatgaatattataatgcttaatgtgcctatttcgcgatttattgtgcctaaaaatcgcatccctattgataaacatatatttgctgaaccttcatgcgtttttacccgttggacgcttcagtcccaaaggtatttatccatttcagtcccgggtgtgtaacaagggcgtaggcaggggggtggggctgaatgagtcctgccaactcaggcagtcccaatacgtctcccataacaagatgaagaaaatggcacacacattgaaagcttaaaaaataattataaaaaacaaaaaattacgtaaaacctattcaagttccaaatatttgtggtccttatcatgttttttgcgttgccgcgaaccaaaacaataattttttccgggtttaaccatttgtccgaaaaacgtttcccatttc

SEQ ID NO: 6171 - DNA, 2306 bp, Heterodera glycines
ttgctctgtgggtattagtcatagactcgccattctataagcaaatcggtagagaattttgttctctttctgataggcctactcattttttacagaaaaattttcccaaccccctaggaatttttgttcgaaaatttcccagatttcaagccatatggggggggggggttgattggtgcatgacacattttctcgaggacaaaagagttatcggtgtagtttttgggtatttgttagtgcattaattaatgtttcttttagcgtaaataactcttttttcccaccattcatttttgagaaaaccggggttttttttttaaatttttgttccattacttttgcacctgactgtaaatctcaattgaaatttaaatattttcgtttctttttcgcctgaattcgtttgccgaaaacgaacgaaaattaaaaaatgaaatcaaaattaaattttttaatccgataaattttttggacggacgaaaacgaaaattcagaatgtgccgaaaggggacgaaacgaaaacgacacgaaagaaataaagaaaagaatcggaagcgcccagaaaattctcagaaactaggacaaattgtagagttggactaacttctgaaaatttgttcttagtgtgtaagaacgactaataaagagctcactgtcgaaaatcacttaatgtcggaatgacagtaccatggctttggcaatacccaattaaatacggtacatcataatttgtaaaaggtccctgcggcctccaatatccatacttttattagttttatattatttgtgcaaatcattaaaaatgtgatagcatttgcatgatgatcttctctcctataaaaggttgacaaaaacttccggtaacttcagcccactgtgtactgtaatggtcgccttggaattgacgctgaatgccggacagaaaaggccgcggggcatgtttctgtacaaataaggctaattattttttaatttgcaagtttaattttaatcgaagcttcagggaatggggttaactgattttttccattcactttttagaaaaaattcaatttttttttaatttttccgattatccgcaaatgtcccctgcggcaacgttctgccctccccctctgtcttttccccgtccaccgacttaaatgcgtgtacacaaagcggcgtgccattgatggcgaagctgagcgtgccccggtcgcagtccatcgccactccgatcacacttccgcagccgatcaccccgctgctcatccgcccgtggtgagtgtccgcgtggaaaaaccacgagcgctgcccgtccacgtacatactccagccatgcgcatcttttcctgattagacaaaattttaaaatggaaaattagctaattaattaattattttttgtttgtatgtcccattacaatgaccaattagttaattagtcttcgctcctcccatttttggtctcaccgagcatcgcccttcggttgaccggtggctgtgccactccgatcacaacgtctgcgttcccgtcgtaccggtccacgctcgcctcccagtaatgaatgccttgcgaaaaggtcactgtgcccagcacggtacggtagtcaatggacgcgccggttacggtacaacaatcgttggagaaaagcagcagcaaatcgtccccttcagcgattgggagcggggaagaactgcgcatggcaatgccgaggccaacttcagctgaagaagaagcggactcggcagcggtggaggaggaagggacagaggaggaatcatcggggctgagatggaaccaggcaactgaaagagagggacaatttatggggtaaaatgggggggggaggcggattaatcccgaaggctacccgagataaccccaaatgtcgcgccatgttcccgaaagtttcacgaaggcaggggtgttcccttggcacagcaaattcccatacaaatgttattttagaagagaaaatcaaaacttgagcacaaagattgaaaaaagcagacggttaatagtgatttgattatttttcgggtgttttcccatggcaattcgcccccaaaggcgggggtcaaccttttgagctaacaaggacaattttcccgggcagaattctgaatgaaaacgtttttcgggtttctccctgacaaatgagtgctaattgtttcgatcattgcctggggctgtctgcagactgatcagttcgctgtaagggccttcgcccgacccattgaatgccctcactcgcgcactgtacaaagtgttgaaatgcaatccgtccagcgagcacacactttctggtccacaatacacttcc

SEQ ID NO: 6172 - DNA, 2629 bp, Heterodera glycines
  unsure (1)..(2629): unsure at all n locations
atcgaattgttctccgctgaacattcatccgccacnaattggggcgcagaaggcgctgaacaatggaaaatcggcaaatgattcttcggatggcattcattatccatggccgattcggcgcgagagtgccaataaattttcaatttcccggtaaatcaaatatttgggcttaatgaccctgcaatatttcaaaaaaaaaaatcccaaaaaattgtacaaaatatctaaaaattcgaccaaagattatggaaagtgaatttttgtcactcattcgaattggcacgcaaaacgaccctatcaaaacgaaggaagaggaggcatttgggaaaatgggataagctaatggcaaaaacaacttcgaattacctaaaaatgcatttggaggacaccacaaaaactgagactttcttcacaaaacacacgacaaattcttgtcattttccaaatgatttccacaaaattttgtttaaaaattaaaatattaaaaatgaaatttcatttccttggcgtggaaataaacaattggaaatggcatttccatttcctcttgcccacctcctctctcaattggtccggcctcatttttgtgttgcttctctccaatttcttaggtttcaaaatttaattaaaatatttaattaaaataactttttatttatttttttgtttggagagcaattaaacgcaaatggaagcaaaaaacaaaagaaaattgtcgtgagtgactcacctttcaactgaataaattccaactgatcgatggccgtccgaagttgtgccgaatcgatgtcgaattcgaattggacctccacctcgggcttggttctgatctcgcggtgccaaaggaattcctggtcagtcacacgggaggccaacgcgaagccaacctttggaagatcattaaatatacaattaatgtccacccggttctgattactccgatcacctgcaaatacgccgccgggtcggactccttcagaagttcgatgcaaaattggatcagtgccctgttccgaccgagttgtgccgtagaccgtccgatctgttcccgcaactgcgctttcctccgctccttttcccccgcggcgaaatcagtcagctgttgccttcgcagttggagaagggcgatcagttcgtccatctctcgctcaatgcctcggctgaacgcgtcgcaattggcctttaacgtgcaaagcttttcctcattagaacagaaacaagcgaattgttttatggcaccaaaaattcacttccttttttggctttaaacatttccccagaatgaaaaatattgagtttggttaaccatctgctgatgtggcaccacccaccaacattaacattataacattaatcgttaattaccaaatatgcttacgaatatattaagcccaaagaaatgccaaaatcccccccccccccccctctttctctctgatctgccattcccaagtttccatcttttgtctcctacccaacacctacgtcgatttcgttttgcaactgtttcaatgccgtgatgtcttcggtcgcttgtcgcactttggcactgagcatttgcagcgattgggacaattcggtctgaatttaaaaagatgtcttttgcaaattgtccctttcattattatctttcgttcctatatcctttttcatttttttttcattgtaaatccatccaattaatcatccatctttttccccctttttttctgatgagtgtccaatcacaaatttgtcatttgtctttacatttggctcagtttaataatttgtctcccatcattagcaattttttccgttgtcctttttcttccaattgtctttttcgacactttgtccatttgcggtttaattttttttcatttgctttttccttgaacatttgtctgtttttttgttcatttcttaatttgtccctttaccatttttgacttttccttcgcctttcccttcttttgtcctattttgtttgtctccgttccccgctatttgtctgttctttcattttgtcctttttggcaatttgtcccctttttcgactgtttgtccgtttgtccccccggggcggctttttcttttcctcaactttaaatacaaagaacaaaggaatgcctatgacaaacacataaaggacgaaaacgaacactttgaggctattggtcgaccatgaaatgagtctttgtgggcaaataaacaattggcgtcggccgtgggcggcggtcactctttgagggaacggatttaaacgatcggattcaaattaaaaatttattagcatctctcatttgcacttttgctgcttgccaccctcgcaaattgctaataaatgaatcccgtacatttctgccaaagtggcattaattgcttttaaaattggcaactttcttttctcttttttcttttgtttttccctctttcttttctcttttttcttttgtttttccctctttctttctctttcctctttctctttctctctatggcgttctccgttattcattcaaattcattcatttattcgtcggtcattattcaattacattttcccgcactcccaactctcgaggggcgaagaagcagcagagaataaagtgtgccgggggtgggctccatttcgcataacccaaag

SEQ ID NO: 6173 - DNA, 2292 bp, Heterodera glycines
aatcaatttcacattattttggagtttctccggggaatttctcgcaactatcgaatgaacccgtgaatttctgttaatttttacattttttattgttaaaattattgttgaatttatttttaaactgtttattttacattttatgctgaaatttaaaaagttgtttttactgtgatttttcatttttctgtacttggggcccaaacgaccccggggcccaaaaacgagggcccaaaaactggggcccaaacgcccccgactcctttttgagtatttttgcgcagataattatggcacaacccaataatgcttcttcttttttttttgcagattttttgacttaattactcaccctttcctttttatagtcaaattcaacaaaaataataacattttctggcccagaaaatacgcaatgaacgtcgaagaatcgcctcttttgacggagtttaagacctttcttcaggcgactcttgtcgcattcggaagcgacggagcacttttctcactggtcaatcagaaattcaggttcaaaaattggccagccctaaaatcgagtcaatgatttgtcttgtttgattttagcgaggattgggttggctcgccctctctcaaggaatacgcgaccaaattgggtttcgccggttcaaaaggcatcctcaaattgctgcagtccattcccgaccaggtcattgagcagtgcgttatggtctctaatcgctgcaataatttacatgtgatcattttgaaggtgtcaattttggtgaatccgaccggagaagtgattttgaagcccgtccctatggaggagacgcgcgacaatctggccaaaattgacgcgaccaacagagagctcaaagcgtgtgttatttgtttgggacagctaacttcctaccggctttcctcccccccccccacccctcccgcactcgaaaattttaaaattacataggttttattttaaaaaaagtttgaagaaatctaaacctccattttggaaaatcagctttgttttccttttgaaaaatctgtttgttctttttcgatttttggtgaatttttttaaaataaagtttcgaattttggtttaattcgggccctgggttcgaaattgatgacgcattcgtgatcagcgatcccgaaaactaaatattgtttttttttgtttaattgaaaaaaatataaaaaatgtggggcctaaacggaatgagagccagaaaattctatgtgtttgaatttctcaatccaacagtttatttatgaaatttttcttcgaatttcaaactcatgctttgctaacaaacgtcctttgctttgcagtgagaaaatgcgacgccaacaattccatgggcctcttccggcggctgtcactgcgcaattggccgctgcgatgatgccgggttggccacccaagtgccggtgcatccgttggcctcagttttcaatgcgagcatcaaacgcaccgcaacgactccgtccaatgctggacttttcccagcaccggcgaagaagaaaatcaatcccaatttgattccacttgaaccgactcgtattgcacagtgtgacagtaccaataacatcgtggacaatggcaatgccaataaagtcaccagcggtgtcagttgcagtgccagcaaaattaccaacaatgccaatggaaatgccagcaaagttcccagcggtgccaataaaatcaccaacaatgccaatggaaatgccagcaaagttcccagcgcttccaatcgaagtcccagcaaagttaccagcggtgccaataaaatcaccaacaatgccaatggaaatgccagcaaaagcggtgctaatggaagggccaataaagtcacaaacggtgccaatgctagtgccggcaaagttcccagcgcttccaatcgaagacccagcaaagttaccagcggtgccaatataattaccaacagtaccaatggaagtgccaaaattgcgcgaaatgccggtgctattgggacaaacggttcgacggcggtgacacgaacgacgagcgcaactgagcaacggcagcagaacatcaagatcaggaaagtgagctttgagaaggcgatgagatacatggagagggaggcgtggaagcaagcggagaagcgaagcgagtgagcgattaataggcttttcatttgaaaatgatacctttgggtggggagaacccaattggaaccaaccttcataaactatgattggacttacaaaaaaatgattggactcataaaatgcattagagccgcgcttttttatcccttaaatgaagcttttacatat

SEQ ID NO: 6174 - DNA, 4588 bp, Heterodera glycines
ttttccgggtcagcgagcgcgcgtctaactgttacggcgtcgctctgttgccgtgccttacaggcatttgccattcgcctaatttattcgcccataaaacataaaatataagtggtaccaattcaggcagaggcgtggacccatcaatgtttttgaccgcccattcgccttcggcaacttcgctgttccgtccttccacgtccgctcccgccaaagcagtgtccccgtcaccacgaacgcaggcacaagagccgaagcaacagccaaatgtaaaatttacagtattaaaccgtgagcaagggcgctaggcttttaaaaattttgctttttcaatgttttagttttcaaaattaacgaaattgcctccaaccccgagattgacccccccccccccctctgactcctcaagctttgtctttcatataaaacataatttttttgtccatttatcattttggcttttcagcttcctcccaataacaatgctcattgtcagctgactcagttcggtgagcagaaaattgactctgttctgaggtttgtatttccgttgcattgttttccgacactaactgacttatgtttggcttttcctctttagctcttacgccgttttgttggattcgctgaaggaagcgccgctttctccgccgttcagtgtcgatcagttggttctgttccgtcctgcaaaactcggcctgtgtcatggtaaaattgtgcgccaggacaaccaacatttggtcgtgaagcatttggacactcagaaagaacattttgtcaacattgatgctgtttacgcatttcccagccaacttttgaaggcaattctttgctgcttttgggggttttagccaaggccctcactttttaggagcactcggcaaagccccgttcgtgcagcaaaatggcatgtcatcccggcactcaattcaatttcattgtaccctttaatggtcaacagttccgctgtttttgatgcgacaatatgaagattctcagatttttcaataaccattttttactggtttatatttatttacgaacattcacaaatacaatttcttatcctttctttcatatttatttttaataaattacaaaataagttgctattaaaatctttttgaaaacaattattggcaagtaattaattttaaaaaagtgaaagaatgaatcccgttttttccttacatcgccctgagttttgccggacagaaactcgccctcgagttgttctccaacaacgttttgtagcgtttttgtatggcgtaagcgcccaatttcggcttcctttcccttgtcaacactcctttatggttgccgatcgcccgactaacggctaaagtgggaaatggcaatgattaataatgttgcactatttggctgacatggagcggttataaaatccgcgaagttccacagcatttccccggcgatgtcttcagagaatcgcaactcgtccaccgctttgcccgtctcctggatcagttccgcctggtactgttcggaaaagggcacgctcggctgctgcaataaataaatgttcacttaacccgtccttgggcagtgtctttggccacctcattaaagccgctaattgcttcggcgccgtactcactcaaaatcaccggtttggtgtaattgtgacgccattttcgaaattgatcgaccaaaaaagaattgcattacttaatgcaccgaaattgccaaccaaccaattggtcgcggatcagtcccaacatgccaatgtttctgtaccaacctcaaattgaaaaagtaacaattgcaaaatgaacaaatcattgaaaaatgccaccaaaatattccttgacacaaatgacgtccaaaagtgacgcctcaaagcaaaaggaattattggcaccagcgaaagtgccttttttgtcacctcaccactttaacggccgccgacgcgtggccaaaaacaacggtgaccggcctcgtggcgtccaattgtttggtcaaagtgaccaaattccttgtcgtcagaatgtttctcaaaattgaaaatgtcccatgcctttacttgaaatatttgtaaggtgtcgagtcggcgggcattttcggctcatttgacagtgaccacattatgacggacggatggtttcggtcgcggctgaccatttccgcgatcatttccccgtgcagtttcagcaatgccgaggagttgagcttcctaaaaacggacagaattcgttcaaaaaaatgggcattttgttgtttgggatccccgaaaaagccgaaaaatggtcgttggacgtcctttgcccatcccccgcgacggcaccttcgcctcaccaaattccaacggccggcacttccgtaatgaccgcaattccccgccggtccgcccagtacgctctctcttccgcgtaagggtaatgacttgtgcgatagcaattgccgttcaaccactcgaacatgttcatgtccttcaccatcgccgcccggtcaaaacctctgccgtgaatctgaagagaaatgaaaaaacaattagcaatgaaattcaaaaatacaggggaaatgaaaattaaagatcttaatttgcaaatctcagactttatgacttcaaatttgttcactttgttccttcccctctttttactttggacgaatacccaactcatactgttaaaaaaaaattctttttgctaaagttgaaaaagttatggacaaatctttgacgaaagttgcgacgcccttttgccgattaacagtacgcctcggggcagtacgagttggatttttaccttttattctacccccccccctccctttttgtttattttttgtttggcatggcatttggtcaattcgtactccgatgtcctcgtgcattccgaatccatgacagtaaaatggtcgcccattgatgtaaattctgttttggtccacagttactgtccgaaagccaaaagtctctgataaataagggaaaaaatgattgacatggacaacgaatggcacctctgtaaacatccgacaacaaatatttggaactgacgtaagaaagagactcgagacgaaccttaagacatggaaatttcaaaaaaatgcaaaaaaggaggaaatttgttaattgttttacttcggcggtgtaaagggtcggtttgcccattccccgcggccaccaaaggtcaattttggcaaaagttgtcgaattttggctcccgaaaaattcgtaaattttctttgctcccttagattgtaaaatgaggacacgaattcgaatgtcctctgcggggtgagcgtcgcgggcgacgtcaattcggtaagaaaatgagcctaaagtagtgaaactgagatgaaaagcaggaaaatttgaatatggagaaatgaaattagggcaccattcagacaattcaaaaaacaaaaaaagcaattttcgaattattttaaaaaagggatggataagttgcttccatagtgatcccgatagtgaaaagataattacccaaatggtcagtccgaatttgtatgccacgaataaaaattggcgccaaatgccaaaggtaaacggagcgaagaatgccggcgtaattgaaaaagtcgaaagagggcaccacactgactaactcacgacccgatgacctaaagttggtggaatgattggcgaacaaatgctttgaaattggctatttttaaaaattatttttgaaaaatcccccaaaagtgaccgttttcccatgactcacagttttatggtggcgaaatcgccgggcggaattgtgtcatgtgacaaagtgttgttgaccgccaccgaaatgaggttgacatcgacgagttcgacttcgacttggaatggcaaatgcccgccacaatgttccgtcaccaattttccatttacaaactgaaaactgcgacaaatttcacaaatgtccaacaaagtcctaccacaaaagcgtaataattgacactttcaaaacgcaaaaatgatcttcttccgttgggtgacgcgtcccgcaaaaaatgagacaaaaagtatttgcgttggtaccacacccatccgacatggtcgcgctgctcactgtccgccgtcaaatcgttgaaagccgaagggacgggaatttgtgaagaattctgcaccaaacattcagaacagacacttttttgggctgccaaaacaattcattgccttggtgtggctcagctgacctcaaacagggccaattccaacgaagcccattggttttggagaccaatcccgacactattcgggggctctctcacaaaggtccacaaaccgtcgagactatccaattgccggcgttcattttgctgggaaaagatatttaagcattgaaataatttaatatgtaaaaattactcacaacagcaaataaagcatatccgtaattagttgcataaatcagcacaaaaatgaaaaagaaattcagaaaaaatccattattggataaagtgagcataatattagggctgagattatttatttatttattcaagtaataaaagtccaaaagaaaggacaaaggccgcttatattttcggagaatatgatagtccgggaaacatgatgatgtcagatctcctacattaaattaatcttgta

SEQ ID NO: 6175 - DNA, 6210 bp, Heterodera glycines
aattggcgcagacggcgaaaaatgacagtgttcaaaaacatcacacaaatggagtggcggagcattgcccaaatgttgagcaaaacaaagtccaaaatgcaaacattttcagtgctaatgtacaaatcgatcgtacaaacggcgaaaatacgacgaaaacggcggagaaatgcgacgacattttgatcgatgtaactgaaaacaaaaatgtatacgaaaaattgcaaattaatcagttttttacatgatatgaatgtctcggaatccgatgactttgttaggcaacggattttgcgggattggcaatggatttccatcggaattgacaatttgcattttcttcgtcccattttcttgaatgtcccattggataagaaattgtttgttcaatttccatttgcgcgtcttgaaatgttcgtccacgtaaatgtcaaagcgatggctaatcagtgcaatttcgaggccaagttgagaaggcgcaagaaaatcgaacaccaaaagccaacagtcgctgcagataaagctgaaaattgaaaaaaattttcgaaatattaaaatttttgtttttatttacatttcttttttgtgagggcgtcgtcgttttttggcattgtccaaaaagaagcaaaaaagaatggtggcacaatcgaccaatagaagaaacacggtagacacactgaaaataaattggggaaatgaatgaatgaattaattaagaaaaggaaaagcatcaaagcgagggaattgaaattgaatttttagcctccaaaaagctaatctttcaaaaatgcttttgaaatttgcatctcccaattctggtcaaaagtgaagcaaaagaaaatgcgaaatgtcagaaaagaaagaaataataaacgtacagaatttctgaagacatttgcggaacagaatgaccggaaaatagagggaaaataatgagagaatggaatgaggaggaggaaaagaaaaaagtgcatttttatactaaaaatatttgcatagcaattcggggagggaaaagtcggcgtttttacgcagttttgtttctttgtggttttataattttttgaaattttctggcaaatcgaaaacacttagacctatcaatttgttttaagaatattttacgggtttgaccgttctaaaagcttaggagtccccattttgaccattttacattttaatccgggccaaaaacaattcaataggcttaaacattacaatggattttaaaagtatattgtattcctcgctcgagagtctcgggaaattttctgtctcaagcagcactagtgcgggcagagatgggcgaagctcggcttagcactcgaagccaaaggcaaagcccaatttttttcgaagcacgaagttcggtccaaaaaaaaaaccgaagctttcgaagctcgcagtttcgcccacccctggtgcgggggcctcgaatttcagaaataaacacatttggaagttaaaattaaagatgagaagctaaactaatctcgtttatttcagagaagagattcctttcaaatctcacaatcaaggcatttaaaacttttaacaattttatttattttttggctaacaattgtttattaaagaattttttgttgttttttaagcaatgtgccaaactttaaaaaaaaaattctcagtgacgaactgaacagtaacgaaacgatcagtgacgaaatgagcggccaccttttagttgaaaagcgtcaaaaattaattaaaaaattgaacatttttgggaacattttgccaagaatttgattgcaaaaaaaaagaacttttgtaaaaaaaattcaaaaaatttcaaaaatcgccaaaatatgtgccaaaaactaccaaaagcccaaaatatgtttttattcgccaaaagcacaaaatatgtttttgtaaaaacatataaatcagttccctggacatatgtatgaaatagtacgccaaaatacgaattttttcactctgcgttctttatttatttggttcaactaaaattttatataaataatcggaaaatgctcaaatttgtcatcatttttcctcgtcttcttttaaaccgcgaacgaatttgtgttccttcacttctaattacatttttaatcactattttaccttttatgtacacgtgtttattgctctgattccatcatgataaacattttagcaaaagataattttattttatttatttttaaattttgttttaaatgccttcaaaacgttgaacatctgtatgaagagactcctgaacaactaaatgaagggatttcttggaccatacccaattgtgtgatactttacaccattattgcaaatttaactttttttcacctttccaaacagtttcatttttcttttccatgtcatcaatccttcaaccttttcttttcatcttttcattttagttcagtcgaaaattctaactttattatttcaattccccgatttttccagcatttcctccaattcccattatttccttttttcagttcagctatttttgctcctgaaaatcttacggtttcatcgaattgaaaaaaacctgacaaaaatcgttttcatgaataaatttttcgggtttgatggaatgcttcctgtttgtaactattaaaacttggttttaacgaattttggaaaataaaattattgtaggttggtgcaacgaatatattgtatacaaataaactacatacacctcaattatgtttaaccgaacgacttttgttcacccagcatataagtagcaccagaaggatgacattcaaactcttttttggactcattgttttatggattaacgtgaaaatttaggtccaatcggtgaaattttagagatttttgaattttttcatttcagggatgctttctaagttacctaagtttcatactttttagctgtttaaatattcttgatcaaaaagtgtgaaaaaataaagaaaactcagattttctaaatcaaaaatttttattttaaattattcaaaaaacttaaaatggcataaaaagcattccttaataggaaatagtttaaattttgtgaaaatttcgccgattttacctagattttcacgtcttaaccaaacaaaggagtccgaataaaaaaaaacgaggtagaaaaataaaaaggagttgaatcaaatattcgataaaacgaattgagcaaaaacgaattgaccagaaaatgaaattatcgaatctccttaattcaccaatgtttgacactctccggattacagatgttcaacgttgtcgggcaattgaccagagaaaatattgcgaaaatgtcacttaatcacttaccggattcagaaaaatttaaataattctcaagaaaactacagtaagcataaatggaatcggagcaatatccatatgtaatatagctttaaccctattgcgctaaagatttgctcctgagatagtctaaatggaaaacagcaacagcaacaacaatgaacttattggaggtggtggcaggttggcagttccggaacgaaatgtcgccttagaacaagatggagaagccgaggccgatgcggggagggaggcggataaagcggaggatgacgacgacgacggtgacgacgactactcgccgttcgctggggacaacatttttttgccagcccactggaagcctaatttctgggcccgccagttcactctggaggtgaaacagtagatgaaacattggcgcaataaaaaagctgttctcctcagacgttctgcacattgcacctggaggtcatgggacttcggaacaccatggccggcacattgagggactgtgagatgacagttggcaatttccatccaatgccacccgaagaagtgcccggcgcaatgcagcagttcgtcgcctggttcaaccacgagctggcttccgcgtcgtcatctgccgctgaattcgcagcgcgggctcagcacacgcttgtgagtagaataaattaaaaggccgatggtaattagtagggctacgatttttagttgctaaaaactgtgaaaatagttgcaaaagactttcaaatttagcgtgtaaaatcacaaaaattttatccaaaaaggaataaaaatagccaaatcagtattgagataaatcattttaaaactacaaattcttgtaaagaataattttaaaaattaatttcttaggggtgtattttcgcttttattgcgtttttgtttatatttttggaaaaaacgccaaaataatttttaaaaatttttttcaaattttcgtttgattttttcggttttgttcttaaaaacaaaaacctagaaaaatagttcgtaataactcgagaaccagtttaacaacaaccgaaaaaaacatgtttttcagtgaacaggacaaaatcacgccgccaaaatccgccgggaaaaaatcccacccccaaaatcgcgctgggacaaaatcacgccgccaaaagccacggggagctcaggaaaatattgaaaaaaactaaaaatcgtagcctcatatatcatcattttgacaaaaattgcctaaggacaaaacgccaaaaaaccccactaatttaaaaattttgccgagattttcccttgattcatccgttttacgacggcaatggaaggacctcacgcctgctgatgaacctcatcatgctgcgccgtggataccacccggtcatcctgcccgagaaaaaacgtgatgaatattacacgtggctggaggaagcttcagacaacaacaacattgagccattcataaagttcatcagcttccaccagcaatgtgctcaagacctggagcccgcgtcctccctcccctcatcctcatcctaattttcaatcactaacccatattatattgtacttatatgtgtatatattaggtatatttgagaaatgatcttcaatctcaccaattggaatttgatttgatgctctcattttctctcagactcactttttgttgaataattcattcgttcgaatatacaaataaatattcattgaattctatttttaaaaatttctatgaaatttttaattatgcttatattttaaaaagatttagcgaactcactaactctcatatttaaacgcttatttacctattttgaaaatttttaaaattctgagttttccagttgtttatacatatatatatgattttagtttttgaaaaaaatttcaaactatttttcgcatattttgccatttaacctccaatttattaacatttacaccaatttacgcgatttctccataaaatactatcactgctgaattatgatcgatcatttctcatttaattcacttcctttgctgatcatcagtgatcactgttgttgttctctggcggagaaaaaggcctaaattaagtgcaatttgaatttaaaaaaaataaatgcttcttttgttattcacccaatgcaaatattgacatcgtgaatcccaatgtgcacattgttcaaattgctcgaatttacttcttcgccttcccactgaatcgccgccgtcgtctccccattttggcaccgtttcattatccatcggtcgacccattcatcttcgcttgctttgatcaatatcagcttttcattggttcgtccgttcaccaattcaaatggctcaagcagcgaatggtcgggcaacggaaatggcactgaattgtcttcgtcgataatcacggctaatttcggcattgctgcaacagcacctttgcaaattttgattgttctcaaaattggaaattctgattggccatcgaaatgtttgtccaccaacgcatcaaaacgtggcgaaagaagtgccattttgaggccgagttggggacggtcaaaagatgggagaatgtccatccaaacgtacctaattttttttctacaaaaccatttactaagtttttaatttgagaaagaaatctttgtttatttgttaattatatttttttgctaataaataatcgtccctttttgtatagacggtttttcctgacaccactcaacgttataacaacattttttttatattattcttcatcttttatatcttttatccttctttgaaggtctttttcttttttaacagatttaatctgaaatttttttaaatgttgtagcaacaacaaggccaaatttcttgaaaatgagaatgaaacataacaaaaaaacattttttaatatataatttattctttaagtaacataataaaaaatgaatatatttattttaaattta

SEQ ID NO: 6176 - DNA, 2283 bp, Heterodera glycines
ctttctggtcctcttccactttctcttacacttcctttaacacgttctgtttctcttccactttctgtttctcttccactttctgttcctcttccactttctgttcctcttccactttctcttccactttctgttcctcttccactttctcttacactttctcttccactttctgttcctcttccactttctggtcctcttccactttctcttcctcttccactttctcttccactttctgttcctcttccactttctcttccactttctgttcctcttccactttctcttccactttctcttccactttctgttcctcatccactttttcttccactttctgttcctcttccacttcctcttccactttctcttccactttctcttccactttctgttcctcttccactttctcttccactttctgttcctcttccactttctcttccactttctcttccactttctgttcctcttccactttctcttccactttctgttcctcttccactttctcttccactttctcttccactttctgttcctcttccactttctcttccactttctgttcctctttctcttccactttctgttcctcttccactttctcttccactttctgttcctcttccactttctgttcctcccgtacccggtttaaaaacttggacccggacccggctttcctggacccggaaaaatacgttcaaaaaagggcaatcccaaaaaagtgctatttttgagtcatttttcgaacacagttcgaacagttctgaaaattttggaaaactgatatttttcccttatagcccttgcaaaactgcgtcgattgacaccacacccaccccctaactctcaaaaagactcgagattttcatttttatgcttggatcatgggtataaatttcttatatagggaaagttgagtgtttgtatgtatgtatctgctatcgtttgaattggcgtggcgttttgttattcttttgccttaaaaaatgatttgaaaaatgaaaagtttgttttgcctttttttcattttggttttgtttatgtaatttatttgcttttgatttgtattttatgtgttattttttgttatttgtaagaaaaagtttgtttttcgtttgtgtaaatgattatgtaaagaaaaaagcatttttctttttgtatctgcctatttttagattacttttcatgattcctatttctcaaattttgtttgttgttttgaatttgatatttgcatgaaccaagtattttgcttttatttatgcttaatgtttaatttataattatgttttgctttttgtttatttgttatttagccaaattgtattggttttaaactgcaggttttattgtattatgtgcctctcatccttgagacacaaaagtggaatttatcaaaaagttaatttaaatgtattgttttgagatgtacactactgtgtctctaatgtttttgagaccacacaagtgttgaattttgtcaaaaagaattcttttttgtattgttttgagatgtacactactgtctctcaaaaaagatcaattgatggctaataaatggctgataattggattttgaattagcagcaaaccctgccggatcctcgtgataagagaaagatggaatgatcactgatcagcagaagaagcgaaatgatcgctgattttggacagattaacatttcgaagattttatagttttaaaactttcattttgcttttagaattatttcttgttggaactccaattttaatcttcttccttttcccaaaatttagctagaatgacggaataattagtttttttttttggtctaagagttttttaaaggaacaaattttttcctgacttcacataaaatttgaaaatgaagacacaaatgcgtcaaaataaacagaaaatttctaattttaaagtttaatattttaaattagagtgccacggtaccgggaattttgggcaaatccgggaccttttcagattggaatatcaggaattcttggctgagaaaccctatgactattattcagttacggacataatcgatattaagaaacttttttgtccaataccataatttaatttaaattacataatttatttattattataaaacaaacactcttttaaatgaattaaaaacattaaaaatatcccaccaaatgtatacaaaatattgtacaccgcccggatccgaacttcccccccccctcaaaatgatgcctcagaatccccaatcacacagggattctgagggctgaacgatgtca

SEQ ID NO: 6177 - DNA, 2643 bp, Heterodera glycines
aagaaaaatcaattaataaaattaatttttttttttatttattcggataactcaactttaattctttgaagccttccaaaaatattaattaaatttaaaattccgcattaattacttaaatttccaatttttgtaggtcggctcttgtcgacagtgacgaattcccattcgcattgaaatatttacatttatgttaaaaataaaataaaaatacccattttgatataaaaatgcatttctggcaatctttcagatttaaatcatattttggataattttgtgaatagtctatgccagggtttttgcgaatcgaaacataaaatacgaaaaagacgaaacaaaaataaatacccaaagctgaaatgcgaaatgcgaacacgaaacgcactaaaaacaacgaaaatgcgaaacgcaaaacacgaaataatcaacgtccctggtatatgcccctggcattttatttatgaaattatgcatttaaattaatattttagtgttctcagcaatactctcgaatgaatgggagtttaaaatttaaactagggttgggcccccgaccgtcggggttggaaaactcggggttcggggtcgtcggggttggaagcgtcggggttcgggtcggggtcgaccaaatcgttcggggtcggtgttcggggtttttcaatttttttcttccattttttaaaatttatacaagcaaatgattcaaaattaaattcttaatcatcaataatcaattcattttcataataaatgagatcggtaggatcaggttaaattggaggtgccagctttatatcatccatatttgccttaactactaacatctgtcgcactgtttttccggaaagtctaagatataattatttttaatttgttttacgatcaaataaaccaattcacctgtttctcaaactatttgcataaattagtccagccttgctaaaaagtctctcgctgcacacggaggttgctggaattgaatgcacaatttgagcaatttttgccaactcaggaaagcgaggtccgttttccctccaccacataaatatgtccgcatcaattccaaatcgttaaacatctttgtaaagcgctaattgagcttcgattttggtgccaacggcggggacaggttctccagaaagtgtcgatggtgtaatttatgaacagcaaggagattttgggttactgttccaaatgtccactaaaatttttattacaaattaaagttttatattcaattaatggtttacattttaacgcactctcgtcgctttcactaaaatccgtaaattgagccaattctgattgatccaaaattctgtttaaaattgtttaaattactttcctttgcaaaatcaattaaatcctcttcaattgatttccagaaaccacccataaataaattcagatcatatgcaaaatgggggtccaacaacattgaaattcgcaataattcattttctctgtaattgtgcattcgtgagccaatagattcagcgagactctgcgcaattaacctaatttgttgtggatgttcttctttggttaaaaaatcaaaaagcctttttagagttggcaaaatgcaagaacaagttgacttttgacgtgaaaacttaaaatgagaaatataaataaattgttattactctttccgtttctctgttaaacagctccaacaaaggacaaagttggcgcagaaatataaaatcaatctgaattagcggcggtaaatgatcagagacaaaatcgagcagtgaacgctttgcttatgaaccaaggaaatgaaattcagtgcgttctgcttccattgaaagtaacggtttttctggcgacgaaaaacatcgagcatttgatacacggaattccatcttgttataactgactgttaaaattgtaaaaaaaaaattataacctggaccagttttattttctcaacattttatttttcttggtggcgtttcaaacatcaaatcccttccttgtcaggcaaaattttacccattcgtgtactttgtccgtaagttccttgatttggcccaatttcagtacatcatgaaccacaagatgtaaaaaatgaaccacacattgatgacttaaattttgaatcattttcgttttataaaatgttttaccttgattttcctaagaccctagccattcgctgcatgttttttgcgtcatcacggacaatggaaattaatttcacaatttttaatccgttttcatcaagtgcattataaattgagtctgcaatgtcgttgcctgaatgtgattcgataggaatggcgtccaaaacaaaatcgtttcgattgaattcattgttagtatgatggacagcaatgctataagtagtcaattaaatacgaaataacgagaacttaaaaccttcataatgaaggagttgaagtcggtttgccattttcggtagaacaatttgtcggaaatgtttcctttgatggagctacattgataacaacctatttttatgtaaaatgccatttcttcaatctttcggttttgaaaatatttggataatctgtgaacagtatatgtatgctctttggcgtttttatttattaaattatgttttaaaattaatattttcttttttttaaattaaaaattatgcattaaaattaa

SEQ ID NO: 6178 - DNA, 2134 bp, Heterodera glycines
ttttgagtaattgaaatttcaaaattaaacatttaacttttgtttgttggtcaattcataaaatgttttcaaaatataatcatcatcattatgattttttcatattttgtgttcttccctgcagcttctgagaatcaccttattcagcaaattatcttgtgattatttttgaattttggttgtcgtagaaaaatgacggaaatcatttgaaaatggcaaaattaaatttgcattagcataaccttttgcatcattcatagtcaatttttggggaataaaatcggatatttaaagcggagaatttatttttttaccattcacttttaaaaattgtttattaattttatatttattagtataaaattttctccatttgatttgagctttcgagaactttatacttcctcttttagcaatttcagtttttttaaaaacgaaaaaaacacacacagcgagaatcgacctaaaaattttccaaaaatacaccaacttaaaaatggaaatttttaatttgtatccctcgtcatttaatttttcttcaataaagttttattttttaaaattcttattcgtttataagaataaaatcgttaataagaattttaattaatatcattgggcttattttatctattttataatatttagtaactgttttgccactttcttacgttttttacctaaaaagcatagcttaataataagacaaataaatctgccaataataataataataataaataataataaaatttctaataaaattgattaatttcaacaattatttccgtaaacaaaaatttgtacatttttattaatatatccgtctgtatcttttagcataataataattattattcatttttctaaaataaaatggcattattcttcgcttcttcaattttatttctcggatttttttggctttttgccaacatttcgcttttttgttctgcgccaaatccaataacaaatttggctataaaccaaggtttggcatagcggtttcattgctaaaattaaaaagtcatttttaaaaaggtccaacattttttggaaaatcgccaaaattttcggttcaaatgaaatcggaagaacaaaaaagccattccaatatgatcaaaaatgtgatgaatcgtcgtcatggctcagcacattcaccaatggaaattggtaaaagaaaataaaataaatatatttattaataaacaaattctagcaattgaaaagccgataaaagcaatagaaaagaatattattagaccaaaaattgaaataaatttggaaaatgaattggatggacaaagcgccacaaactcaaacatttcgccaaatttcaaatgccctatcaacgaatatttggccgctgttgtggcttatcacggcttttactacaaagtgcccgcgaaaacaatcgcaaaaattgcaatgaatttgatttttgctgttctgttctcccaaaattggtccaccaaacagcaacagaattctgatcagccaatttttgatggcattttgatatttgaccatttttcggtgatccgtcaaaatgaatttgaatttggcgccgaagaattggcgggaaatttgaaaattgaatttaacggaacggtggaaaaagtcaaagactcacgggaaagaacacttccatcagaacagagatcgaaaaagcagatgatttggctgaaagatgtgctgtttatgagtccagagcaaataaaagtttgtcattaattgcttaattacccatttaattacccaattaaataaataaaattaaataattcaggataaaagaagcacaacaaccggcaaagacttggtgtggttcgttggtttgctgctctaccgaatgttgttcaacaacaaacaccccatggacaattgggagccaaagcgccgtttggacatggaattcatggccaagatgggcttctccaagttgaaccagttcaattgcatgtacaaaacggacgattttgtgacgggagactttggcatcgttccattgaagccgaaaagtcggtggatttggatgccggagagtgagcgagatgaaactggggaaatggcactggtggaggaacggattggcatggaacaggtggctgccaattaaaatgtctaaatggtg

SEQ ID NO: 6179 - DNA, 1525 bp, Heterodera glycines
  unsure (1)..(1525): unsure at all n locations
tgcagaccaatcaaaaaatgcattcaanttattcaagatttgctggtgatgaagagtatacngcgcctcagaaaaaactgtttgatctgaccaaagtaattataattaattaattattcaacaaaattatttaattttaatttgttttgctttaattaattgatattgcatttatttttatttaaaattaatattttagatgtgccttcatacatttcctgagcatcgaatctcgcctaatttccttgagcaaatccttgttttgatttcaaactggcagatgtattgtgattaattgtcgaaagcattgcttcgttctaattagccaaaatgatttgataattcatattattgttgtaccggattgtttttaaataaaaatattttaattagaatgactctttcaaaaagattatttcccaaaaatgttgtttaaattaggatttgaacgctatcgcacaataattactttgattttttaccgttttcaacgatgttcatgtttttattataataaatctgagttttcaaatagtgttgattaatctcgtaaaatccgctaccatctgccataacttatataaaatttgataactttatttgaatttttgcttagaatgactctttcaaaaagttatttcccacaaaatattataaaatatacaaattaatcttttgaatatatttaaatttgataattttatttgaatttttgcaggctatcagagaaaattctgggatatcgaacaataacaagaatatgaaattttgttacttttcaacaaaattaggccatatttactgaaaaaatagctaataatatcgaagttcatgtttagttaatggtattttgggtccctgttttttagaaaatgatcaatttttgaatttttacgaaataattcaaaaaatatcgaactatagggaacagcctgtcaacactaatattaggttctgctgtttaatattagaaaaataaattaaatataatgggaccatcgcacggctgccaattaaaattaatcggaatcattttcaagttttacaaatattattaatttttgaaatattttttacttgtttcaaaaaaaatgactacatcaatttcgctagtaataattcgaaatttaaaaatccaaaaataaataaacaaataaatgttaaattaaattaaatcagctactatctgcttgtcaatgtattctgattccaaattgacaaaatcacgttgattggcctcatctattgcttgggataaattgtttctggcgaaatgtttttgaattttttgttccgccaaattcaaattggcaccgcctctccgtccaccgcccaaaccaatgaatttgtaactgttcacaatcacttcgtccaactcctgcttcaatttgttgtcattctgctgtaaatgccctccgacattgtgttgttggctttgaatttggatgtcattcatctttttgacaccgacaagccaagttttgcagaaaatttttgatgaactaaatgggaaaatgcaaaatat

SEQ ID NO: 6180 - DNA, 921 bp, Heterodera glycines
acagccacagccgctgcaacaaccccttcctgcttctgccgtcgaagaagaaatgcccactattcctccgcctaggcgggggaccaaacgccactaccccgtaaatggtgagaatgatgatcaggtgcgcataagaaaacgcgtgaggcaagcgagaagtgtgagagtacagtactcgcccaaaccgggcccatcaacatctgcagtagataatattcccaatcaaattatcgattgattttttcgatcgataatttgatcgccgattttttttctctgcccccccccccttcccaagcccaaacctatgggatggtgtcgagagagaaaataatgactgagggagtgagagagggagaatagtgagagagagaaaaaaaaacagtgaaggagagaagtgcagaaagagagagaaaaatagtgattgagagagaaaataaacgcgggagagagaaagagagagaagaaatagtgatagagtgagagtaagaaattgcgagggagagagagtgtgagagagaaaagaaatggcgagaaagagagagagagaacagaaatggcgagggagagagagagagagagagagaggataaatggctagagatagagaataaatggcgtggggtaaagagtgtgatatagagaggagaaatggtgagagagaggagagggagaaaaagtgagagggaagatgagaaaaaatataaaaataaatggaattaaagttagagaaatagagaaaaaagtagccattaaaattattagatatatagtattcttttttgctcaataaaaaattaaaaaattatgattaattgtagcatcaaaatatttatgtattataattttgttttttgttttttttaaatcttatttatgtcaatttatttatttatttttcacgttatatacatattaacc

SEQ ID NO: 6181 - DNA, 5254 bp, Heterodera glycines
cgctaattgtgaacagggtgagaattcctttgcatatttctgcttattcattaattagttaattaattactcaatttccccaaaaagttctcttcgccgcttccgtcctctccgttttgtgctctcttctcgcactttcaatcgtttgtccttcctccctttgcccggcaatttggtccattctctcccccgccgtccgttgtccctccgtcgtggagaggacgaaaatattcaatttgccgatggattgaatgtgttggcattggactttcattcgtcgaatttggaaaatggaaaaggcgaagaaaacacttttgtacattgaatttgatgatttgttgctgatgatagcattagaggtgaaaacagcgaaatgtctgataataaacaaaatgaaaatgttattaattaatgcaaatggcacttttgtcgaaaaatgccaaattctgttaattgaccatttaaataataaaaggcctccgcttcagatgaatgtcaattctatgcgcttcgttctccaccggcacaccaacaacactcagccgacgccgtttccgctcagtttccaattgatcgttaacagttcgacgccgttggaaccgattggccatgcgagtgtcgccaggcggaacaatggtaaagcaatggatggaaggcagcgaaaagtggcactttatagccaccaattaaaatttttttttctttaagtctggcattcccttaaatgttttttatcccctcgctttttgacaaaaagtttaatagtgcagtcaaattcgacttgtttttaccgttacccacaaaatacccccccccccccccttccgccgccgccaaaggacaaagatcgaaaaagctttcaagcgctgactgtttttcccatcgcaaataatttaatgcctcggacttttccgatcgtaatcaaaaaactaaaaaatattatgatatattttttcgcaattaatttaatccccgttgggcttttccgagcgtaatcagaagcaaaaaaatattctaatacattttttatttgtgctgttaatttaaattgttttattcgtgattataattattttgttttttaatatgctgattttgattggactcattgtcattgcgttcttttgtttttgttttttgtctgctctgatggtcacacgtggtacaaaaaaaatttattattattattatctataatgatgatgatgatgattccttatttaagttcgctcgcactctgcctcggcatatgagcgctttcgccgtgtttcgcaaactgccaatcgtgcacatgcaattgacattgaagagcaccacacaagtgtcggattgaacccggtgcgtggacgttttccaattgacgacgaaatgctgttgtcaatgtttcgccgcttggtgagtttaacttaattcttatttaaggtttatgtttttttttgacaaaacaaatcatttttaaatcgtatttagtaacagtaaattataatttgaggcttttttcgaatttatttgttacgaaaatttggccactgatttttagacaataaatttaattgaatagaaaactaaacaaaaaaaattttaaaattgatgtttgcttattcattcctgttcacattttttcagaacaatctcacgcgcacggttgaatgtataaaaattggcctccagtccattctcatcactcagcgtttgaatagctgggatttggatcactgcagcgaaggaattttcgtgtatgatggtttactggcggaacatttggcgaaaaatgactgtaataataataaaacaaaataaatatttattattttttaaaaaaggttttgtgtcggtccgttgtctgttacctgccaactgtgcctttggcttgttttacttcgaagttaccattctgcgcatggaatcgtgaattaaaaaaaaatgttttgaaaaattttgatcatattaagtgatgttggagtgggactggcacccgagcatatgttgatgcatgaattggtcgggcattttgagtccagcattgcgctgtgggctgatgggtctatccactgtaatttgccgcacgtgccggatatgatggatggattcgcgcaatttggtacaggggacgtggtcggatgtggcattgacgcatccaacaggggtgtttacttcacattgaatggacgcaaaatttgtaagttaatgaattgagtaaaaacaatttcgagttgcctcattcttaagcatgcggatttatgcaagccaattcattgcctatgtacgcgtgttgtactctggtcgacatgaacgattctgtgcgtgcaaatttcgggcccgactttctgttcaacctggtcgagatgttgcctttctgaggggtgtactgtcatttgccagtggatgatcgatcgattggttgggaattgtgatgttgaaagtttttcaacactgttaaccaaataaactataataataataattcaattgaattggattgaattgaatccgttgccctaaaataaagtaaatacttgctttcattccatgtcttccattggattcttttgttgcttaagctccttttgctccatggaacaaataatccccccccctcctttcccctccgatctatccatccatactccgttcctggcaatcttggtctcaaaccttttcttaaatactgtaatgcattaaaatttatatgatgatgatgatggggggggggattttatttaattttctgattgttgtttgttaagtttttattatgttacaacgattagcgattctattttttcgtttaaagactgcaactatttttgcgtaataaaaggcagggataactattgctaagtcactatatttgcacattaaaaaaatcacattttagcttttctttttttctgcacaaagcactcagtgtcgaatgcgagggcaagttgtcacagcaatgtttcctgtttaaaaatatatttagaacctcactgaaattagagcaccgtttgcatttaatggacaaacaaattttgttattttttcgttttaagaataaatgtacatttcttacccggtttcagcctgcgtggtatgatggtttgacatttccgttgccggtacaccaccaaccatacctgccttttccaccaccaccacgaccaccaccaccattgctgttaccgtcgcaagtgccacaaatgccatttcttcttaacccattcatcaatccaatgtcaatgccgtcccaattctcgcctcttccattgctgaatcaatttgcgcatccgcttacagggccatttccacatcgggttttgctcaaacatcgtttcctgctgctttttcccttccgcaagggatatcactcacccatcgacaacactttgagcgcattgctacagatgtccatagccatggcgtcaccccccaacaacaacaaattataccaatgatcaatgagggaacgggtcaaaatgcgggtgttcgatcatttctggagcaattttatcaggatggcactacaacaaatgattttttggtcttcgattggcaaattggatcttacatcacgtaaaccctttcattactgtctgagtaaaaagaatttttttttagtggactaacccttaagctgcttgaatttaattttgcggaaagaattccttttcgcaatggcacatccgcgcacggcataaaccttttgttggaaaatgagcaacatttgcgtgttcatatttgtgctagagaggccagggctacccttttatcaaacactctcttggttggaggcacttaccggttcatgcatttgaatgtgagaccgaagcgcgattttggacaatctgtgaactacactttatctttcgcatttggaagttcagttcacttgattcgggttatcctgttttatttatttgtcattttgaatttgatgagtttaagggaccgacagtagcatttaatccattaactcttcgaagtccgagcgaccgggttcctcaatttgtttgtccaaaaactaaataaaattaaatagtcgatggtcaaaaaaattccctaccccctcaacatcagcagcacagtggaacgatttcgcacaatgatcgtccatataatcaggaaccaatgcaaggtagatacacaatgccgccacttcgagctgagcaacatccgccaccactggcgccacaaacaaacaatgtacagcagcaacaaccaactgtaccgagtccgctgaacgagcgccaacagagtgtacaaccaacgcagggtgaacatccacaaatccgggcaaacgccaccttgcaaccaaacgtggttcaagcgcagcagcagcagcagcagcaaagtcatcagtttttggcacttgaccacgacaatgacgatcagcttttgaaccaaatttttttggtagtaaaaatgtaaaaaaaaaatagacatatcaattacaggatctcaccactacagctgaaatggaacctatcgctttggacaacagcaacaacaacaacaacaacaatatggttgttaacgatttttggttttgtctatttgtttaatattgcattttgtttagaacccacaaatttcttcatctcggcgccgaaacaatgccaatgccaatgccggacgtggccgaggaagaggaggaggaaccagacgcagagcggtgagacgcatgaatgaatgaagattaaaaaaaaaaacattttgtgaattattattatttgtttatttttaaataaagaatgctcgtcaacagccccaaagcgaacgaattcagtcgtcccaaccccaaacggtccaaatactttctccatcagtggttcaacatggccaaggtttaacacgtgaacaatgcgatagtatacttcccaatctggaagtgaacgaggcaatggtccgaaatgatgagcgatgtgttatttgccaaatgggatttgacttggggtcattgaatgctaccgaactcccatgtaaacatctttatcatttgtcatgcgctagagattggcttatgcaccaaaatcgttgtgccatttgtatgcgccgttttgtgcttgactctgatgcttaaatcaatttgtcttatgcaaaaataataataattacataaaggagtgcacatatttatttaaaaaattcatgtcaaaaatattaataattcaatgagaaatcattatttgatgagacttttttgcaaaatagttttgtgttatatatgaaaaataagatgagagcgaatgggagcgccgtagcatagtggtta

SEQ ID NO: 6182 - DNA, 5936 bp, Heterodera glycines
  unsure (1)..(5936): unsure at all n locations
aaccgcancatttgaaaacaaaaaggaacagatcaaagggcaaagggaggcgagggaatttggcaaaatgatcaaaagaaagctaaaaggagcagagaaagttgaaaaaaagcatttgcaaatgcaaaaggaaaggttaaaacacatgggaagagaaaagaaatgggggactgagaagaatggtattctctgtctgaggtcataataaatgttattttccaaaaagggagtgccatttgagtgcattccgagtgcggcaagggcaaaacgagtgcaacggtaggggggggggggggggtatagaggaggcggaataaacgcataatgggttgagataccagcagagatttattcttggttctcgagtcaataaatttctctgggcttttctgtcaaggtcattaaagttttttgaagaaaaattgatacaattcttgagtcgagaaattctcaaattttttgggtacaattctctctcgttctcttgcaatcaattcttggtctccgttttctcgagtctctcggaaatttcaacactcccggcagccccagcaaacgaggggtttatccccgtgatccgttcgtggatggattggcggggatggcccctaaatcgggggcggggacaaaatgccatatcattactgtaattttttgtcataggccgagttccaagcacattgtcaagcggacgtgcacaagttcaaacaggacaacagcagcagcggtgccaagaatgccgcctcggcacggggcacggaggttggcgcaactgagtgaacgcgaatgcgcgccaaatttggattggcaacaaacggacaaatttatacaacgaaagcctactgtagctgatcgatgatctccggcgagttaaagcatgcttcttcttcttcacagcacaaacacacctactctcctctctgtacacacttaccacatttgtaatagtttctggaaaagctttaaattaccgcgtcgcaaaaaacaccacatttttggcattctccccccccccactttttttggcataatgtcacacacaataattttgattttttttttcattttttttgtgttttcatctatttggtcagcaataggctttctctgttctctctctttttgctatgtttgcgccccattgattttttttgatcgctttttcattgttttacacatcgccaaatttactcatatatttaaaacacattcgcgtgcagtattatttttgattaccatttatcacatttaaataaaaaaacaaaagttttaattgtttttttgctatttttcgagggctctctgatcattggcttttgatcaatatggtcatgcctcaactgatcgctcggttctttttggttctatcgatagatcagaagtggatcagttggtcatcgtttgatttcaattttcaaggacctgatcagagatgactggtacattcaaacgatctaagcttataggaactgatcaataatatagatcaaaggttggctgccagatcggaggactttgctgatgaattggttaacggatattagctcaatgatcatttatgactctgatcactccggtccgtgccttaaaatctcctagacattgtttttgagagaaatcaactccataatttgtttaattgatgacttctgctgctgccgctgctgcccaatttccataatcgttcaccataatatattttgtaataattattttatcactgatcagttaatcgtcgattgatcgttgatccgcttaaatttactcattattccccctccccgtccccgctttgttccccccgtgagtccaaaaatgatctttgaaaaatgattttaaaatgtgccaaccctttcaaattgaggagcacataatgccaacacaaattttgctgctttcccttcctttttactgtcattccaaatatacgattaccgtaagaatttgtctgttattttcatatagtatacgatcaccatacatttttttaaagattttttggtgatcattttcccacacattttctgtatggcaataaataaaaaaacaagttcatttattccattattaattaattaattaaattaaagataggaaacaatgtataattagaaatgtaattatcgtatattaattattagagtagaagtataccgtagtttggccaatgtaataacatagaacatttgtactgtacaaagaaagagaggacaattcagaaaaaaaatgatgaatgaattctgtacaatttgaatttgaacaattgaataagctaatgaattaattaattgattagtcataataatccgatcagaaatctgatcaaaaaggaggctggatcacttgatcatgaactgatcaatgagacaagaaaattgaaaaaattaaacagacagaaaatgatcaatgatcaactcaaatcagtggatgatcaaagaaagccgagaaaattttgatctctgatcagtgaaatccattaaaaaaacgatcactaaggcagtgatcagaaaataccatgaaccatacaaaaaatcacttattaatacatagaagaggaaaagaaagccctgctgaaaacaacaaaacaacaacaacaacaacaacgagttttgtgtgctgtgtgctaatgccatccatctcattttggcggattttgttgctgattgtgagcagcttgttgctgttgttgttgttgttgcagcagtggtggaggcgtcggttgtgtagcagcgatttgttgcagttgcaccagttgttgctgctgctgctgctcggtgaagccgatgccgccaaatgagtgttgccggaacagtccgttggcggtagcggcgccggcggcagcgactgccatcgcggcaagccgttgttgttgctgttgctgctggtgttgttgttgctggtgttggagcagttgctgaacggaagacagtgcgttgctcagtgcgaccgccgcaaccgtcgctgacgcgttcgcggcgactgaggagggcgactgttgaggcggttgctgcgactgcaaaaggttggcaaccgcggcggctgcgggaggcggcggtcgaaatgcgctcggctgctgatagtcagggacgctgaacagatttggagtggaccgcctcatatgtgccggcaattgggctgaaatatttggaggggaattagttactactgatcagtcgggtgatcggaaaattggcagtgatcgaaaaagttgatcgaaaaatattggttccaatacgatatacaatgaatgtgatcagggaatttgatcaagaccacgcgatatacaaattgatgtgttcagggggaattttgatcagccacagcagctttcagaaaattgatcagaaaaattttttaccgtgtagcgtggacagcaccatttgctggttcagtaagccctccagggatggcatgcgtgccgccgccgccgcttcttgtactgcttgatgctgctgctggttctgttgctgtgccgcggcggacaacagcttggcagccgcaaccatgtgctccatgtgctgctgctgtctctgttgttgttgctccattgccgccgttttgtggttgttgctgttgccgggctctgccggtgccgggtcaggcggcgccggaggttgtggttgcgcgacgacgcgagtcgcttggggctcgtcccatggcacagtcgccgacgacgccgatgacagcgacccgccagcgagtgcagttgttgtcccagtgtcactgagcgactgttgagctgtggccgtagtgccacaactaccgctagtgctggtactgctcgcagttgcggcgttgacagcggcaccaggcgacgacgatgacgacgagttcagcgacagtttgctgatcggcggaatttcggcatattccattgttggcgtgccggcgaacaaaaatggcaccggcgagccgtccagcaacaaatgggtgcgcatgtgccgggtgatcatgtcgcgacgactctgtgttgaaaacagtgcaaattaggcacggcgatagttacttaacgatactaattgcgtcaattaaatctaattgggggcaaaaggactccttttcctaacattttaaatagaaaagaatttagtaaattttaaagaaattcaaaaaaatttaaggatttaaatccatgtagatcttaaaaccttaactaacaagtttgaaaacaatttaaaatcactcagccgttcccttgtaaaaaaaaaatatttaaaaatttaaatttttcaagaagtagagaaaatcaactcgttttaaagagattaattttaaaaaatcaaaaaatttttaaaaccaaaatttttttaataatttaaaaaacctagaaattttgaagaaaaaaattctaatttttcatttcgaatttttttttgttgaagaacatcaaaatttgcaattcttagaattttactatcgtgggggaacaacaattaatgaatttgaaagcatttggccaaatttgtgggccaaccagggctgcacgcaattacggattacggattgcggattacggaaattacgggttttgggagttacggattacgggttacggatttttgggatttttccgtaattttgatccgtaatttgatttttggattattttttcgagacgatttcttgtaagattatttttataaaacaaatttttctattttttatttaaagaaaatatgttcatttctttaaattcttatttctttagcaatttaaaatgtcaaacttaaatcctggtaattggtggtattattttgagcgtcaaggcaaatcaactgctaaatgtaaagccgatggatgttcctactcaaagacattaaatgcttctctcagtacaacagtgcttgcttctcatctcaaaaatcaccacccacaactttacaaacagcgtgaagattttgttcaagcagagaagcaaaaaacagaaaagaagggacaaagtggaataaacccattaaaaagggcttttgtcggtttacgtgaggacaaggacaatcgttattcaaatataaagaaaacaattgcgaatgccatcgaattgcggcttaaacaagccgaagaacaaaaaaacctagttcttgcaactattttggacccacgttttaagaccatttaccttgacagcagtcggctgaatcagtacaaagactggttgataagtgaagttgagagttaccatgcaaagactgatgtgattttattttttctatttttgtaacttaatttttttaggaaattgatttacaaattgacgtaagagactgcagtggttcaagttcggctggggatattttttctcgttttgaaaaggacgcagaatttgagcaaataatgaatactgtaaataaattttatatacccctcataataattaatttaaggcaacatcccccagtccatctgccttggagacaagacaaaaagccgaagttgaagtaaatgaatatttgcgggatccaaaaatcaaatccagggccgatccatcattatactgggaagtcaattcacaaaaatggccaatgattggtgacgttgtacggaaatttctttctccacctgcaacaagttcagaaagtgagaggcttttctcaacggccggtctaatttcagatgacttgcgaaagagtttattaccagaaaatcttgcaaaacttttgtttcttcatcacaatttgcttttaaccggtttctcaattgaatgattttgttttataaatttgctttttaatatgcttttaaattgctttaaaagatttataggattttttaaaataaaatttaaaattattaaaaaaaatttttttttaattgcggattgcggattaaggaaattacggaaattgcggggtttttggacacccgtaattgcggattgcggatttccgcaactgagaaaatcgccgcaattgcggattgcggatttccgtaattgtaaa

SEQ ID NO: 6183 - DNA, 4576 bp, Heterodera glycines
  unsure (1)..(4576): unsure at all n locations
tttcggccgacgacgtttntggggtgcaccgcattgcgacgcccgtcgacgactttaaattgttttgttttcaaattgtgcggcttttccgctgtttttgttgtgtgattgttcaacaacattcgccactcaattttttttgttgtttgatttattcaacaacaaattttcgtcaaattcaactcctgttttttgttgtgtgattttaatcaacaacttttcttcaatttcgacaaatggctttgaccatcgagcaacatttgcaggaaatttcgcagcaaaatcaaaacccgtcactttcaggcattgacgtatttgaattgggcgacgaaaccaccaacatcgaagattggctgcaacaattctgctttgcgttggattgttcggcgcccaatctgaaagatgagcaaaaagtcaagctactgatgacgaaattgagcaaagcggcattcagcgagtacaagaagtcgtgcttgccgaaagatgtgaccgactccaattttgccaaaacggagcagcaactcaaggcattgttcgccaaaccacagtcggtgtagatcgacaggtatgagtgccttcgggcttccaagagcgaggatgagaacttcctctcttttgtcaaccggcacaagcgcctcctaagggattttgagttcaagaaactcaacgaagagcaattctattgcttaagttaacagctttaaaatctccaaaggatggcgaacttcgaaagagaattttgggcaaattggcggcagatggcgatagggcaaaatacgataaggtcgcggaggacctgcaaatgtatttgtccacaattgctgaagctaaatgcatcgaacagccagccccatcaaagcaaattttggctgtcaagcaaaattttgttccaaaaacaaaaggctttgaagcacgtggtcaatttcaacagcagcttaaggtgtgctggcgctgtgggcgaggctcacattttccaagtgcatgtccgcatattaaaattgcgtgccgaaagtgcagcaaagtgggacatttggaagcgcagtgcaaccaacaccaaacatggctgataaggcaagggaaaatgcaaagccgtaagcaaggcaacctcaagcttggaggtgtgctgatcaatttggtgaaccaaccgaaacggctgattgaatgccctattaaaatgaatggaaattttgtggaattcgcgctggactcaggtgctgaggttgtagtggtcaatgaagagacacatgaagcgatcggaaaaccgaagctgagtccatgcaatgttgaagcgaaataccacgacggaacaaaatgcacccttcttggaaaaggggaagctgagttcgaattcggagggataatccgaaaagggcaattttacgtctccaagagagggtcattgaatttgttcggcatcgaaatgttggatgcttttggcctcatggacgacgtcagaaagaaagtggccatgacattgaatgtgaataatgtcaaaaaggaagagtctgttgttgatgaaacactgagcagactcagggcgaagttccctaatgtcttttcgacaaatttgggccactgtaaaaaggcaaaagcgcgcctttccttaatggctgacgcaaagccagtgtattgcaggccacgtccggttccttacaacaccaagttggttgttgaagctgaattggaccgtcttttggctgcaaatgtcatccgtcctgttgaccacactcggtgggcagcaccaatcgtggtcgtcaaaaaggcagctggttcggcacgtgtatgtgctgatttttcaacgggtcttaacaatgttttgctgtcgaatcagcacccgttgccagtgcctgaggacatttttgcgacactaaacggaggacatgttttctctcagatcgatttccgtgatgcgtatcatcaaatcgaattggaagagggatcaaaagagttgtgtacgatcgcaacgcaccgtggtaattttgagtaccagcggttgccattcggagtgaagtccgctcctggcatttttcaatccattatggattcgatgttagcagattgtccatttgccattgcttatttggatgatgtcattattgtgagccggactcggaaggaacattggactcatttggcagaagttttcaaaagaattgacaattttggctttcggatcaagccagagaagtgttccttcggcaaggaacgaatcaaattcctcggattcatcattgataaggatggccgaaggcccgactcaaccaaaattgaggcaatccgaaggatgcccattccaaccaatgtgtccactctccgatcatttttgggaatggttaaccactaccaacaattcgtaaagaatttgcggttcattcgccaaccgttggacgaccttttgaagcaggacacggtctggaattggtccagcgaatgtcagaaagcctttgatcaggtcattggcacgcttcagtcggaccaactgctcacacattatgacccatcacaagaaataattgtgtccgctgatgcctctgagcatggtatcggagcagttatttcccatcgttatgcggatggaagcatcaaggccatcgcgcatgcatcgcattcgttggctccggcagaaaggaattatgcccaaattgagaaggaaggcttagccttaatttatgccgtgcaaaaattccacaaatacctttatggaaggcattttatcctgcaaacggatcataaacctttgctgtcaattttcggcaacaaaaaaggaattaaatcctgcaccgccaatcgattgcaacgttgggcattgattttgctcgcttatgattttgatattgagtatcaaaacacatcggagttcggacaagcagacgctttgtctcgattgatctcaaaaacgacgattgaagacgacgaagtgatcgtggccaatttgatgaatgtggaaacggaacttttgaatgctgttgtaaagcaatttccgttgaattccgatcaattaattgttgagattggaaaagatgaagtgctaaaaggtcatgaagtaccttcgcactcaatggcccacttcaaagaatatgtctttaaaaatcattccatttcaccgcaggcgagaagccttatcaattgagaatgtatgtattatttatgctgaccgggtggtgatccccgcatcacttcagaaggaagtcttgcagcaattgcaccagggacacccgggaatgaaacgcatgaaaaatctggccaggcaatatgtttattggcctggaatggaccagcaaatcgaagactccgttcgatcttgccaagcttgcgctgaagaagcaaaagcaccagttaaaacttcttcactcttggccaaaagaagacggcccatggaaacgagtgcatatggactatgcagggcctttctttggaaaaatgtatttgatttgtgtagacgcattttccaagtggccagaagtctttgagatgagttccaccggatcagcagcgacgattgacaaaattcgttatctgtgctctcggcatggacttcccgaaacacttgttaccgataatgggacacaattcatttcaaatgaatttaaggaattcacgaggaagaatggaatttcccatctgttttcggcaccgtactgcccgatgtcgaatggacaggcagagcggtttgtcgacactttcaaacggacgtttcgaaagttgaaaaaggagggggtagcgaataggttggatacgtttttgacaacctatcgtaccactcctaatgagtcgctggctggaaacaagagccctgcagaaatgtttatgcagcgcaaaatccgaacgactttggatcttctgcggccgaaacgacgcccaatcatcgaacgtgacgaagcgatggaaaggagtttcaatcgccgtcacggggcacaaccaagagaattcatggtcaatggcaaagtttttgcccgacatcgaatttctcaaccatggaaagccggacgtgtcactcaaaagaaaggagtaatttatgacgtgtcattttccgacggatcgtctggtaggttccatgcgaaccaaatgttggttcgtcacacgccggactatgaggaagaccccttggatatgcttaatgatgcatttgggcttcctctggccccatcggtggtagaagaccctgacggacaggctgaagttcaacttcccatgcgcgccgacacaccggagccactgaacgatcgaccacttgacgaagatgtgccaagaatccccgaaggacggcccaaaagaaacagacgccctcctcagcgcttttcgccgggatgatggacaaaccgattctttttgatgggggaggtgttaggacgggtcatatttaaattgtagttggcattctgtcccctttgccacgtcacattttgaccccactccatttgtccttaaatatcctcccatttctctcccctcgtggttcatcaccattcattcatttatttgtcatttcccaaagcttgggtggccgaacgtttcgtcactgaacctttcgtgggtgggacttttcgtcactgaacctttcgtcactgaaataaaa

SEQ ID NO: 6184 - DNA, 1623 bp, Heterodera glycines
  unsure (1)..(1623): unsure at all n locations
atcggacgtcaactggacgatgaatgaacgaggacatttcgtgaaactgacggatgattcggtggcatgngcattccatttcctctcttccccttccttatattttgtacacgtttgatttcctcattgctcttttccttttcttttgttccttctcaattgtttcttctcaatttccttttttttgtactggaattttcggctgctctttctttaatctacccctcaaaattttgggcaaccaaccctgtacagctcttccaactccgcacttcgtcttttgcaccgtttcttcgctccactctgggacggaatgaactctggttgatttcctccagcccctcaggccaagtctgttcataaattgagcagctggtgcacaggtggttggattgggaaccgaagggcgaaaccgttctcggactggcgcagcatcatcgacaaacttcgaggatcgaggacgatcctatggaaggggggagctgtaagggattggccaccctcaaaaacaatttttattttccctcagcagtcgtactttccactctttattatcacattttctcatctcatttattccgttcatccccgccccttttccgttcgcttcacacttttccttcccccagcgatcagttagtcagtcgtcagtcagtcgagtcgttaagcctattcgatcagtcgttcgtcatggaatatttcaatcatcattttatccggagagaataaattagtcttataacaccgaggctttttggggaatttcaccatcaatcctgggcccgggattccgttccccaaatcgtcctcccatttattcttcgagcggtgtgtcgactgggggacccaacacgcctccctcactttatttttttaaaattttagcaaatattggagaaatattataattcaataattttaacctattattttttatttggcaaaaattaatctgaccgagttttcagtttttttaaataaaagtagcttttttgcagaaatattataactaaaaattcgtccaaacgccgacggaaagaaattatttaattttagcaattaaaatttacctacaaattaaatttaacaactagaaatgctttccatgaagtgcatgagaaaaaataaaaaattctttttaataataaagtatgttaaaaatggcttcatatcatttgagaaaattattaaaaaaaaattatacttactcgcaagagcgaacatagactaaagcaaccaaaaatttgatctcatatgcgagtatttcgtataaagataaaagaattatttatattcaaaattcaattattttcaaattaaaaaattacacaaaactatttcaaaaacaccataaaaataaatttatattattctctataacaatcacaagtaaataattattaaaaataaaaattagaaaaagaaaatattccttaaattattcaacctatttttggcgctaggtcacaaacaaatcagctacattgacactcattacacttcaaacttaaataagggcagaataaatttagctaaataaatgataaaaaataaaaaaatttgaaaaacttaatgaaaaaataggaaaagagaaacaattaagattttttaagtgtaagaata

SEQ ID NO: 6185 - DNA, 2189 bp, Heterodera glycines
taccgtattttctctaattatcaccccgtctccattaatccccccgtctccaattacctatcccccctttcggaggagcttgaaaaataatccccccgtctccatttatctctcggggggataaatagaatttttattttttcgaaattttttttttaatatttaataaaaattaattattctaattgaaactcgttaaatgtttaataaatagagataaaaatatgtgcgaaaaattaggaaaatccactgtatttgtgcctaaaattccagaaaaatttcattctttatcattttcgcccgcacaatagcaatcaaatacatttggaggcgttcgtgggtaaaatgggtggtttttttctaattccattgatcaattgatgagaattcgatttggcatcttttggcattcgaaataaataaaatttatttaaaacattgcaaaaaattgttttagggatgtatttttcaattttctgccatgttaaaaatcgaaaatttttagaatttttgaaaaaattcttttcatctttaagttagaaaaatcaaataaaatgcataaaattctctcgatttctctttgtgcaataaaatgagatttttttgaggcgatgacattttttggcgcctgttaaatttaaaaaatttaccacgaaataaatctgtcgattcttctgtcggaaaataatctcccgtctccatttgccccccccccctttctgaggaggttgaaaataatccccccgtggtgataccccctaactagagaaaatacggtattttagaaataaaaagttttgactataatttgaaaagaatctctttgatttttttattcttgttattttaaaaattacggtgtcccctccattcacgggactcataaaatacctttggacttatataagtcgattggactcataaagtgcaatagagccaaaaattttcccaaaactaatcccagaatttaatataaatatttaactttttacatgtttttgctactagtgttaattttttgtgactatctaatgcctatgatttttttggttaaatttttggaatattatgacagtgacgaagcactacacatgtgttgtttcatatcactatttaatgctttctccataatacagagaattgaatattacaaatcaaatagctttacaaaacagttcctggtttaaaaatgtgagattaaatgtatggcaaaaaaaaagtgaaggaaggccattcgctgtgacagtcatcaatgggggataaagtcaaaaaccatttgctgacgctcgtccaacggtacttcgtcgacgcgcacttcgctgcaattgtacagcttcacccattggtcgaaccggaacaaaagcaactccatttgtggcgaaatatatacttaattcttattcacagaatttaaaatatattttaacaaattaatgctaattcattgaaacagtcgtttgtttttatgtacaaatttttcaattattgtatttttcaagtgtcttttggtacaattagtcttaatttacagtcattcttttgttaatgggaaaacattgggacgagtcacacatttaaaagtcgggacggactacggtaattattgcatgacaatttgttaattgtttcattaactttgttttgcatgaatgactctcattatattatcgttgaaattttttggcaaaaataaaaaacaaaataaaagtaaatgagaagttatttaaaaaaaaactattagagaaaatgcgtttataaaggcgaattttcttttaaatgaatgaacaaaaccttttgtgttcacttcactctaaaatgcttattaaattatttcacactatgggcaagactattaagaaataaaataattatttaacaaaatgcgcgtttatttgacggttattaggggcataagcatcaacgtaatattttacacattcttagttttaatagcattcaattaagtaatcctaaaatagatgtggtaatactttgttagagatgcttatgattaaaaaaagcacctgtcaaaattatttattaaaagaatttcaactgattattggtagataaaaaatgaaaatgattgttcgtaattaattaaaacgattaagaaaaagctgacttgggaggggggggggaggggttaaaggcttaaaacgaggaaggggagtgtgtgagaggggggg

SEQ ID NO: 6186 - DNA, 3058 bp, Heterodera glycines
  unsure (1)..(3058): unsure at all n locations
cggtgccttttgatgnagcgcaattcattaagaaaaaagagaataatattccaaatgaaagcctgggggccaatggcaaagtatttaccaaagccactcactcgcatggcacgtttgccagtcgatgatcgaactcagctgatcacccggctcgccattgtccaaccgattgaaaaacaaattgttgctccaaaggtcgccgtgacaaagcacaggacgaatgcctttggtaaagaaaaattaacccactttttgtgccgacaattggggggggggggaaatgggggtgaatggccaaggaaacgcaaatcccttctcaccatatctttcgtgtacgtccgtcttcaatttgttgtgtttcgaaatgaatgcccgcagcgttttgtggtgccttttgaagaagggcgagtccaaactgagcactctctgtgccaattggtcctccattccgtccattcggccgtattcattcacccgaaaacggagcaacaaattgcgcgggaaagtcaaagtgaacgcgtgcaatttggccaagtggacaatggtcgactcgacctgtgctaacatcgacagttatcggtttggagcaagaagagtgctaattattgcaaatttgttataaattgctttgcctgtccggcggtcaatccctcgtaaaaattgggctgaactcctttaacggacaaatcttccatcagcaaaaagccttgttccaaatgttgattgtttggaatgggacggacagcaaaaggaattggcaatattggcaacaaatggcgcggaaacaatggcacaatctgtgggggaaagggaaattgggcaaaaaaagggggggggaaggagaccaatttgaagaaccgctcctccaaatcgcacatttcgaacagaaaggaacgcatctcaaaaagtgagttttaaaacaattccctcgctgttctcccaaaaagcgcactttttcagtgtcccacccaatttcaacgactttcccttccgcttcttcgtccctccctttccgtgctgcgtcctcaatcggattaagccgttccaatttcactgtggaggccacctgctaatgagacgcaattagaggggagtttaaagaaaggaggacggtgcactttgagaatggcgacaaattggcgcccgtcgataaagcgaaagaccacgcgatggatggaggacattaagccttggccatcgatgggattcgcttccaccgactcaatggcgttactttgcgcttcaatcgtggcaaatttgtcgcattggactctcagagaagcgacgagcgaatggaaaatgtgcgcagtgccggggacgcactgcgaaagatccgtcgtctgaagggtttccgagccgagcagcaaagggaaggacattctctgttgaacggaccgattgggaaagatttgtgtgctttgataagcaaagtgatcattgatcactgatcaaaagtgatcagtcgtcccgggggattttgacttttttattgcaaatgttaacagtgccctgggtatatcaaatgtttttagaaaggcgtatgaacgaattgggcaaaaaaagaacaccaggaaaaacaggactcatcgaagaaaatttttcaaaagcattcattagcgtcaaaagcatcattttataatttattataagagcgaaaaaattttaaaaatattttaattcctaatgatcaaaataaaatttaaaaaaataaattaaaaaaaattaaattagaaaaacaaaaaaaattaaacaggctgagttttatatattttgaacgttttttacagacaacattttatgagagaagcacgaaaatcatattttctctgctcaattttcaatttagagaaactttttagcgtggatttagccaaacttatactttttgcttatggccaaaagtgcagtttctagcaaaattttaagaatttttagcacatataaattagccccattggtcattttaagaattttgctgaaataataatcattttaaaaattttttgatcaaaaaatgacaaattttgactttccctaaaaaccacaaaatgaggctaaagctcacttacacgagctctgagaaaatcagaaaaacattaatgattagggatgataaatgataaattgatttaatattttttgctttataatctaatgactgatagcgaaaaatttaacggaataaaaatttattacgaaagcgaaggaaagggggccgggtaattgtcatttatcattaccaggaaagttgaaatcgattttcaaaaacggaaaagatacatcggaattcggattgggaatttagggaagttcaatttcaatttcaatttaattttcaagaattggtttgtcattttttaaagctaacatttatctttaattgtttccaattgggataactgaaaatcagcaaaaatggataaagtgtcatacttttttttcatttggaggataagcgaaaaaaaggactgcaactgtcatccaattaaaaaaaagcaatgatttgtcagggcagagattaattagctaattttagaaaaaattatttatcgaagaaaatataaaatcaaacgatgaatgataaataaatatttgacaatttaatcaaaggtttgttctaatttctttggaaatgttctttggccccttataatttccaatcactctttttttcgcttaattttccttttttttcttttttgtctttcaccgttccctcttcggcactttccctttttgccgctttttccttttccaatttcctttccctttgcctttcctgccattccttaaattcttcctccgaatcgctcaattcgaaatgtgccgtcctttgctttgtttcgtcttcgctgtccgtgtccgaaaaagcgtccatcgaaacgatgagttttttggcaaaataattcggacgtcggagtaaagcaaatgattcattattttacgccgtctttttgcggtccaccgaatcttcaggcccaaattcgttgctcgcaatcaaatggaaattgatcaccagcaacagaaggaaagtgccaatgccaatggtagaaaattt

SEQ ID NO: 6187 - DNA, 886 bp, Heterodera glycines
taattagcatctgctaattgttctgctgttgtggaggtccccgatgttgatccatcagcattcaaagtgatgctgggctttgtttacgcggacgatttgagcgaattgaacggagacaatgcaatggaagtgctttatgccggtgaatttattattttttaaaaatttaattgaaaattgtgttagccaaaaagtataacatcactggcctgatcggcccacctttacaaattcccatctccgaattgcgcaatgttttcttagcctatgcccaggctctcctcttcgaattagaggtgagaaggtcaaaataaatttaattttattatttttttttttgtatgaattatgccttagattttctgaagatccaataatttttttgtataattttctgtaattaatacatttttaaggattttgtcagcgaatgtttgcggtacatttgtcaaaatgcagccaaattgttcaaatcaactgattttttgcaaattgatcaggaaatgttgtgctatttttttgaacgcgatcagttgttgatcagcaatgaatgtgaactttggaaagctgtaatttcaattaaattttgcattttattttgtttttcatttttgctttaggcacttcgttgggccgacgaaaaatgccgacaaaatggtgttgaatgctcaccggaaaatcttcgtgccgtcctcggcccggcattgttcaaaatacatttgccaaacatccatgaagcggatttttcaaaatacgttggtaaaaatgtttgaaatcggataattgaaatttttaagctcggaattaatttccttttaatgtttgaaattaattcaacttttttaaaaaaataaaattattttttctgcatcgactattttgttgt

SEQ ID NO: 6188 - DNA, 2691 bp, Heterodera glycines
  unsure (1)..(2691): unsure at all n locations
atgtaaatacatgttttttcctggattctccatagtttaattagtagaaaaaaacacttttttttgtgtttgcgaacaaaagttgggactttaatttacatatttttacatatttcgcattttttcgtacatattttcattttttttttttgcatattttgaggatttttgagaatttatagaaatttnttgtgaaaaattaaaaaattttttttttgaaaatgtatcncaaaaaattgaatttttaaatcagatatcaaaaattaattgctaaaatactaaaagttggtttctaagcctatttagttgcctatttcaccctttatgaagaatttttcccccaaaaataaccattaaaaaaattttatttacatatttggtacatattttgggttttttgtacatatttcttacaaattttagcattttttatacatattttatttacatattttgcgatttttcttacataaaaaacaaacactactcatattttatctaagtgcttcaacctaccactaccccaataaccctgaaccccatatcccccattaccctaccccccgcttttcgccgcttggcaaaatttttaaatttatttgtgatttgttaacggttttcaccaaaaattgccaattttatgcaaattttaaaatattttatgagaattgttaatggattttcaacaaaaaattgccaattttgggttaattttgaattttattggaattttggatccggcgatgatacatgaatattttagaaaaatattcaaaaaatatttaaaacataccaatttaagccgaaaatatgtgcaaaattatttttcaatttggcagaataaagaaattcttagaaaaattcataaaatattttaaaaattttttattgaaaactgccatttaatctttgagtatgaaatttaaaaaatttccttattgtttttaaaaaacccataagaattgtcatgaatttaacccgatattccttgaaaattttctaacatttttgttcaaaataaaaaactcagctaaaaactacacaaaaattgtattttttttttggtcaaaaaccgttacaatttcacctgtggattttaaaaacttttcccatctacgcaaaaccaaaaaaatgccaaaatatgtgggaaaatacgtgccaaaattggaaaaatccggtatttttacgcataaaaattccatttggcgtaaaattagaaaatttcaacaggtaacttcgaataaaatgcaaaaatgtgctaaaaattcaaaaattgcccaaattttttgcgatatgttttttgttgttgccaaaaggtcaaaataattcttattatgtttttattagtcgctctaaatcaaaaattgtttggagaaaaaatgctattttctctcgccataacaatccaaaaaaatatgtaaaaacataaaaacctcgggtgatcattcggatgtgcattttttggtgggatacggcgacgcaaaagaggtagagattaatttcaacttaaaaatggacattgagttcaattcgcacccttttttcacaattataaacaaattgcagttacaaaattttgaatccattttttacacgtttggcctctcctttggccgcatctgaaaaattcgaaaataaaacattttgctataattcatctcatgaaatgtcaaaaagcgaaatagttttatgcatcctctaaaaaactgatcatatcgaagcaaatttatagaatggactcttacaataataataagttttgaaagaagaattttgctaatggacattgagttcaattcgcacccttttttcacaattataaacaaattgcagttacaaaattttgaatccattttttacacgtttggcctctcctttggccgcatctgaaacaatggaaaagaccacaattcatgctgatttttcttctcagaaattttaaattttaaacctcagctaaattacccgtcccaaacttgcataattttaattgttttattcgtctaggggcgatttttcagtattatttatctgtggttgttccattttctagatttatagaaaacacattttaaaaagaacataccttttggtagcgaatgcaaatagtgattgataaggagaaactttcagacctaaaccgatttttctggagcttgaaattaactttctattatattgctaattttctctgtaaataccaaaatttcaatggcacctgaaaataaaaagtctgtcttttttaagacaagacatttcaaaatagcaatttctcaaaaataaattcgaaaataaaacattttgctataattcatctcatgaaatgtcaaaaagcgaaatagttttatgcatcctctaaaaactgatcatatcgaagcnaatttatagaatggactcttacaataataataagttttgaaagaagatttttgctaatggacattgagttcaattcgcaccctttttttcccaattataaacaaaattgcaagttacaaaatttttgaatcccattttttacaccctttggcctcttcttttggccgcatctgaaacaaatggaaaagaacacaattcatgcctgatttttcctctcaagaaattttaaatttttaaccctcagctaaatttacccgtccccaaactttgataaatttttaattgttttatttcgtctaaggggcgaatttt

SEQ ID NO: 6189 - DNA, 3949 bp, Heterodera glycines
  unsure (1)..(3949): unsure at all n locations
gtccgtgggatttccgaatgaaactttgtgggtgcatagagcacccatgggttcttaagaaaaatggtttcaatttctgccaaataagtacgagtgccgagttatgacgtgccaaactttttttatcccaataaattgaataatctattgcactgttttgtgctgtttagtggtgcagaggttgtgctctcgcctttactttttccccccacaagttcgaatccctcttaagtaaattaattttttttaattttgcccttgaatacccttttagaaatgtaattattttcatttataatatgcatttatatttttttaatttatttttgaacgaaaatgcatgtaaatcctttaaatgtcattcaactgctccaaaaaaaattctcaaaatacaaagaacaaacaccaattaatgcatttgaatcggatattgcaaaaaactttgccgaagaaattgaaaggtgcaataaaaacgatgaggaaatggagatctcccatgatctggtgattgacgaaaatgcaaattatgtcagaattgaaggccaaaatgatgacttttccgattttgatgaaaatacagatgaagaaaccgatgaagtcgggagtcctttcggttcaggtggtataatatgcttttaaaaatattttaaaatctagaaaaatcgagtgggtcgagtttctttccgtcccccgaaaaaaaaacaccacggaaagacacaatttcatactctgacaagaaaaaggcattgcaattttatcgctcaccaggaaagggatgccgttctttaaattgtatgaaatccaattttcgttttatcaagtcagaatcggatcttaaaatgatacgaaggtgaaatagaaaataaatcttttaaaaaatatattttaaggtttgaaattaatttaaaaagccgagaagaggctttaaaacaaattgatttgtttgtaatcgatcgcttcaaggaaaaattccagaacaatttgagcatatcagatctcattttacgaaaatgggcgattcacacgaacaattcacttggggaaaacaaaataacggaatttaaggcttcgaaaaattggttggccaaattcaaaaaacgccatcggattgtttcccgaaaggtcaaccctattctccggaattaataatttacttttttagatcacaaagttcatttcaaaaagtcattatattaatcttgaaaaggtcaaaaaagaggcggaagaatttgtagagtgtgttaagaattttgtcaaagatgaacaaatctcatcccgtgatcttttgaatgccgatcaaagcgggttcgagttagaacttcatgctaaaagatcgttggcaccagtcgggaccaaattaatcgaatgcgttgtgcaatctgtttccagcacaacgcatagctatacagtaatgccaatgataactgcaagtggctcgcttttatccccgttatttattgtgttagccgagcagaaagggaaatttcctcaaaaaggaatatttcaggttttgagaaattgaaaaaaatattacatttaatttaaggccaaaaatatatatgcggtcccaaatactagtcatataatgacaaaaaagttaatgattgaatggctcactcatgttttatgtccgtctttgcgtgttgatcaaaaaacattgttattggttgacagttggacagggtggaatgattttaaaccaccagagaatgtccaacttaacgttaaacaaattccgaaatcgagaatccgctcaaagcgctgttgacaatgtttctgctgaagtctgaagcggtcgcatcggcatctgctgccaaaaagctcatttcgcaaattctggacacggatgccgattgggaactcgcaacatattgcagtgcccgagaagacgacgtcaaaaacggcacatttccatccgaatcggacgtggaaagcgttttgcgaatttggatcggccactgccaaattgcccgaaaagaagtcaaaaatcggcatttgggccaatttcaattgagctgccccaaggcctatcacttctgcccgaaactgaaagagaaggcatgaggaaatcgctcgaaagtgcgccatttttgctggagaagctccgtgccacggaaatccaaaagaagacactcgtcaccgccgaaagagtgattttaggcgattcaaatgcctaccaattgaagaaactatggccgagatcagcatttgtcggagtgcaagaaggatccacagccgaagtgatcagacaatttgatcaagtggtgctggcctcaaaagtgaagtggctgattgcgatggtcggaaaggactcaattttggctggcgactcggtggacagtgtcatcgaaaaagtgaagagactgcgccaactttgcctccgatttgcgcatgtgaagatcttctggctgttgccgccttttatctacaacaaaaaggccgaatctgaagaattctgtggaagaatgagggcgctgtttcggaagaaaagcgaaattgagctggtagcagtgacagaagaaggaagaagtttgctggagatttggcgtttcgggaagaattttaacaatgaacatgttaatcataacggatggatgacagaaaaggggctgaaaacgctgaatgcctggctcacatcattggttccgaattttccgggcgatcgagagctcgggatcagaaccgtgaagtcgaaagtggtgaaaattggtgccgtgaagggtggtggtccaggagacccttccttaattcgtggcaatgcaccagagagaaatgtgagaggagaaggcccaggtgacccctccccatctcgaacgattggcatttctgacaatggccccacaggttccgcccgaccaatgaccaatcaaaatcgcgggtttgagtttggacgagtcggcacaggttaccgctcggtccctcctccgacgttccgtggcccgtcttcacgtttccatccatatcagcaaagtcgtggtcgtccggcgttccatccgactccgatgaatcgtcgcaatcggttcgagccgcgtcgctgagcagtgatcccagacgagcccccccaccttttgacagccgaatcgaatctcatttttgttttatttttttgtctttccttctttaacggcagggacgccgctcgtaattgggtgggatgtgatatttgacctcgtttttaatttaaataattaatttgtggcattttgtctatttaattttgttccccttctaaatttttttgttttctcagtgttttctcatattatattttggcttcaaaatgatggtaatttattctcatcgctctccgactttcgaatttttattgaattaaatttgttctgttttgtgctgtggactttaatttgtgttggagatacacttttggttttaattgtttgagtgcaattcttttttgttaattttggttgacgacgaacggggacgagaagtgaattcggaggagaagagaagagccagcaaaagccctgcatttgtgttctccctcattttcttcgaatattttcgacgtcaaaatgaaattgtttctccattttgagaaagcatattgttctgctgatgtgtttatcgtagattatgatgacacactaaacactttcttcaaacccgagcatgacttaccaacaataatcggcgaattattagctattcattttgtgaatttttttagaaatctccagttccattcaagaaaaagccctatattcgtgcattgttcaaactaaattcatttcaaaatccgattaaaattctctcaagtacatcgaaaacccatttaatctgtactaacttctttaaagtcgaacctgcggatatattctgataaaattatgatggttaacaaaatctcaagggaaacccaagcgtattcccttnctgacatcatccggaaaataatagctgctcattttctaatatttatagaaac

SEQ ID NO: 6190 - DNA, 1427 bp, Heterodera glycines
  unsure (1)..(1427): unsure at all n locations
ttttgaaaattttcacttgtcaagccttgggtttacgctaataaaatttgttttaagtcgatttttcatgttttattacgcttcctttgcgctactattaattttagaaaaaatcttatttttagggtccgcatcttagtttttgagccattttgtcttattttgaaaaaaaaacttgggagccctgcctaaaaaacaaaaatttcgaaagctttctttcctctggagtgttttgataaagacttgcccgtttctctcgattgttcgagactggcgcttgagaaaaaaggattgattgtgtaattatcattaaaaaaggacgtttaaattcttcgtaataatttattggctgcataaagcactaaaatgagaagaggagcaaagaaaaggtcgcggaaaggccactaacagcagtaaaaaagtctgaaggttgtctgtctgctgagaagacgggggatgacaagtgaaaagggagagaatgggcgagggagggacaaaaaaagtggggaaaagggaagggaagggaagggaagtggcgattgttgaatgagttgggtgggaatggacgacgagagatcactcccaaatgaaatgataacgggcaaatgagtagagtaaattgggcgggaaatgttcaagagtttaaggaaaatatttttgggaaaataatccaaaacaatcgtttgattttaggtatttatttgtcctctttttgctgattgaattgtgcgttcgttcgtttcctttgcccttttttcgttttatttgtgtatttggccccgttccctcttctctctcgcccattgtcggcagtataaaacagaaaaaccaacaagcattggcaaaagagaaaaggaaaagcagcaaaaggaaagggccgccgatggacggacggacgacgcaaaactctcccccgccccctctttctcattctctccgtctatcgcaccaattttatatacgaagcacattgtctatttgacaaaaaattgtcgtaaacaattaggcgcggttaaaaaaacctttgagtttaattgattgaaaattaaattgggttttaatggatggctacaagaaaaattagaacaaaaacaacatttacccaacaattacataacgtactcggcgtattatacacaatacagcaggtgtttaaattttgaaactgaaaaatgaaattttaattttattgcaaatttttgcgacgaaaaagcaaatgtctctccgattcactttcttttgggcgtacgcttcccaacaaagagagagaggagagagcaaattggccacgatccaaaagagttagagaccaacgaaattggaaatttatcaaaataaatccccgaccaattgattttcgactggctnaaggtaagcattgaacaaatattaatatgccaagcaatttgagcgccatccgcgcggac

SEQ ID NO: 6191 - DNA, 4609 bp, Heterodera glycines
ttaaaaggtgcgccttcccttggcttttgctcacttttcactttccgctggtgcgtcacttcgctgtctttcgccctcttctgagaccgtttctttggacacctttcaaatttaggcattgttttatttttcgttttggcatttctctctttttccccttacggtcggcgtccgtcggatcaatcgatggaacgacgagcgaatggaggagccgaggaggaaatacgacgacgaggaagaggaggaggcggaagcggcgttggtcagcgacggcggcgactcgtccgccgccacagacagcccaccgctgagccgcgcgttgctcgcgctgtggtgggacgagcactcggagacggacgaggcggacgacgtgcgcgcgtggggacgcgcggcactactcgcgccgcggcgtttgccatgccttggcaaaggaaaaggggggaaatgccccgattattaatcaactaattaggctattatcagaatgagtctaagtatttaccggttatgtccatttgccacccgcgtctgattattatgggcatctttttgttgctctgcgactgtcgccggtgtcttttttggcgccgggccaatggcagtgaaacgcggagagagtgacgcgcccaaccaccagcccatcgagccttaaaagcagagcaaatcaaatagattagcatcggtttcgtcattcgctgcttcttttacctgccgtactttcggatgcgctgcgcgcactcgccgaaccgcccgaagtcgtcggcctccggcgcgtgcatttcagcgccgcctccgctttgcactgtccgtgcagcgaacatgagcacattttgcaccgcacgccatgccgcatccaaagctgaaagtgcgtgatcaccaaaataagtgccaaaagcgtccacgccgaaatagtgtcctttttggtcagaccaaatgaccgttgggccaaattgtgcccgttaaaaccaaaaccgggattttcgattcaaaatgatgaggcgggaacacaacccgtaatgccggctaatatccctattctaattgaacaaaaatcccgtgactgtacccagagagtaattccggcggatacagttcaaaattcaccaatttgttgcaatgggcacaaacagcgggtgccagaaactgagcgtcagtccattggtgcgcgagtccgttgcggcgcaggccggccaccaaaacgctgctgtccgcctcctcctccgcggcgcccgccggacattttcgtctgttcaaccgttggaaatgcctgcacatttctgcccgactgatcagtcctgatcaaaagaatgatgtgagactgatcagtcatttaattgccgataaattcgcttgccatctctgtccgagtcaatttcgccaaatgcgtcgagaaagggaaaattggaggcgaactgtttgaactcggcacgcgaaatgtagctgaacaacaagcaaattgaaatcccaaaaagagatgcgttctcttttttggcttcctacccgtcccggtcgttgtcgtagtgtttgaacacggcgtcgaccattgcggcgatgtgcctgaataggaaatttttgcattttttggcaggaggtacggcggaaatctataatgaaaattctatcataataaatgataaattttgcaaagtttggccatggcccctcccccatcgtgccgggtctgatcagcagactgatcacacttcggattgattgactgattggtaacatggtcagtcagccaatccctcgctaacaaataagcattgtcccaacaccgacttgtccaccgtgtccgggtccggctgtgcgcatacgcccgccgcccaatcagcgaacaccgccggcggctccgccgcgccgctcggcgccgactgcgcggcagcgacggaagatgccgtcttcggttcacgctccagcgacagttggtacagctcacgctcatcgtacgcgatgtcgaacagcactttgagtgtgttgatcagatccaggttgacgtcgccgaaacagtgggccgtccgacaaacgccgagaaaatgggacaaaagttgcgagagttggaaaaggcctgcggaagtgcggcaccgatgaaacaaattggatggcaatgccctcggaggtaaacaaacatttttcggacattcggcgcgagttttcgaactgttccaacccggcactgtgccaaaatgcgatcaaatccttcagatgaactcccctgtatgttatgggaattcaaaaaaggagaaagtcatgtccctcttttcacattatcggaactttgaagcggccaccgaccgaacgcaaagttttgcggtaagcggcgtaattattggcatgggaaagcaatttggtgagggcggaaaggtcgtcgagaatgtcgggcgggaggagggaatgggtgaggaggaggcgggccacgttcgaatgcgtaatgccaccctcaacaggggaaggatcagcaggagtgatcagaagagaaaacgaatgatcagatggaaaatgggtgagtgatcaactggaaaacgagtgatcagaatggaaaatgggtgagtgatcaaatggaaaacgagtgattagaatgtatgatcgatcgatgggaaaaaagaaaaatgatttaccgaatagaaaaatgaatgagtgatcagaaaacttactgagaatgagtaattaaagtgtatgttcagaatgaaaatgaacgaaaaatccaaaaatggaagaaatgggattaaatgatcaaaaaaactcactattacggccatcaaagtgttaaaattattgttgcgccgaagatgctaaaaaataaacagaattattttgttacctgtcacttggttactgttgtttctgtgtacctacagtatcccacccacccccactccctttaccgtaccctgcccacttgcacaaatttcgtgatgatttcagcgcgttcgcttgccgtcgctttgcttaacacttggcattgcacccaaccggagaaggactaaaggggaaacagtttgaaaacttaaatttttaattatatttaattacattgaaaattccgatcgatcgttccaaaagtggcgtttgttggcaaagtctccccacgcggacgtagcgtttcaactcggaaacctttgccattaattgggagaaaaggccaaaattttgctaatattttgcataaaatactcacgttgactcggctgagcactttgtgatcaatgtgactaaaccaaaaaaaatgctttcaattgttattcgtcttgtatttcgaggattctcgagattctcgacgtcgctaatcggttggaaaatctcttggatttttgtggtcttagtcttggtgccattctcggtctcgtttttggggacgattctcagttttcggcaccaattttcggttctcgagtctcggaaacgttcaattctcgagcagtctcaactttttcacctcatcgaagtcgcaatgtcttcggggctccactgttcaaaacacagcgaaacgtggcgagagaccgggtttcgcacagagacattgcgcagccaagcataggagggactggacggacagaatgccaaacaaaatgccatttaattcatttttcaaaattaagattttgtacatcgccgaaatgtccaaaagttcgtcgaccaatgcccgggaaatcgtttcatcggcggcggccaatttctaaaccattttggctttgttattgttttaccgtttgctcattttgactttcaatcggtccaacagtcggcccaattgggcgttggcgtcgaaatgtgccgggtgccgacggatccaaaagccgacggccgaacaaaccttttggccatatccgagcggatcattctgcaaaaacatcatttttaattattaatattttttccattttcaattgcctggtaaagcgaaacgaaaatggccattaattcggccaattcggggcaaagccattcggaggccgagaaaaaccagcagggaaagtcgggatcgggctcagccgggtcgccctctgaaaagaattgaatttttaaatgcaaattaaattattattattattattattattatgggaggacaccgaaacaatcgcaacatcgacggatcaattcgaacaaatccatcggttcggttgcgtaattcgagcagcacggggaatcggccatttttagttaaatgggcctcaaaaattgaacatttttatcatttcacatggaaaaatgtgaggcatttgtataaaagtggggggggggggaagagaaaagagaagagaaacaaaaaaaggaagagagattatcttttgaatatggcgacgaccaaaaaacaagttacaacaaaaaaaatatgagaaaaaaggaggacgaaacggggacaaaagcagaaggaaaaggaagggggggggaagaatcggagaatgggacggggaatgatcagaaaaggatcgggggattgggatcagagggtaattaggaaggggatatgtagtggagaacgagacagaaactgatcggaaaggagtaaaaagagagagtgaaagaaccggggaaacgggggaggggtgaagaagaccctaattaggactaattaggagaggaaagaaagacagagggccagggg

SEQ ID NO: 6192 - DNA, 1444 bp, Heterodera glycines
gcataggagggactgggcggacagaatgacatagcaaaatatcatttaattcatttttcaaaattaagatttggtacattcacgaaatgtgtcaaaagttagtcgcacaatgctcgggaaatagtttcatgggcggcgggcaatttatattccattttgtctttgttatggttttaccgtttgttcattttgagtttcaatcggtccaacagtcggggcaattgggcgttggagttgaaatgctccgggtgcagtcggatccaaaagacgatggtcgaacaatccttttgttcatattcgagcggatcattctgcaaaaacatcatttttaattattaatatttttttcattttcaattgcgtggtaaagataaacgaaaatgaccattaattcggccaattcggggcaaagtcattaggaggctgagaaataccagcagggaaagttgggattgggctcagccgggtcgccctccgaaatgaattgaatttttaaatgcaaatttaattattattattattatgggaggacaccgaaacaatggcaacatcgacggatcaattcgaacaaatccatcggttcggttgcgtaattcgagcagcacggggaatcggccatttttagtttaatgggcctcaaaaattgaacatttttatcatttcacatggaaaaatgtgaggcatttgtataaaagtgggggggggggaagagaaaagagaagagaaacaaaaaaaaggaagagagattatcttttgaatatggcgacgaccaaaaaacaagttacaacaaaaaaaatatgagaaaaaagggaaaaaaggaggacgaaacggggacaaaagcagaaggaaaaggaagggggggggggaagaatcggagaatgggacggggaatgatcagaaaaggatcgggggattgggatcagagggtaattaggaaggggatatgtagtggagaacgagacagaaactgatcggaaaggagtaaaaagagagagtgaaagaaccggggaaacgggggaggggtgaagaagaccctaattaggactaattaggagaggaaagaaagacagagggccaggggaataataataataataattgggaatggagaagcaattgaagaaggtgagataaaagaagcaaaatgataaataaaatgatagtaaagtagggagaaaaaaatggaaaaggggagaaactcacggggaaattttgataagggaaaaaggagggaaaagggggtcaaatgattcaccgaaacatttgaaaagatgaagcgcattttgacagtgaatgaaaagccaaaattggggaaaaaatgaatgatcaatagcagaggaaaaatgttggggtttcaggattaatttgttgaactttctgtcgggaattgtgctgggaaaacaaagcgtacaaacggacgaaaggacggacagacggacggacc

SEQ ID NO: 6193 - DNA, 3273 bp, Heterodera glycines
cacattattcgagacacagcacgagaagagaaagagagaaggagagagattgcttagatttactccactccatctcttcccactcccccacccatcaagtacacagcaaagaaagggggatgggtttagcgcaagggaaaggcaaaatgaaatgaagtgaagaaataagtcctaacaaaaaatagcaaaaaaaattttttttaccgcacaaaccccgaccccggacaaacaccggtaatgcgcaaaaacacatgttttcacgccccggacaaacaccggcaaggtgtgaaaacatgtgttttcacaccggacaaacaccggacaccgaccggtctttaactactcatgccctcggaccattgcttcgtagttggccctgttccgaccatatgctgccttgaaaacaaaataattgataaatttgacagattaaacagatgaacttacagctgcatcggtattggccgcattctcatagttccacttcgaatgccttcaacaacttgcgataagttgtttgtgtcgttccataaatccaacaaattaatacacatttgattccgcgtacgatcactggcattagaaactgaaataaattaaactcgtcagattctcaactcaaaacgcaccattagggtggataattggtttattaaatgtaacagttggaccggcccgaggatatgaacgcggacagtcgagaacgacggaaaaaacacaaatcccaaatacacgagataacatctgaaaatcaaaagtaatagccaaaatattgattggaaatgggtcacagaggaaatgaggagaaaaatggcaaagtgaacagtgaacgaagggaggaagaggaggggtatttatgcaaaaataaatgaggggtcaacagtgtatgtgtgtgcaccagggttgttccgggtcacccgaatcccgaaacccgacatttttctcgtcccgaatcccgacccgatgattttgatcgggattcgggacaaaataagcactggtaaaaaaggggtctgggtgaaaattagtagataaagaaattggtggagaaaggagaatttttgaaaaaaaaaattaataatttatttcttttaagcattttattcttatgtttttgtggtctattggctatactttctgcttttattatttgtcgcttgggttcaattccccacaaggataaaatattttttttatttcctttacattatttctattaaaatttatgtttaaatattttctaataattaaaaattattattttttcttttttatacagcctaagaccgcaatttaaccaaagttttggttatttttttgacaaaatctgttaacaaaatcactcaaattttcaatttttccccggcggcgcctatcggcaccgcctcccccccccccccaatgttcccaaaaaattttttggaaaaaccgcggcgcaaaagacatttttaaaatcgcaaaaatttgaaattttttggagaaactctgttaattagtgcactgaaattttcaaaaatttctccggcggtgtcgataggcaccgccggacctcctagtccccaaaatttttttaggaaaagcgcgccgcggaaaaattttttattgctttcttccttcgaataaaaaaattttatttttgatttttgaacatatattaaaaaatttttaattgacccgaatccctaaacccgatatttttctcgtcccgaaacccgaatcccgacccgatgttttttcggccgacccgacccgatatttttctcgtcccggaacaaccctggtgtgcacggtgctatgtcgttatataaaaaccatcaaaagggcgttattccataacttttgtcaaagtcaacagaattaaacattcttggtaccctaacatttctctattagctcacctaaatttcaaaaaatttggtcaagtttgagcaaagttatggccaaaagtacccaagacaccgggttttcaaacatttttagctataacttttttggaacctaacgaaatttttcgaaattttgcaggttaatagaggacatatagggctagcgaatgatagtaaaagcactttattttgttcgttctaagaatgttttgatcagaatttttgatgatcaaaataatttatttttaattaaaaaatttctgttagaaattatttttgttttttatttttttgctattagtcgataaccctatgtgtcctctattagcctgcaaaatttaaaaaaatttcgttaggttttaaaaaagttatggccaaaaatttttgaaaacctggttgttgtgtacttttggccataactttgctcaaacttgatcaaattttttgaaatttagatgagctaatagagcaatattagggctatcgcatgataccaagaatgtttaattctgttgactttgacaaaagttatggacagttttaggttgaaatttttcatttgatggttttttatataattttagactaagctcgtcaagagcttttgaatgataccaaatctgtcaggattcgatcgggtttatacctgtcggatcaacttcccccacccctagattgatctgtctcatcgagagctatcgattggtaccatattcgtcaggtttcgatcgttttaaaaatcccccggataagccaggagtgccgtggagcagggatgggccgaggtttcgcttttcgcattttttggcgtttcgcatttcgcttttttttcatttcgcatttttcagtttcgcaaattttgcttttcgcatttcgctttttatttttcaatttggcccatccctggtctaggcctaacctaagcctatataggcgttgcctttgtacgagttgtaatgagtagggatgatacttttagtgacgaaaaatctcgaaatagttaactaaaacagtgagtaaaaatgccaaaatagtgatataatagtggcaaaaagtccgaaatagtgacaaatagtgacatcattttcagccaaaaactaagcaaaaataatttttattcaatagttgcagttgcaaatgagtaggactaggatttttaagggcaaaacccccaaaataagtacctaaaaaattatttttaaaattaaaaattcttgccaagaaaatgaatttttgagaaaattttttcatttcttaggagggcatttttgggtagatttttaggggtatatttttctgaaattttttaagtcgattcttaggggtgtattttttggttttattgcatttttgttaaggaattttccaaaaaatgtcaaaatagtga

SEQ ID NO: 6194 - DNA, 2369 bp, Heterodera glycines
tatgtctgttgacaatacctctctctttcatttcactgtttacaaaataattgtaacagaattttgatttttggcaagtaattaatttcatttcttaattttttttaatttatccgaggcttaaaaacgctgttaattttccatatttgagccaacctaaatatttttgcccctgattcgatcattgattagttcgcgacaatccattagccaaaatccaatggcaaataaattcggcgctatatgaaaagtggtcgattttgaaattttttcaactttttttttggtcaaaattttttgttttgttttttacacacggcgagtcaattttgggctccaagcgcaaatatgttggttttttcgtcttagtggtctgtgagttagtcaacaaaaagaggggctcaggttcaattcctccttgtgtttgtgtataaaattcaattttttaaagcaaacaaataaaatataattaattacagaacgccaaaagaaaaaaatttcaaatacaaagagttagactattttttactgctgattttattgaaattttttagcttataacttggtcaatactagaacaaataaaatcattttatgctcattttgaagggaaaattctgaagaatatttctaagttagtcaaaagtttaaaaagattgtttattggcaaataaatgattcatgtgttattttatatgttagagactaggaaatagtacgcccaaatgagagaaaaagaaaaaatttgccctgggaaaagattttttcctgtgggtaacttttcttaaaattttgcataggccaatattttgacctcctctagcgattccaagtttattttgtgaaagttaagtttttaactcgagatcggctcttgcgtttcttacaagggaaaattccacaaaaaaattttaaattttgaaaagttttggcgttctgattactaaataaataataaacttatttgcagtaggagcccaaaattgactcgccgtgttaaacgatcaaaccgagcaaattggtatcactcgaaagatttttatgtttagtctaaaaatcagtgaattaggtcgaatcgactgcatttaaaatatgtatgtagtaaagaatccggtaatagtaccgatggtatcacaccttttttgaaatttttttcaaaaattcaagtcatatatttattataaggttttcggggtcgctgagcacgaatatggcatccatttcagccaattccggacccctgatccgaattcaaacaaatcgaaaacacaaagttttcaaaattcacatttaacaaaatcgctccaaacgcacgataaaagaaaaaagaaaaaaaattcaatgttcgcatggataaaactcagagacatgcagccaaaaattgtaaaaaacattttcacgattttcaagccattggtcaaactcattgtcttctagtgccaatttatcgtgcaatttttgggacgtaaagttccgaagttcttttagcacagcagccatataataattttaaaaaagaactgaaaacgttaaaacaaagtctgtttctgctttttatgaatctccgtgcgtttggagcgattttgttggataaatgtgaattttgaaaaatctgagttttcgatttttgttcgaattcggatcaggggttcggaattggctgaaatggatgccatattcgtgctcagcgaccccgaaaaccttataataaatatttttatgacttttgaaatttttaaaaaaaatttcaaaaaaggtgtgataccatcggtactattaccgaacaaaacgtacattttattaaatttctttgcacttcgtcaagatggtcggacattctttggaatgacaaattgttcgttgttattctataataaataaagatgtttttcgcttcttaaaaaataagtaaaatttcgatttaaacagggaatctgccaattgagaaaatgttgagcactggcaatgaatgggaatgaaaattagagtagagcgggatcgggaccaaaacgcggacaactgagtaccgaagtcacggttttgaccgtgatcggaaaaagcctgggttttcccagccaaaaagtcccggtttttttcaacccaaaaagtccctgtaccgtaccactctagtttcacgcagggcttacgaccgaaaattttcaaaatcaaccatttggcagacaaaaataatcataaaaaatcaaaatgatgaaaaatcacaaaaaaatcaatgaatgatatgtaaatccgagctcagattcgtggttcagcgcattttttaccccagaaaaggtgcttcttaaattattatcattttttctcagaaaccacaaaactttactattgccaaaattggaaaacactagtga

SEQ ID NO: 6195 - DNA, 1069 bp, Heterodera glycines
ttatattttttgtttttgtttttatgcaaagttaattatataaaaatttgtttaaaaaacaaaatttttattttaaatatttttccattaaaatcaaaaaattattacattaaacataaaaatgcaataaatatcctgtcgtctttttaaaaaatatttttgtataatattttttattgagtatgttatgtatcaaaatgaatagaaaaataacatttttttataaataattttttgataatttactttgcataaaagaaaaaattaaaaaattaatttgcatagaggtgatccgaacctggggctcgaataaggttgactagcgcactacctctacgccattcgataatcaaagccaaaaaattattaaatttgttttttcattaaaaaagtttggcacgtcataacttggcacccatgttcatttggcaaaaataggttaaaattcataatacaacccatgggtgatctgcccaccgaccaagtttcatttagaaatcccatggtcacttgccgacctctcctttgttaggaatttagggtaatatttgaaaaagcataatgctttttgcgcaaaaagctgtaaaaatagagatatataaagagttttgtatatttagcatttctttcatataaaattaataaaagtttttgtaaaaattcagaaaaaaatcaaatttttagaaaaaactcgaacatttttctcttattgtataatatatttattgataaaattttgtcattaatgttctggttcaattctctcgcttgggaagactgtatctttttttttttttttgctgagggcagctttatatatgaaaaaatattttaacgaatttttttttaacattgataaaaaaatatgtttttagtagttttattaattgactgagtattcatggatatttattcttcaaaactgcaagacttttaaatttaactttttaattgttgagttttattttctattgtcttagtataacattacatttctattattttttgttgttgtcaacaatacagaaatttatagttttatcatcttttcatgtataccaagggatcc

SEQ ID NO: 6196 - DNA, 2730 bp, Heterodera glycines
cttgcttctttttattattagttttatgcacatcattatcatcatgtaatgtgaaggaaatttgacaaatttcaccacttctctttcggttaccttttattgcatacgcattgttatttcgttttgatatttttttattgattatatctgttgtatctcatcgctttgccatattcttatattctatgtatgggctgttatcaaatcatttgttttttaaagctaaattaattcaaaatttaaaaacttttataattgtctgttttaaattgattcatttttattttaattattttccttattaattttatgctcatttttattcatcatgtaatgtgaaggaaatttgacaaatttcgcaaatatattgtataattaattatctatttactaaaataataatttaattttatctcgagattgaagaataggcatatgcagtccgtaaatcaccttcaacaaagttatcaagtgtttagtaaattataagcaatttttaactaagtatttaagaattttttgcaattttaccgagatgaaaattaaaattatttgtataaagttgagtaaataaatattgttttttaattttaaattatttcattttatttgcagaacaacaattaaacttattttcttataacttttagaactgaccaatagcatcatagagtttgttgaaactatttaatttctatttcaattatttaatgcttttttcgttcgagtggtgtatttaaggcatcagctgtcttaattacaattggtgtgattcaagataggcgggtaattcaattttaagcaattttaattattatgattttaattttttcttttttaaatatatatttttgttttaagaaaaatatttcttgttttaatttcaaatcctgattggttttaataaaaagtattcattaattatttttagtagaatatttttatcatactttaaactaatgcttcaattattttaaaatctttttcctaattttaggaactttctttatttgaataaaaaatatttgttaaaattatcttaagtattaattagtaattatcaattttatttataaaatgtacccctctccagttaatttgcattcgaagaactgaaaaaatatttttttggccaattttcctgctaggttggttctagtttgaaaaaaatgccttaaaaaacgaatttttatgggtacattttaaaaaattttttgaatttttcacaagaaattttgataatttcattcaaaaatttaggaaaaatgctaaaaagtctaaaatatttaccaaatatgtaaaatgcttcaaaatatgtaaataaaagtaccgactttattggcaaacacgaaaaagaaaatgtttttcctactaattaggctatggagaagacaagaaaaaagcatggatttacataataaaagaagccctgaaaaatgtttatttattaaataaataacatttttaactttcaaatttctcatatatatcgttatagtatgaacaaacttgatcatttaattcttaaatcaatcataaatcagggtttaaatttttttctttagatttaatggcccaagatttttgattaaataaacattaaatttgataccataaaatccaagccaaaaatagtagattaatttcaattttgtagcaaattagctgttaagatttactttattttgttaacttttaagtgcgatgtcacgcataaaaatttggctttggatgactttcctcgttcttttttcgaaaatttttggtaaaaaatatgataattattttaaaaattatttgaaatttttttatttttttataatttgaattttttaaattattaatataaatagttaaatgttaattaaaatttttatacccgaataacacgacttcagcgcgtgaagaaacaataattttcgctttaatttatttataacatcgtagtcaattctggtagttctagatcactttatgtttttttttcaaatctttttttataattttcttttcaacaagtatattaaatttgttttttctatttttgtataattattaatgtgataaaaatcaatgcaattgtgtgacttccagattttcggaaagtaaatttccataattctttgatgcatatttatttgtttaatttaagctcatcagagattcttctaaatattttaataaatttattaaactctagtttattgaaagcgaaattgggtaaacatatcgtaatgcaaaataatctttttttattcttatattttaatttttgtatatttttttgttatctttttattgttaataaataaaaatactattttacttcaaaaaaaaataatttaagaatatataaaaataaaaattttattgattttataacatatattttgcatattttttggaattatgaatcagctttttactaataataatcttgaaagctacccaaagttatatttgtttattcttctaattttttcagatgttaatagttgagattgttattaagcaaacataaattacaatatttttaacttataccatataagaaatttgtataattattcattatcttaacatagaattatttattatttatttttaatagtcgatgttgcattttttcgattttgctcatgccaaaaattctaagaaaattgtataatttatactggtttcagcaattcaaacgcaaaaaatgtttttaattcatttaaaatctctttt

SEQ ID NO: 6197 - DNA, 2261 bp, Heterodera glycines
tagggttgagcggtaccggtaccggtaccggtactggccggtaattaccggtttttttggtacctgtaccggtaccggtaccggtaccggtaccggttttttcaaaaatgaaattaccgttaccggtttgtctagtaccggtaccgccggtaaaaatttgcactggtaagaatgggggtctggtcgagaaaagagtaggaaattggtgaagaaggagaaatttttgagaaaaaattaaattttatttcatttagtcatggaattacacacatgcacatgtggtgtagtggttaaactttctacctttcataatttttcgcctgggttcaattccccacttggatagaataatttacatggccggagaccccttcgcaaaattggaaaattggctgctgaccccttgttttgcaataatctgaattttgaggtctatatctgaattttagtgttctatgtcctgaatttgaaaaaaaaacttggtcaacctgaatatacatatacttctgaatagagaccggaattctcaaaaatgccggaccggaccggactggtattttcaaaaatgaccggattcgggatccggtctctcataatccggtcaatccggtaatccggtcaatccggtaatccggtcaatccagattttcaaattgccggatccggaaccggattccggattggtaaaaatttaaattttcacatgttaattttggaaaaaacccttaaaatttcatctattatatgtagaaatttggtgcaccagaaaatgtcgtcatagaaaagacaatgcgccgaaaaaaatatataaaatttcaatttttcaaaaaaaatttaaaaaatttattttagagttttttatttttgaaaacctatgtttaatgaaaaaataaaaaattttttttgcggcgccctttttccaaaaaacttttgggaaagaaagtagtgggtccggcggtgccgataggcgccgccgggaaaaattttgaaaatttgaggcgatttgtaaacagattttcaccaaaaatgagcatttttttttgcttttttgggcaaattttttaaaaagaaaaaagttttggaggcccggcggtgctgacaggctccggcgggggagaaattgaaattttgaccatttaaagttaaagacattatgccaaatagatatttttcaaagaaaaacgaacaaacgtcaaggttttttggttgagaccaagccggaccggatccggtcaaaaattcgccggaccggaccggattggcattttcaaaatgaccggattcgggatccggtctctcataatccggtcaatctatgtaatccggtcaatccctatttttccaaaaaatcgccggaccggattcctgatccaggaaaatcgggtaccggatccggtccggtccgctctctacttctgaacaattctaatgctaaaaaacaggcactcgcgcgaaaactgaataaaaattttgtatttggaaaattttgtccaaaaatttttatgttctaaaattaccggtttttaccggtaccggtaccggtaccggttgaaaaagttggtaccggtaccggtaccggtttttgcagtaccggtcagtaccggtaccggtttttttgcaattaccgattaccgctcaactctattagctattcttattttcagtgtcttcaataagtcgtttcaattatcttaggttcatgaaacaaattgttttcggattctttctgttttatgaatataataaaaaaattgttttatttttattttacttgaaatcctaacttattattttcttatgcagcttttattttaattgaaatgctttgattgttttttaattaccgatgacgatttccatatttacaaaatttcatgtattcatagtgatattttccttttattattattaatattgtttaaattattcaataatgttttatttatttatatttataataaatcttgcaagaattcgccaaaaattttttgttgtgtaggaaaacggtttttttgtgaattgatctgactgatgtgattccttagtcatattcgaattgccaaaaataaatgaatatattttattaggttatttatcttttcgaaattttaagttttttggagtaataataaaccgattaacaaaatatttttaacagatatttagtttttttgtttaaaataaattaaatattttaatttttatttatttttttaattagtatttcatcaaatttacatgatttttaaacattatgtaaa

SEQ ID NO: 6198 - DNA, 3065 bp, Heterodera glycines
atttactaattgatggaaaattactctaattgtccttaagatttaattaactcggtcgttaatttaaattttttcttatttgtttcaaattaaagtccgccgcaacatccgccgcgaatggtgccgcggtcggcgtggaatcgcacggtgcagcagccatccccagacgccacgcccgccgcatggcagatgcggtccagcgcgaggcgtctgcgcacgcgcacagccgcgagccgctcgctgccaagctggcagcaccgcaccaattccggcgtcgcagctctaccacacaaaaccatccgcagccgcgtgccctgcggcgggccgagtcgtcgggccgcgacggtggccgcgacgcgctcagcagcagcagggcaatggaatcgccgccctcgggcagaggtgcaaaaattttgatcacttttacgccatatgatcagtttaaaatcatcaaaaatcaaattttacaatttgaaattacagtacacgatgctgtctacagtaccgtgcgacccattggcgaccgcgtgccgtcttccgcaatgcacacggggcggccaatgccacgcggatggaccactgagcagccgcctccggcggacggcgaagtgcgcagttaccgtgcctcgcgcaccgtcgaacaccaccgtcgcgttcagcgccgacattgattgactgagtgacggcaaagtcagtacatgccatggtgtggtgccctgataatatctaaatcatccaatcagatccggggatttaattagtccaaaatcgtggaattaactaaaatagtcagttcgatggtggtcagacggtggcttaattgttggatttttttttgatcgggtggcgatcagttcggtcctcgccacacaaatttaaagcaaattgtttggcgctcaattgtgcggtactcaactgaccgtgttttagtttagaactttccattagagtgcagcgggatcgggacttgaacacggacaactgagtaccaaggtcccggttttgaccagttttgaccgggaccgggaaattcccggcttttttcccgggtttcccagccaaaaagtcccggttttccaacccaaaaagtcccggtcccgatcttgcccaaatttcccgatcccgctgcactctactttctattctatcgatgtatttgatccgatcaattttttgccagagttatgaggatggtcgagcactgaaaactgatgcgatgcgttgtagcctcaatcttgccaaaaaaaaaattgtgattacacatcgttctgctggcacaacatcacactcaataattaattggtgtcgctttgatcattacgattagcgcattagacaacatacagtatcatcgaaagcatacggtagaaacaattgcaacgacaacaaaacaacgacacagcaacaaaatctgtacataagggcatcgtatttttccagcatttacaaagcacagatcaaccaacgctcatcagcaaattttaagggtttgtatgaaaaattgtgcccttcattatggtaattcttagaacacatacggtaaattaaaaatatatacggtatatataagggaatgtgccaaataaatagtggaagccatttttattcactgctttggttgggtgcttttatggcttttgcactgctcgggatcagcttgttccagtgaattgggccaatattgagaatttatttcgagatttttgatgagtcattatggttgagtttaaaaaatcgggactcttaatgggtaattaaggctgacttttgaaaaaccgagacgcttgacggatcattagggctgggggatttaaaaaaacgaagaaaaaaaaatcatgaaatttagtgacgatgcacaaaaatctcgaacaataactgatcacaacatgctctatctgctttagttgcaaataaattataataaaaacatttctgtgtgaaataaaaaaaacaaattcccttctaatttcagcctcgtcaaataccaaaagcggtgagattttttttcaaaatttaatttttgtatgatttttgctgtgttcgctttttcattttttttctttctatatttttgtgtatggcttagcttacaggcgcttcccgaaatcaaattggagccgtccgagccacaaatgcatccatattataaggtcccttaaaattgtatttttcggggggggggatgggattaagctgctggtcaacaaatctcaaatttattggggtgatcagacacttttcgagtttttttttagtttagatatcatatttgctattctgatcagagagaactctgatcgaattctaatgcactattcggacttgaaagtgatttggtcttatttttgaaagatcactaactgtataaaatcgatttgcttgtctgatcaagactctaatctccgaattctaattcaatattcggggtttgaaaatgatctcgtcccatttttgaatgatcatgaacggtataaaatgaattacaaatataattaatgatctgatcaacttttggatcggcctggtttttggtttcctttaaattctggccctggcccaataagattgcatctgatcaatccaacctgatcggtcgtaattgttattttgtcattatttcaatcaaatgccaatgccttcccgttcgatttcatgccaaagctcctctgctgctttgtgccaaatgctaatgctttttcaggagcacattcgcgagtttttggacagccgctcctcctcagcatcggcacaccgtctgcaccaacaggaaagccggcacagcggctatgttactgtgagctccaaaaaatgggcctcgctttaccgtatttactggattagagattcttcccccgcgggggggggggctttattaacggggagggggaagtaatgtaccgaaaaatagagtcccctagtttatgaggcactaattgagtaaatacggtagcttttgtgtgttggcattttccctcgagtgtccttaatattctactaaaaagttgtgcttaaaaaaggtgagagccaatcaaaagagtcctggaaattggttaaactaaaagccg

SEQ ID NO: 6199 - DNA, 3612 bp, Heterodera glycines
  unsure (1)..(3612): unsure at all n locations
gagacgcttgacggatcattaggggctgggggatttaaaaaaacgaagaaaaaaaaatcatgaaatntagtgacgatgcacaaaaatctcgaacaataactgatcacaacatgctctatctgctttagttgcaaataaattataaaattcccttctaatttcagcctcgtcaaataccaaaagcggtgagatttttttttcaaaatttaatttttgtatgatttttgctgtgttcgctttttcatttttttttctttttatatttttgtgtatggcttagcttacaggcgcttcccgaaatcaaattggagccgtccgactcaaatttattggggtgatcagacacttttcgagttttttttagtttagatatcatatttgctattctgatcagagagaactctgatcgaattctaatgcactattcggacttgaaagtgatttggtcttatttttgaaagatcactaactgtataaaatcgatttgcttgtctgatcaggactctaatctccgaattctaattcaatattcaacttttggatcggcctggtttttggtttcctttaaattctggccctggcccaataagattgcatctgatcaatccaacctgatcggtcgtaattattattttgtcattatttcaatcaaatgccaatgccttcccgttcgatttcatgccaaagctcctctgctgctttgtgccaaatgctaatgctttttcaggagcacattcgcgattttttggacagccgctcctcctcagcatcggcacaccgtctgcaccaacaggaaagccggcacagcggctatgttactgtgagctccaaaaaatgggcctcgctttaccgtatttactggattagagaatcctcccccgcgggggggggggggctttattaacggggagggggaagtaatgtaccgaaaaatagagtcccctagtttatgaggcactaattgagtaaatacggtagcttttgtgtgttggcattttccctcgagtgtccttaattttctactaaaaagttgtgcttaaaaaaggtgagagccaatcaaaagagtcctggaaattggttaaactaaaagccgattttttcatatttttcctcatttttcatagccaatttttcttaaaaactattccacaatttacgcattatctaaaaatgtgccccaacctacgcattatacattctgtaacggtggttttgccgtacccgagacacatatcgattagacacaagtctgggtttcaacgaactaatatgccatacctgattagaggggaagtagcattgaggtgatgtgcatggagtttatggaagccaacctgctggtgcattatttattttttatatgggctttgctctagcccggatcccttggcattttttggcctacccggatcacagacttttttggccctgacccggatcccattggcatttttttgacctaattcgttcctaagatgtccatctcgaccgttataaatccttgagaattcctgaatttcttgtgtattctcaccccctagggggcgccaaattttgtattattatgcccctctctccgccgatggcaagcaggacacctcctcctccatgtggcagttcaacggcagcagctcgttcagccctcgctccttggtcaccgtgaacgtgccgccgccggcgtcgcaagccgtaccggacgacgacgtcgacggcatgcttttgcgcgtgcgcacgtccatgggcgctgggacaagttcgtccgcgtcgcatgcgtccacctcgtcgcaaccgccccagcgacagtttttgcggaacggacacgccacgacgatgacgcggacgaccgcgactaacggcagccgacacgcaacaaaggtcggtgccgtagttggttgtccacacatggcacaaaggtcacacatcacatcataccgcggcacggcatgccacgtgatatcagtcaccacacagcacacggcagcaacaaaatgttaccttgtttctttgtttgttggttgtacatggcactcacaccacaacaacaacaaacacaccaagatggcacaaatgccatcaataaaataaaaaattgttttttgaattttcgtctttttataaattttttttgctaaacataaaaataagtgttgatatgaagataaaaattaagactttttatttgatggtctaattagctaattagtatagatgggttggcacaaaacagggaattaattagttgttcaaattagcgaactgtcgtttttacgcatggggcggcacatcttttcatgagatgcaccacacttcaataatgcaccttcacatattctcggacacatttgttatgtgataacatattttgcaattttaccgtactctcgctgcagcagaacttactgtattaaagtaccatttttacagtgtgtcgcttcttggcgaaaatccgttgcttaaacccgctttagcataataatgtatatatacctacattatgcaacacatttgccattcaatagagagagctttattgcttttttcttaaaaaattgtaccctttggctgtccttaattttaagtacgcgctttttaaggacgggccacataatttatgggcaggaaagggacagggacggtcaattttttgaataaaagtgaatttttcgactgaaattatagcatttttaaattaaaaaattcaaggacacctgtatatttcaaggacagtcaaagtttggcaaaacattcataaaatttgcttcccccgctgaaggagcgtgccattgtgaaggttgaagcgccgccgccaattgtgcgccggtcgccggtccgtcgtgaggtggtcgaagtacggcgcgaagttgtcaaagcggcgccgaccatcaagcacactgtgcaccgtgtggaggagaaaaagcgcaccgaggaggtgcagttttcagctttatggaatacggtagcattctcgtctatccttctactatgtctcaacgtgggatatggtacggttttagccggttgtttatacagtaagccaccccccccccccccgccccccgctggacaagggcgtccttatactgtaccgcacaggaagttgacggttttagtagcctcagccatacaatataacattctccaaattttccaattttgccaggtcgaacggcgtgtgattcgcaaggaacgccggcacaaaagccgccgaatgcaccgcagtcatcacagcagcagcggcgatggtgcgcatcaggaatatcagtacgggtcctggggcggcggatcacgaggaggcggtaggttaaaaaaaccttaatttttagggggcctaattaaaaaaaacaataatttttccaccgtaaggcggctaccgtagcagctccgcgtcgcgggcctcgcgcggcgcgtacatgaacggttacggaagtcatgcggcgatggagcatcatttgccgatcacttacgagggcggcggcacgcgttctgtgcgtagtggtggcggaggcggttttgactcttcatccgatcgctactacgcgggcggcggaggcggccgacagcaaaacggtgggtgtactgtaattatggggggggggggggggggggtactgt

SEQ ID NO: 6200 - DNA, 3475 bp, Heterodera glycines
accagccattcgtcaattaccgttctgatttccaaggcaaattccattttatcgtggaatttcggcaaaggtacttttggttgactaaataattgtttttatattagtatttttagtattaaatcgttttaggaacatcaggtcattcgacaccatacaattgtacaacaatgaaagcaaaaaatcgcaactgtttgaagggcacaccgcgtgctttacccaattcaaagcggagaacaattcgaaacccatcagccttttctgttacgcggtgcgcagcaaaaatggcgttggaaaagttggactttcaaatttaaaactcgcaaaattaaattgctgagtgaacataaatcagttgcacatagtccaactttcggaaacgcaaacgggtaatcaaccatatcagtcgaatactgacaacttccatttccacaccgatgaaacggacgattttcctgtcgcaattcaggtaaaaaactaaaatatatatgataaatggaaatttatgtaaattatttgtcccatttaaattattttcctttagccttccaaatctggtcttttgtatttgttcaccaaacttgggtatgttcatttgttcgacatcgaaactggtacaaaagtttgcaacacgcgcatttcggacaaagccgtgcttttgtcgacagaactgaaagaggatgacgaagtgctctgcatcgatgggtcgggaaaggtccgtcccatttcaaaacggaaatgcatataaacatttacaatcataataggcaattttaaatctaaaaatgactaccaatttattatatttaatgacttaccaaattcaggtcattagtgtcggtcttgataagtcagcaattattccgttcatattgaaacaccataaaaacacggaattggcgcttaaatttgcttctcgttacaatcttgacactgatggggtcactgtaattgtgattaatttacttttaagacatattttccttcttcagtctgacagtaacaacaatgatcaacccgtggctattcaagctcatcaccaatgccaatctgtacaacaggtgcttcaaagaaattcatctgtaaatgcaatgggattacttatatctgtttctaattgttttaaaaatttagtcgagcatttccaatggagcaaattctggcatctccaatgggacggcaccaatgccattgttcgagtcgaccccgagaaacgtgcttgttttcaaaggtgttcttttaaatcctttcaaaaaactctttcgttaaagaaaacgtcggacgcatcggctccgtttcttttacggtcacaaatcgtgaaacgtgtgccatttacttcaagatcaagtcgacttcaaatagcttttattcaatttgtcctgaaaacggaattatccaaccgaaagaaaacgtcgaagtgattattaagccaaatgatgacgagcttggccaatttgcaagaaataacgaccaaaaagcacaagttcttgatcatggtatcgagctgctgttttcggtttttcttaaattccttttcagtcggcaattgtttcgaatttggcagtgcaagcggaaaatttttggaaaggcaaaaagcacttctcagaaggtgtttattccaaaaagctgaagacgaaggtgaaagtggcattattatactcaaaaataagttttaaggtgcaaaaaactcctcacaatcagcaaaattccgaacaacggaaaggctcaacaaacaaaggaaaaatgtctaagaaggggaaacaaatgatggaacaaaaagaaaaagcatcagaaccgattgaaatcccaaaagcggatttgggagagacatcacaacactctgagggactgttggaaaagcggtcgaaaaagacgtctccaatcccagagaatttggaaacgatcttagagagcgatcgggagcagagtcagggattggcttcaccagcaccggagagctttcaaggctttgagttggttccacgtgtcgccgagacgtcaaacaattcggaaggagtgtctgttcaggaaccgaaagtggaggccaatcgctccaattcatccgtcaatcgtttatatggtctaaaaatgaattaccgttgtctcacctcctaattggtatttttttaaattttagctcaatattctgccgaaattgcattgtcactgctcgaaaaaatgtcagcgagggatgccgtgcagttcagaatcgatttgaacagctttttggagaaatacgaggctaaattccttgacgaatgagtcggaacaaatgctgctgctttttgcgagggctaacgatcagaacacttcgaatacaatatctttcatacgtagtactaacctttttatatttcggaaggcattctcaaaattattatttctttatttttctcgtttttaatattttcattttatatacttttttttgtttgtttttttatcgtccacgcgcatcacagtcagtttgaacattgtgtaaattgagttcactgttttatactaataaaaatatttgggttgatttgattaacgaattaaataaataaattttgcagacgaatttttgagaaaatttttcatttcttaggggaatattctgaaattttggtcaatttttaggggtatatttttaaaattttttgggatcgattattaggggtgtatttttcgtttttattgcagttttgctatgaaatttctggaaaaaggccaaaaaggtgctaaaactcgaaaaatgccaaaataggtgctattgaccgaaaatccagttttaggtatttttaggtgctaaaaagtcgctctaaatcgaaaatgttcggagaaaacgctatttttgggcttctctcatcataactaagccgcaaaaaaataggtaaaaccctaaaaatcccatctctacagatcacatcttagcaatttaggagaacttcaaattaaaaaggattttataaatttaggataaaaattggaaaataaattgatttcgagtactttttcaccaccctcgggaaaggggctcccggtaaattggacaccagaaaattggacaccgaaagttggacaccagaaaattggacactgttgtaaataaaaatgaaaataaacaaaataaattactaaacaaaaattttggtttggcctaaaagatctttatcttaatctgccatatgttgtttataagcgtaaataatatggaaatgaatttgttattatttttgtaacttcaggagaagaaaaacatcatatcattcataaagaaataagttttattactcatttctggttcattttttggcccattgatcaatcatccctcatttttggttcaatcttagtgtccaattttcctttagtgtccaaaattccggcggtgtccatttttccgcttggtgtccaattttctggtgtccaatttttccgggtccaatttaccggcccccccggaaaagtaccctaaggtttccgggtaatt

SEQ ID NO: 6201 - DNA, 1996 bp, Heterodera glycines
acgtgggcggcgaccaatgcaacactttggaggagatacgacacggtaattgacgagattcatttgctgattgaattggaaactccgtccattttggggtttaaaatggtgcgcttttaagggcagtcttacgttttgtcatcggcagaaaaattcaaaaggattgattatgcaaatgcggcccagccgatgtggtcgtttgtgtccaacaaactgagcgaacctccaaagtgcggactgagagagacattcaccagggcaaggccgattttgaaggctaaacaacaaccaacaacaaaaatgcgtttttaaaggaacccaacgaatttgtgcacccgcggataatcacaattatccgaaatgggattaaacctcgccgtgtcgtgcgccatttgctcaacaaacgcaccgcgcaatcttttgacatggtcagccaattatggacaatgatttgtttggttttctgcacccaattcatatttttccaattaaattttgcggtccctttcatttttgcctaattattttggtcacatcaaattctttgtctttctaatgattcttttaggttataagtgacattacggcgataatcaaactgaacagcggagtagtgcgcaaattgtattcaatcagcgggaaacaggtaggaaaaatagtttttttatttattccatcccatcgttttttagatgtcaacattggccgactttttcctcgacgattacatttttatcgcttacggcacggaacgcatttctttggacgatttttttgtcatttctgaaggtattcattttcccccttttctgtctgtttttaattttgccgggtttttaagaatataaacggatggaaatcaacaagaacaaaccaccgcgattgaacggacaattccgactcagaccgacgcagctgaaaatgctaaacaaacgcagcgaggggaaggagcgccggaagaaaggggacggcacttccaacggaggtggccaatcggagggggcggatgacttttgttttcggccattgcccgtgggacggacttttcaaatcttggccaaagaagcgtatttcttacatccgattcccaaaacacttcaaaatggagtgcgtttttacatgttcagaggtcgaactgccaatggaactgaaggaacaagtgaaaatattggaagtgctcggcgacggaaacaccgctttggtttataaggcggcattcaggtgggatggatttgcaaatgtttaattactcaaagttttctgttttgctttattattacttaaaaaaaatttcttttaggaccgaaaaaagggacaaaaacgaggaagagcaatggatgacggatgcgcttaaaattgtgcgcgaagaaacccttcagaatgacgaagtgcttggctttgtgcgcaccgaagtcggactgctcggagtgctgagccacgagcacattgtgcagttgagggacgtgcagattttggacgggtcctggttcatccgcatggaacttgtccaggtcggagtccaatcttgaaattggaaaagacaaacccaaccaactcgggaggattggaaacgccatttcacagagaaaattaaaattcggcttcaggacggcgatttgttcgaacttctcaggaaaaaacgaactctcagcgaaacggaaaggtcaatccgtaaaaaaataacaaatatttgtttattcgccttttccatgcctccttagtctctcctcatggtcttttttgtttgttttgttttgtttacaattcctttgcgtttcagtgcgagttgtgccgaatgcctttgccatgcgcttgattacctccatgccgagcattggatagtgcacagagacgtaaaattggagaatttactggtgattcattcaaaaactggatttcaataacaattaaaaataaaacatttttgtattaatttgtgccctaattgtctctggattgtcctctctaattgcattttgtaatgggttttccgctt

SEQ ID NO: 6202 - DNA, 3063 bp, Heterodera glycines
tccgtcgccctctttcgattccatttctttctccgtcaaacttctcatcgttcgattgcttaacaccgacccaaattcgcgcttttccgcctctgatgtcattggttcccaatgggttaaggtcgtccaataattaattattcattcattagttttttatttctttattttagagtcacgggcaaaaggacgaaacggcggaaagtgaggtgtgtcgcttctcttttctcctaaattttctctttttttcattgcgttaattaattttaagatttaatttagtaaatgtatttatttgcttggaataaacaaacatcttttgtttcttgccattattttttcgataaggccatacgccaaaatttaagaaatcgaataaaaagtgcaaaaaagttaatttaagcggaaagactatgactgtgtaaatttgcgtgtttttgttggttttttaaaattttaggcgggtccataacgggaaacggaaagcaccattaccgctaatattgttattcaattagaattgtttttaatgcttaattgtgacttttaaggctgaaccgcttctgaacgcggcactgtccgaaatgcgttttggccaaaacgaggaggaggaggacggacatggggatgctgattcgtgcgattttgcggtgtccgagtcgagcgccgagtttttcttctcgagacgcgccagcatggacgagctcagcgagcagggcgggagcagcagcggaccaccgatggatcaacagcagaaaacaaatgcgaacagtgatggaaccaacaaaaagggaggcattgaagcggcaaatgttgtcggaacaagtcgaagagagagcgtccagaagcacattcaaattggcaccacgacaccggcgacattggcattggcactgaatgggacaacgatggacggcgagacagcgacgacgacgggcaaagaaacgccgaaagtgggccgacgggtggtggttggacagcagcagatgaggaagacatgagcagacagcgacgaagggacggattatggacggaggaaaagcccagaaaaacggaccctaaattatggaccgattgtttgttgccaaagttgctttctgttaatcggtttactattattatatatcatcatattattttattatttattttatttccctgtaacattcttctgatcaatcattgacattcactcttcacacactcccaaaatgactcgtttaaagttgccaattgttctcaacaccgaatgccatttttgtacattctttttcatatgcaaccattcgatatcgccaaatgctttatgatcaattacatggtgggcatttttgcctaattgattgttttgtgttaacagagatgtaaaatcaagaaataaattcgcaaattgtcagtgtaacttccaaaattgattcgatggtttccgttttgtggcgtggcattcattcttcggtcaaatcgaagaatattttaatcaaaaactgatgggaaacgcagcggggggggggggggggcgaagaggagtaaccaccgccggtgctattcatcataacacttattccgttgcaaaattccattcctccgtgtcaatgggctgtacaaaaacagaagggggaaaaacaaaaacagtgagtggcgggggagggcaccgagaaagcccctcgggggatggcacttgacctcccttcccttctcttcctcccctcccctcccttcccccgcctttgaaaatccgacccgaagaaacggaaatgagctcggaccaaattacacttccgtttttgtccaaaattggattaattaattgactactgaacgaacaatcaatgcattaattacttcaattaggagagaaaatcaaaatggtccaactaattaaagggtttctgctgcccctgaggcgtctctttggttaattaattcgtccgccgttaattgctttgttcgcctgccaatgtcactttcagctgctcatgtactctgcttctcatttgtcgcattgtcgtccaatgctttattgagtatgtttgtgctgctgctgatcacttctaattactccaattagtttggccatccatttttggcacattttttctcggtttttttttggcttcgttttgccgactttttggcactttttggcatttcgccctctctccccttttgttgtctcttcatttttgactttcctcctccctccctggtcagctgttgctgatctgtccctgtcccctcttctcatcgattgtttgtgccttcgctcctttcgccccgtctgtggcactgatcagcaaacctacgacaacatttgctttttacactgtgccaaacgtttgaacgcaggcaaaaaaagatgcgagtggagggaagagaaagtgccaacgcgtctttttcagaattgcgattggcctacgacggcgtttgttgtcctcgtgccgaactgtgcacagactacgaggatacggtgtgtgaccaatttggtacggtgcttaagggaatgcgaagagaaaggggtgggtatttatttactgggtggccatttgaatcgcaaagaatcaatcattttttggcaaattgtctctctttttttgtccatttgtcaggtgttcggtacgacaacgactgcatcttcgagtttcacaaatgcattcgccggcgacgcattggcggcgaagcgttgcgcgttgtggggaggggcgagcgaatgtgcggggcgaagcggcggatggcggcgagcgagcaaagcgcggcgacaacggcgagcactgctcgcccatcagcagcatcccgttggagcagtaacggcacggcgcgtgctaatggcaccaccaattcgtccaccttttcgtgcgatttcccctgtgaaaatgccgtggcgccggtgtgtgacagccaaggccaaacgcatcagaacagatgcaagtacagacgaatggacaaaacgggcactgatcagcgccagtgatcacttgccacgctcagattcgacttggccatctgtcggcttaattcaacgcggcagttgtgtccgccattgctgaattagcatgggagcggact

SEQ ID NO: 6203 - DNA, 1869 bp, Heterodera glycines
  unsure (1)..(1869): unsure at all n locations
atcgcgtagcaatttntttgaaaaaaatgaattttcaaccatttataattattttttcaagaaatcagaaagacgaattttccgaaatttaaagntgtttagtacatctgggattgaaaaaatgtaattttgaacccaattttgggcataagcgctaatgtctcagacgcaattgtccccccccccctcccttattttttatgctggtgtttattaattttttaaatttaataatataaataaattttagccaggaatgcgactacacgtgcatcacgcccaccaggctgttatctcatcggtgggtggatgtgaccataaatagccaaagttttaccgttaattattgcgaaataaacatttttaaagcgaatgccatgcggcagcgcgtgccggcacatccgccgatgcggcgcgacaatttgaggacgaggatggccaagaaggcatcagtcggaggaacgagaaggtgcggaaaataaaaatactatttatgaattaattttaaattaaaaaaaggtcgcagaatttaagtgcgaatatttattttatgttatttttaaataaaataaatttatgcttttaatgctttaactaacacttaaattgcctatataaggaagtgattttgttcagtctcttcagttagtcacttacagcaggaaagcgcgaagatccggcggaaatcaagagacacacactttctttcagattttgacagccttttctccaatttgaatttggcattggcacacacggctgtgggtaccactctcggtggtgtttggctttgtcgggttttgattgagagtttctggagttttcggttcgtctcttctccgttttattttcattctaaattgaaaattaaggcagactcatcaatcaacctgtctctatctatctatctctctttgtctttgtctttcccaacgatgggctctctgacccctcgtcttgcttttctcattttgtactgatccatccatgagcattttgagcaattgagtaatttaagcaatatgagcattagaattattgaagcaatatgagtagttttggccatttatcattcattctctaaagcctgcgggtgtatatgagagtgtttgcatgttccttttcattcctttcctctcccccttccctctgcttcattttttcattgttttctttttaattttcacttcgttttcccttactcttccgctttttcttcctttcactggggcgtgcgtgctgcttttgttcggtccttctgggacgctgaactggggtgtgcgtgcgtgtgctttggttccgtccttttgggacgctgaactccctgacggtgtggttccgtccttctgggacgctgaactggggtgtgcgtgcgtgtgctttggttccgtccttttgggacgctgaactccctgacggtgtggttccgtccttctgggacgctgaactggggtgtgcgtgcgtgtgctttggttccgtccttttgggacgctgaactccctgacggtgtggttccgtccttctgggacgctgaactggggtgtgcgtgcgtgtgctttggttccgtccttttgggacgctgaactccctgacggtgtggttccgtccttctgggacgctgaactggggtgtgcgtgcgtgtgctttggttccgtccttttgggacgctgaactccctgacggtgtggttccgtccttctgggacgctgaactggggtgtgcgtgcgtgtgctttggttccgtccttttgggacgctgaactccctgacggtgtggttccgtccttctgggacgctgaactggggtgtgcgtgcgtgtgctttggttccgtccttttggaacgctgaactccctgacggtgtggttccg

SEQ ID NO: 6204 - DNA, 4351 bp, Heterodera glycines
tcattcaacaaatttcccaccacttttgcatcggacattttgatgtgaaatgtgaatgcataattaattaggtaattattggttgtaaattatataggatttacacaaattttttctgcgtatatggtataaagaaagggctcaaaatttcaacgttagaattttattgatttggtgaaggtttttagttcatatatgtaaatccatttttggggattttcgggaataaatccatattccgctatttttgcatttttagtccatatttcggccattttttggaaatattccacaaaagatgtaaaaaaaacaataaatacaccctaaggttctagttttaaaaattagaaaaaaatacaccccccccccccaaaaaaaggagaatgtcttctaaattttggcaaatttttatgctttgttcgctcccaaaaattttcgctgacaacacatgagattgttaccataaaatcttgagatttgcaattgtgaagctagaaattgataaaatttggcattttttaagagttaatccacattctttattatacatacatacagtaaaatgtgttactgtcgaaaaatatttacaaaaattttttctaattatttttaaaaaaaagatttgagcaattgtcaaatcgaagcattctgaggcccaaaatttttccgaaacacggaatttcgaaccaaaaaattcagaaatcgtaatttcgtgtcatccatcatatctactgttgctggtcaggactgggttgttgttgttgggccatgttcatcagttccaactgctgcgaaatgctgcgcggcactcgtcggcacatcacggcatggcacgaaggctcgagttgtccggtaacgacattggcacaatttggcgtgccgtccgcgttgatttcggactccaattcggaaatgcgcacctgcgcacctcggcgaccacagccgttcagaatgctgtccacacttgggtcagctgaggatgagccagttgtggtgttcaacggggtctgagcaccaccgtaactgcacctgttggaaatattaaattattttaaactttttggtagatttttatggggatttagggcataattcaggcccatagcctgaaatttttttttgttactcttcaggccaaaaaatccaaaaattatttctccaaaattattttaaaattttttgcgcactgcaaaaaaaaacagaacagaaatttactcgcaaaattttcagcaaaaatttttgaaaatttcttttaaatatgtatcccttataatggtgagtagaagaattgatgagggttttcttaaaatttcatgcatttaagtttataatgaaaagaaaataattttaaaaaaaaattttattttcacaaatctaacggttttatgtatgccctattaatatttgagccgtacaccttgagaaattgatgctttcacgacaaatattaattgtcaatggtttattattgggcggttccggtggtgaatatgaagggggttgaacctggaaaattggaaatttaaaattaaatttaattagagggccctatttttaaaaaattttatcgcttgcctcaaaggtgggcggttgctgatttatcggcaaccgatgcgcagcgtaatacatattctgttgcaattgttcatctccaactgatacaaatgtctgggaagatgggtacaatttaaaatgcaacagtgcattatgttccccgcccccgccgcaaaaattttttaagtaaaaattcaaatttagaaatttaaaaaaataaaatttcgaaaaattttttataagaaaattctaagaaaaaatttatgaaaaatttagagattttttggaaaaatttaaaaaaaattagtaatccatcataaaatttgaaaaacgatagaaaaatatttcaaaaatttgaattcttttaaaaaaaattattttatttttttgatatttctgtttgaaaattttcaaaaaaaaattacgggtggttggtgaatttaatctgctgattagagtggaatattatacaagtaaattgaattcgaacaattttacccgatcaatggagagaagctcgtcggataacagtcgattcgcctcctccggatcctcatgaatggttgcgcaacttttcattgcgctattcgttccagtggttgttgttgcgcgactgtccgatgttgttggcatccgtccgcgtgcaatctgtacggacaatgtctgatcactgatcaaaaaaacaaattatttaattaaaaatgccaccaaaagtcaaatccctgctgttcatccatcttatgaaaggggattaaatcattttcaccaatattgagacactaatgtaatttttgggcgaaattaaaaaaataataatgcaaattataggtctggtgatgccaaaccgcaaaaccggaaactttatgaagaaaattaccgtttttcctataatagagcccgggggctctatttttcgaccccctaattgcattattcgaatgttaaaggaggataaaaaagcaaaattacagaaaacggaacggataaagattacgagctgggcacctatatggggtacggacgtatcagctaaagaacccgtaaaattcagtactctgtaaaaacccgtatcggtcgaaaaaccgtatacagggtccggcccgtattcgctctctatttttttataccgtatacctctctaccgtattcacctgctgttgacgctgttgctgttgctggtcagccattagcatgacaagcggcgtcactcgacgacaattctgtgccgtcagtggcaacacttgagtacgaccaccggtggcaaagcggcgcggcgggggcggactttcggccggcaaatgagccgtcgtacgatgtggcggcaacaattggccacgatgtgccatcaatggtgttaagctagactggcattttgttggtggctggaaaaataaatgggatttcatttgaaattggattacatcatgctgatctggcagggtaccaggataagaaaacaaagcattttttagaattccctgaatttttaacatattttaaacaaagattggtaattttgatggaaaaatttagcgacttgggaaattcagggaattgtccgaaatttcagagaaaattaattttaaggcctataaattattttaactttctaacagaatatttaaaattgtcaccgtaactgtttcatcaactatcgtaacattttctgttgcttttggttgttgccgaaatgattgggcggccgattgttctggatcatcatcaacaacattcgttcctgttactgcttgcccatcgcgttgctccattttcagctgttcttctgttttggcattttgttgttgtttttgttgcgtttgtccggcacaaataccattcggctggagaaggcaccgctgagataattaaaaaatccatagtgaattaggtaattaattcttttgtttgttttttgacccgttcttcgttagtgccagagaaaaagccgccatttgatggtgttcgatttgtcaaagtttccgttgttgaacgttttcgatgccgaggaggacaatgcgtacaacagcagaaccgaataaagacggacataattgtcaactttaatgaatgaaattttatttaacttatataaaaattaaaatattttcaaataattatatcgatttttcatttttttaaatatttttatccattttaaatgtattttaataaaattctaagtttaattattataaaatactattcaattaatataattaaaatcaaaaaagaataatttaaaataaaatttaatttatttagtttattattccattaaatttaactaacaaaaagcattagcagtgaaagaagcataagaaggagtaaaccgaagtgtaaagaatcaattccggcacgttcaacgaaaaatttttgccattggcgcgcccacgcgggcattggcgccggaggcattattgcacaatggcaaaatggcaaaacgccaatgaataatgctctaatgagttggcctgccttgagggattaaaaagtgaatcaaaatgattgatggaatcgtagggctttagaaaaatttaaaatttcgtaaattcaaaaattattttagcattttttattcaatttaaaagtcaaaagaaattttaaaaattaaagccaaaagaaatttaaaaattaaaaagtcaatttaaataaaattttttaaatcgaaaattaaatttttaaaatttaaattggtgataaaaataataaaatttttcggtctttgtaaaaaataaaccaattcttatccgagtaaaaagttttcaattaaaaaaacaatttcatttgattattattt

SEQ ID NO: 6205 - DNA, 5700 bp, Heterodera glycines
tgccagagagaatgaaaaacgagcaatggtttcgaccaaaagtcattttttggaacatcggaattaaccacgagggtaaatcatccgcagagagtgccatctttcttttacctccctttttttgcttcgtttttagcttcgctggcggcgtccatcggcgacataagtctcgaagaagaaatcaacagaaccgcacttcggcacacggttgaacattgtcttacgttgacttcagaagccgaacatcggacgattgaaaatgctggactgctagagcaattgcttacggaactgcagcaaacggtgggagggcgagtaaaagaagtgaggaagggtaaggaaaagtacccttttaaataggtctcttcgtgtccttcaaagaagaattgggctattttcacccaagtgatggcactgaacagtgcctcaggcggagtgccaatcatttgttgtaaaagtgggaaggatcgtacatcgatgggagttacacttgacgaaggccgaattctgaaggagagttgcggggtatcgaaccaacaggtgaggggagaacgaagccgcatttggcgcaatgcaaccgaatccctatttttcagatttccgaaatgattaaatgtcttcggaagaacggagtccgtcgcgaaaactgcagaaagaacatcggcaaacccttctattcgttcagtcccttccaattaggctttttgccccctccatttcgtccgccatcaggaacattctcaaacgtagtctcctcctaattaccaattcatatacttactatatgtaatttattgactccttccaatccatcggaaatgtttatccatgcataacattccttaaacggcaatggtcaatggagcgaaagtgctcaagactctaacaataaaagtgataataatgataatctacagatagatgaggaaggcataagcgcaaaatgcggtcgagatcagagtcgagtaataataataaaggtagaaatagcataaataaaggtggtaggaataagcatacgcaaagcgagtaataattaaaaagtcaaggggaacggtcacacttttcttcactgtccacggctctgttgggttcttcgttgtcctcacgcgttgagtcaaagttaaccacacgtctgccatttgaggacgaatcggggggaactgaatgagtgaaaatataaaattaaataattatttatataaatgcgtgttttaactgactctccgtgacgtccctcggggtgtaaattttagtcggcgtattctgcggtttgcttcgtccttcttggatgtaacaggcgatcagagattggccaatcatcgaagaatccatcgaacgagacatatctttatcgtctaaacaaatttggtgcaaattccatatgaaactgaccgaagcgtggcgtattcgctttcccattcgaatgacaggacatgctcaagtgacttgtccgctttcgctgcgtttcgggtgttcgattcggcggagtggacgcactcactgaaggcacggcaaaactttttctcgtccggggtgtcctggaaacgaagtgcttcattaaactcattatgaaacagtcattttcaaattgcttcggtgggttttctctttccgcgattcactcacccgttgtttgcttcccctccgttctgtccgttcagctgatactccaacacttccttctctttgaccacggcgtcagccttgactcggatgtcgttgagctcgtgttggtatccctcgagctgtacaatcaatttccttaaccaattcgtttcatattaaccattctcgcttatttcctctttttcgaagttttgtttcatttttctccgtttatctctctttctcttctccctctacatttgccttttctctctcacttttgcaactgtctcaaacggttcacttcgtctcgcaagtcgccaattcgtgcttccaatttgactatttgggcctctttttcgggcaatttgtccacttcgaattgcaattcgcgatttgcctgtctcaatttgaacatttcttcgttcttcatttgcaattcgtaattccgactctccaattctttgtgaagtctctgaaaattaaaaagaaattatcatatgcattgtgatatttatgtaaatggcaattaatgttcacatttgtcgattgactcgccgattcggccaattcccttcggtgtttttcttcttgttccgccagttttttgccgagtttctgtacatgtttttccaattcgttcacggttttttgatgctgtagttggatcttcgcgatgttttccgcttgttcagaagaaatttttgcgcgtaattcatcgaactgtaaaaagtttttgaaattttttcggtggttaatccgccctcttttccccatttctccccttttacggacttccactcgatggtcctccttcgcccgctgaagtcgctttttccagttgcagtccactgcaaaacaaacgattatggccaaaaaggtactgataaggaataaagtgtagacggattgggggtgagtgcagaagagaagggagccaacccaatttgggccatcggaggacggagaaactttgggacattcttttgcattgaaatttgaaaagaaaagactgttgataggtgacataagcctcaataactttgtgttattcaatgctttatcaaaagggaaaagagaaagcaatttgatcgcaatggaaaagcatttgagagaaaataaacgcaaaaggaaatggggggggggggaaggagccgaagccgatgaccaatggaaggggagaaccgcccaaatgaattggagtgaatggtaatgagggggagataagcatcaaacgatgggaaaggcattgtgcagtcaaatgaaataaaatgggcggacggaggggcgacggatggaccaccgctcgggggagtcgaaacaaagaaagaaccccacacaaaaacaagagaaacaccacaaatgcgaaggagtagacgacttacgctcggcgatggccctttggtgttgcgccgcctcgtcgcccttttgagccatcagaacagccgattcggtgttggcattgtccaactaaaattaataaatctaattaatttggtttcagatcactaataccccccccctcacttttctgtcaaaatgtgatgccaccacagcgaacacatccaatgtttttgtggtctgtttcagcatttgcttcgtcctgttcagttcgtcttcgacttcctttcgctgtctgtcggatgcattcgcacttttcgactctttcgtccttccgtttgcgatgtttcggccaatgccggacaaatgtttttgtgcgactgcgacgtgttcaaccgactgacttttcgtggtcattgaacgacgggtcatcccagacattggtgcggttcctttcagtgcaatggaagtgttttcgcgagaactgagcaccggacgagcagacggagtgattcgagagcgagaatggctccgtgggagagcaactgaaaagcgacattgaaaacatttaacgcagagtaaattcggaaaaacgcatcaccctgtgtaggggcactggccgaactttgcgcagatgcgcgtggcaacggaggccgttgttgggatgcctgggccaacagcgacctcctcggtttcacttcctttactttagggaccgtttgttccattgtagtcaaattggcggtactttcggttgggactgtttctaaattacactttggtatgttaatatttttcttatttggtttaaaattattcggggaagatgataagtttttctaaatgctacgaaggtagtctccaaaacagtaacttttttgaaaaaattttttggcagcgaatacttaaaaattggcataacgtttttaaatttaaatagtcaaaaagaccaattattttccaaagtcaattaattcattttgaactttggttcctccccgacccatgggttaattgcgagtgtcattgctgttgaattatgagaacttcgagtcatatgagggtctttaaatatgtttctacacttttttgttttagtaaaattaataattatgtttttttgaacatttattcctcgacaagggtgttcctcgctatatttttaaaatttctacagccatcccctagggtggggggggggaactctatcttctgtgtcgatggaacataaaggtgcttttttgccttctcctatttaccgtttaattcgctcttttcagcgtccattgtccgctttttctcctcctcctcccttttcttcttttcctccttctttttcttcttttcctcctcttcctcctttctctttttctcctcttcctcctcttttttcttcttctcctcctcttcctcctcctttctctttttttcttcctcgtccctttttcttttctcctcctcttcctcctttttcctctttgcccgttgcttttccgcctctatgctcgctttcagttggtccattatcatttgggattttgatggtgctttgcatttggttcgcattggatttgccggaggggcggatgggaagagagaggcctgtgaaaaatgaagtggaactgcctgggttagcagagataggagggaagtgaattggcactttttggatgatgcctgccattcttgaagtgtaaaaacaatgtccgcttcacacttttatggctatacggaaaagagaatggcctgggggagtgtttccctcgcccgggggagtgtttttgctgtcctttgcccccccccctccgcttggttggcttgccctgggccgctttggcgtctcttttctctgctgctggtgggtctcttccccccgccgttgtctttccccgtcgttgcgattgttgttattgttctgctgctcctccttttggctgatgacacttaatcccccgtcccctcttctgtccactccacttgtgctgctgctgctgctgttgttatttgcgttctgctgctgctgctgaagggatccgatttccatttctttccttttcctcccaaattgctcaagtccctccctctgatcatcgctcttctgctgctgatcagttgatcagtccttaccgctgctgtcgtcgtcttttgcgttggctccgatttggccgcaaactccagtctcaaatggttcctgttcagtctgtcctcgtcccgctcccttcgaaagtcgtccgtccgactcatctcaaccatcggagtgggcgtctcttcgttctcctcctccgccctcattttgttgctttcgatcactggcaatgccaaattcagagttggcccgtccaaaatgaccgatctgtccagaaaactcccccgctttgtctcttccgcttcttccgtcagcaaaaacatccgattctgatgaaaagcgtcttcctcctcctcctccccttctcctccgtcactttcgtcctcgtccaatctgagcaccgtcgaatcggtcaattccaaatcggaaagcatcagacagtccgagtcgaaaacggtataagtgacttgggaattggccatcagtgcctcgtcgaaaatgttctaaagaacaataaaaatgaattggaggaggagcaaatgcatttgaataaaatgcgggggaaagttcaaagggatgcgatgaaaggggagaagggggcggtgattggcgagaattttgacgagagaaacgcacagattattttggcaatgcgtcgcgggggg

SEQ ID NO: 6206 - DNA, 452 bp, Heterodera glycines
agaggcaaattggggggggggggtggcgccgggggattgacccgtggcgaagacgaaggaacattttattcatccgacgaagggacatgaacagctgccgttgtttcacgtcctccgtccccccccccggcgttttccccattttcttccattttcccctttttcgctgccatttttctttttcctttgaaaagggccgacaaaacatttcgtccattcattcatttcattcactccccactcaattcattattctttttcattttgttgatctgtcagttttctgtgcatttattccccccccccccctttttttttgatcgtcgcactttttcattaatgggcaataataaattaatggggcggggtaaggacagcgaaagaacgaaaaggcaaagggagagaaaggcacgaaaaataatcggcaataaaatggcgaaacgagaaccatt

SEQ ID NO: 6207 - DNA, 4869 bp, Heterodera glycines
ttaataaaacggaaaaaattactgcaggaagtgggattcgaacccacgcgggcatacgcccactagaacacccagtgaaacgggcaagtgtttgcgtcacttgagtctagcgccttagaccactcggccatccctgcacattcaaccacaatttactttcccctttctcacgaaaaaaatgctaaattatttttaataataattaattgctgtttatttttatcatcaattttctttagcgcaacattcatgtgctgatccgcgcatgcatttccaccagccatttcgagctgctctacggcacggtgtacggccaactgcagaaggacagtctgtgcaggcccatcttccttgaactgcttgaagttgtcgggactagaaaaatgcaaaaattattctctcccattttttaacaggaatttgtgcttgactcacagctggaccgacctccgcccggcctggtcaacgactatttggcctatttgttgtccgaaggccaactgccccaatttgagcaaagcgtcactcgactgcccgtcgactgcatggaccttcaccaggcaattgattatcaattcatgaattttatttgattttggttttatctgtttttaggtgatgaccacctgtctgcagcatcagctctttgacggactgtgccatgtgatgaacaacgcaatgcgcgattacattgggccattgaaagtgggggcaaattactcatcatattttaatactcaaacccggtgtttttatccccgaaattaatttatttaaacgccattttcgctctcgaggaaaggatattattttctacagccaaatttctgtttgtgaattccgccgcctctttgtccaggagatgtgcgaacacatgcagcacactgtgcgcaaggaggtgctgtccgactgcgacattgcccagggcaacaaactgttgctgtacctcagctgctgtttggcgggccgtgcctatccctacggcgaactgccggacgaacatttggccaaaactgtgccgttggagacgtacaaagtgagagggcacccttttaaaaaaaaatttaatttccattcagtttcttgtccaactgcgtcccaaatttgtcaccggaccgccctcctctgcgacgaccactccttcgcccaccaccgcctcaaaggaggacgatcaaggtggttatggcattgctctcgatgctgctgctgttgtacaacccatcaacaacaaccacgtcgacaacaacaacagcagcaacaaaccgtcggtggccgaccttcgcttcccgcacctgcaactgttgttgaagttggatccgcagcagttcctgaacgtgatcaacacctgcgcggacgcgcccgtgttcgcctccgtcgacggtggggccacaataactttttgggcccataatttcggattttccaaatatttttaagctattggatggattttcttatttgccctttcccaattgaacttcgatcggggcttcttcaggtcgtttgaagcgcctcgtggacgtgttgatcgcaatgtgtgtggagaaaaacggggaggacgaacgcaacgaactcgggcccctgctcatcgcatttgtggtcggactgttgcagaagggggccataccaaaggatgtgttcctcttcagtcaggtccttttcgcttttccaaactatttataagctaaaatttttaaaaattaaaaaaactataaaatatttaataatatttgttttgcagttgatcaaacgggtgttgcaacgtcagtttctgaatgtgcgtgcccagaaacaggccgaacagcacattgtggacctgttgaaagtggtgcccgaaatcgacttggacaatgtgttagacattgcgcaacgccggccctagtaaaaaatgttttactcataataattagggtcattaattacatttttgtccctgctcaaagtgttcacatttgtgcgtacattttcaccattcgcaagcagtacgttcagctgttggagtgctgtttaggcgacctttttgaaccggtcagaggatttctgcccattttttgccaaattattttgaaaaatttcagcaaaatgttttccatattttggccgatttgttgaccaatttgcgcgaccatggccaactgtgtgaacttcgtcagtttgtctgcgctcagcttggcaaattgtccaatttggaccctcaggcaaaacgaactgccaaaaataatgaaaattaaaaaaattccatcatttcagcttgcagcccacctggtgttgtcccacctgcccgggctgttggccgatgcccagtccaacccgcgcaaattgcccttccaattcatacgacaatgctttgcgctgcggtacgcttttaatttttaatggacacaaaagcatggctaggtttaagtcgtcagcaaggccatcggacgctgtgcggtgcggacgatgaccacgagcaggacgaacagttttttgactatctgttcgagggcatcatcgacgaggccgatgtcgccgccatgtcgtcgaacggtgtcgaagaaaactgcgagggttggaagccggaattattatttatttgttaattgttttttaattttattttagccaccactatcacttcgttggacaacgagttggcggacttgttgcgctattggcttccgcttggtgcagcgacggaccattgtctgaacgtggccatgcaatggcagcagcagaaacggcccaatggtcagtgactcaagaagacattttaaacgcaatttttagcttaaattttaattaaattaatttgttttaatcccttacattttcagctgtcctttacttttgttacaatgtttcagctgtccttatgtcgaccatttcgcttctgctggtcgcccgggggcacatccaacgcgcatttgagcacattttcaacgagggcgttgaacgacggttggacagcaccattagccaagttagtattgcgacatttggcatttacaagggcttattacatgataaaaaccatgacaatgatattccgatgccgttggaaatttaccccggggcggtaaaagcagggtttttggtatcccgaaattcggcacatgtgctttccccattttttgttgaagcctcccgccgccgacgaccgttgtgtcgcctctctgttggaattggcctccgcccatccgtcggatgcgcgacgtggcgattggttggccaaactgttccggcaccttttgaaggcattgcccgaggaaacggaagccaaaagtgatggtgatcagtcggggtgggagattatctgacgagactcccgacaaaatcattggattttggtcccaactcccgatttttttaaacggtcgttcattgaaagtcggagccattgattccttttcaaaaaattttttaattaattaatttttaaaaattagataatgcagcggaattcactgcctccgtcgttcatgaacaaatgacgcgtccaaattcgcaactttttcgtctgctctgtgctatcattgaacagcagcaccaccacgacgacgaacaggagcaggacggactgagggacatccaaattggagcggaaaaaggtgaataaataaataactaaagcacattgggacaattgtcgagagtcagtcgggaatgaaaatttcggattcatcccgggttttattggaaagggctgggattttcagccagaaaacaatggagggggattttcgtatcaaagacatttccagtttttaaattaatttttaattccccttttaattgccttacattactcccccccccccctttttttaggcacttcggcttcagtgctcgttgccgagctgttcagccacccgcgatttcagcatgcgccactgcacatttttcaccgatttctccgtcaaattttgctttggtaacaacaattaaaatattgtcactgattaacccattaagaatgaaatttaaaaataaaaataaataattgttaaatataattaaatgccattgctttctttctctcttttccacactattttcaggtgcgaaattcgcgtgctgatggaacgggcaacgcgcgactgcgcccgccacgaattggccgttcaattcgcgcacaacacaatgttggggctgggcaaaaggtgtgccgagtgtgtaaaaagggtgggcgggagcatcgggagtctcgagacttgtccaagtcaagtgaatttgttcgagatttccttgtttttcgacttaattaacccctttggtcgaatcgactcctacttttttttaatactcacaaatcgattctcgtgtccgtgttgagtggctcggtcggtcaactacatttgtgtcattttgtggtttcattttgtcaggcccgcctttgccatccaacagtcctccgtcgacaacaaaggttttccggatgaatatgccaaaggtgccgtcgttggcacatcagcagcgctctcaccaacaaaatcctcctccgtcgacatggacgttggcatgcccattggccactgtctgtggtgccgtcgtcgcattgacaagtccttccacctgttcccctgcgggcacacacttcacttggagtgtgtggaagagcagcacaaactgatgcagcaacacgacttgccagggatgccaacaacaacggcaatgacgacgacaacggcacttccggcggcaaaaggccgccagcgcccgcggcgtttctgtccatgcgatgcccggcagcaaaactgtgccgcggctggcatggtgaacagtttgaggagaaagtggtggcacaacaacagcatagctgggtcaggtgctgcaggtctaatctcgaaatctggcgagtttttgatctgaaatccgttcggcacttat

SEQ ID NO: 6208 - DNA, 2492 bp, Heterodera glycines
  unsure (1)..(2492): unsure at all n locations
tcttgcgacgtcgtcattgtcgggaaagcaaatgccagtgtcgaatgccaacgagacgaagaacccttctgccggcaaaaatgacagggaaatggacgaaaggtgggcaaaaaagngagaggattcagaggatagtctgacccgtcgagaattgacgccggcggtgggtcgggaccgaccagcagcacttcaaaccggacttacaattagcaaacaattagtcccctaattgcttttcaatgtgcaaatttggtcccttccaaatgatgggctctgttttcaatgtgatttcgcacattttattgtttcaattgcctcaggcgagctgcaagtgccgtcttccgtcgcctggagcacgacttcccaattcgtacgggccccccgccgccggcaaagacggcgaacaacgctttccaccgaacgtcttcgttgatttagacaaacttttcatttttattgagaaattacattttaatgtagagctattttcttctgactgttttgcccgaatgaatgaatgaatattaattaattagcataattcaaatggcctgctgaactttgttattattatttgccattttttaatttaaaaagaattttaaataatttatttattttcaaccctttttatgtcccgattttcactcatttaactgtgattgtgccagtcaaccaaaatcaaagaattgtttatttatgcgttctacttaattgaaaataaatgtgtgccttccaaactgacaattttaaattaaaaaatcaagttatattttattcaattaaaaaaagcatatataatttttagggctaggatttttatgtgctaaaaatcctgaaatatgtaataaaatatgtgctaaaaaatgctgaaatatgtgctaaaaatccccaaaaatgccaaaatatgtgctaaaatatgtgttaaaaattgaaaaaataagtgtgtttttgcataaaaattcccaaaaatctcattctttatcatttttagcccatacaacgcaaatcaaatacatttcgaagtgtttggggtaaaattgtctttttttgataaatcatttctataaattgaaagttccagcagagaacttcgaaatccaatgacgaattaatgaattcgagatttcattagtttctacaatcgaagaaaaaattttttaatttgaaaattatgttaataattaggaaaaaagtcgatttttagggggtgtatttttcaattttcttgtatttttattgcaatttttctcaaaaatgccaaaatatgtgcaaaatatgtgccaaactccaaaatatgtgctaacatattttatgtgacaaaacgccaaaatatgtgtttttatgtttttataagtcgctctaaatcaaaaattgttcggagataatgctatttttgggcttctctcgccataactaagccgcaaaaaaaatatgtaaaaacataaaaatccgggccctagtaatggccaaaccttttggttagaaaaaaatgtttcaaaaaaaaacgccagaaaaaaatgcgggaaaatttcccgcaccagccccggacaaacacccgggtttgggacaaacaccgggggcgacccttgttttcacacccccctcccaaaggtgtgaaaacacatgttttcacacctgggacggttgggacgctccccgtgggataactactaatgacttaaaatgagcatgcatttccataaaaatgggttcgaaaaatacattaaaaaattggtaagttacctaaacagcaggggtttctgtaacaatatggtcgagattacggtaatggaagaaattatatttttcattatacatagttcccgaaaaaaatcacttttaataagttgaaaaaaaagatggccaaaaattttggaagaaatattttggtaataacctttttgaaattaacaaaaattttcaaaatttggaagctataccaaacacttgtaaagctatcggatgatatcataaaataaatgactcccattaaaatggcacaacattcctcaattggttttcaagtgtaccatcagcatcatgaacatttttggttgcagttatttgttgtacagttttcatacaattagctgcgcaatgatcaaaaaggtattttataatttattaataattgatcaattatcatttttgtacggattaccctcttttatgctaattagtaattacctacaattaatttgaaatattaagaaaaattgctatgtcgttgtcacattatgcttcgcactaacccttgactttttaccagcgcttgtcaacatcatttttgacctcgtatggcacatttttaaaatttaaaatataattaaaatcttttttaataattggaaaatccaaaataattttcagttcgacttgggcttcatcggaaattttgggtctacctgcactgttttggactcgctttgttgtgccgtttatttctaattttttttgtgccaccccggctggttgaaaccagcgtgtca

SEQ ID NO: 6209 - DNA, 1699 bp, Heterodera glycines
tttaattcaaaaatttaattcaccgattttaaaaacttagtcttcactttttgtacagccaaaattaggcaattaattaataaagaaccatattttggaaaaaaatttggaccctttttgagtcgttttctttcttttgaatcttttttgttcataaaataattttattttatatttttgattttaaaaagcttttattttattttaaaattaattggatattgaagagtaaattttaaatgaaaaaacgatttactaatttttataatatttaaaacacttttagaattcgactgaagtccaaaatgaaactttttttataaagcaatttgcgccgcattgttgtaaatacagtgacccagaaaagttggaattcgttcatttttgctcaactaaattgacctttcgcttaagatttggcatttcaaagatcaaagagaaatatttaaaaattgaagtaattaatttaatttattaaatttatttttgtatttttaaaatttattaggcgccatatttacaatcgtacaaattctttgcaaatcgaagaatggaaattcgccaaattttccagtttggacataaactttgcaaaacggtggaccaatcaaaaaggaattatttgggttggcatttaaatttaattactaataaattaaattttaattaaaaataaataaaatttacagagatgaccaatcgcataaattttgtgtgcatattcgaagaggcgatttcattcgacttggcatagaatcaaaaaaagattttactgagcagggaattgaatttggatttcaatcattgaaagttatgccgaaataaatatatattttttattttattaaaaatttagaaaaaatttaacaacactcccatttctttcgttttaatgggaaaagagaaagacttttttaaaaatttggcaatcaatcaaacggtaaaaaattcacaaaattcttaaaatatttgttgcaattgttttttacagcaattttccaacgtttatttgcccaaatcaatgccacgggcaaatgatttggcatttgccacaacggcatgcgactcgctgctgatcacggcacaatcttcaaccttttcgtggtggattgcttatttgatgccggacaatgcgaccattttttacaactcaaaaataaccaaaagtagcgcaaattgtctcttaattaattccaggatttttttaaaaattaaatttatttgaattttaaatacatatttagacatttacacaacaaatgaaaattttttggccgaatgggtgccaatcgaattggtcaacggaaatattatgttgtcaaatgggtaaaacatttaattgatcagaaatttaaaaaaattaatttaaagtatttttgatatcctatgtgtaaaaaaaaagttattatcccaattaaatggaaaaaatattttcaaatgtaaaaaataattaaataaataaaattaatgaagtaaataattattatcaaaagaaaatatataaatattatattaatttaatatttgcctacattctcttctaatattttaagaatttaagaactacaaatggctgtttcaattgccaaaataattatcttttaatcgtcctcttaatgtgcatcatttttcaattgatcacgtaaaaaatatgttttttttgagttttcatttttcatttaaatcccttaataataat

SEQ ID NO: 6210 - DNA, 4028 bp, Heterodera glycines
  unsure (1)..(4028): unsure at all n locations
gtaaaaatttgcactgtaagaaatgggggtctggtcgagaaaagagtaggaaattggtgaagagggagaaatttttgagaaaaaattaaattttattcatnntagtcatgggagtacacacatgcacatgtggtgtagtggttaaactttctatctttcataatttttcgcctgggttcaattccccacttggatagaatattcctcacattttctttaccattattttaattaaaattttaattttaaaaaatattccaacttttttctttcatgttaagcatcctaaaaacccaaaacttaatcaattggtcattttttttacaaattctgttaacaaatcgcattaaaaattacaaattttttcccggcggcgcctatcggcaccgccggcccctcctgtcccccaaaagtcttggaaaaaacgtgccgcgtaaaaagcggtgttgaaagcaaaaaaaaggtcattgatttacattaatttacatggccggagaccccttcacaaaattggaaaattggctgctgaccccttgttttgcaataatctgaattttgaggtctacatctgaattttagtgttctatgtcctgaatttgaaaaaaaaacttggtcaacctgaatatacatatacttctgaacaattctaatgctaaaaaacaggtactcgcgcgaaaactgaataaaaattttgtatttggaaaattttgtccaaaaatttttatgttctaaaattaccggtttttaccggtaccggtggaaaaagttggtaccggtttttgcagtaccggtcagtaccggtaccggtttttttgcaattaccgattaccgctcaactctacttttctcatcctccactagcgcttgtcgatcgttcaatttgtccttgaatcgtcgcactttgctgcccatttcgtcatttcgcgtctccatgcggttaagcgcttcttcgcgatctttcagttgctaaaagggaaaaactcttccgcgtataattaattacacatcatctcatacagcatgtgtggaacgttcacagttcttctcaaagtcatgcgctttcatttgttcatccttaaatttgtaaattccgactaaattagcccaattgataaactaaaactagtaaactccgccaaattatacactcacaatgtgattgtccaccgccgaaagctctttggcaatgtcacactttgtggtgtacaagcgaatcagttgagcaatgtgcatcttcgttctgcgggggtccggttgaaatagatcggagtagagaaattcgttagaaccatcgaacaacttgttgtacaccaaattgctgaacaaattgtggatgcaatgtatataaaactatacgaaaatactaattgtaagatcaaaataacaaaaaccaacgtaccaatgctgttgcgttcggatgatcatcttggcacgagccctcgtcagttcagtggccatttcatactcgttctctttggtggtgccgacattttcaaaaatcaaatcacacagaaagtagtaggcctggatcaactgatcggacggctgaataaaaaaaaataaaattcaaacgatcataaagtcaaaaacctgtgaattgtcaagcaattcctgcgttactccaatctctttagcctcacggttgaagaattcgagaataaaacgagagtcgggtccagccatttaatactcttaattagattgacaaaagtaagaaaaaagttatggcttaagaaactgaggatggtcattgattggacgcgtaaaagtcgattggacgcgtaaactgcattagagccgtaattgctacctaattaaccatactaatttgatgtgtgactatgtatgtcacactttgaatggattatttttcgaagcgaaagcatttgcaaaaacaaagagagaatgaaagagggaaaagagaattattattgttatgagtgaaacaacaaaagtcaataacatttacgaaatcaacacacttaaattcgatttctcttttcttattattgaattattattccaatattccgaatgttaaaaataaagaagtcaaatcaaacgtttcattccgttccttgaacaaaatcattttaatagcaaatttttaatggtcttgaatgtgtacaataattttttaaaaattatttgtgtacactaaaatgattttttgaaatatgtataatcccctatgtatttaaaaaaccttttttcattaattgattttatattaggctgcggttgcgtttctcctggtgttttattttcaatcaacttttacatgaccaatcataattttcgcgatcaatcaaaggcttttgtcgatttagtatcattttaacaaaaaatcagacttaaatgttaaaatctctgaagtaattcatttattgattagttcgttgggtttgctgccgatttttttattatcggtttgttttttcaattattgtaatgatttccaattgatcgaaaatattataaaagtaattttaatgatttttttaatagttttaaatttttttaaaatttttactcccattttaaaaaaccttttttcatttgttaggatttatttgcagttctgctacaattttagtctccaatcaattttatgacacccaaccacaatttgcgcgattaattaaaaacgtttaccgtattatctctaattatcaagagagagagaaaaaagtgagaaagaagaaagcagtgagagagaagtaagaaaggagagagggagagagagagagagagaaattaaaagatgagggaaaatgaacgatagagagcgtgataaaaagaaggggaggaaagagagagagagagaaaggaaaagagagagagaagagatgagaaagaacaagagagtgaaagaaaaatagagagagagaagacagaaaatttgagagaaaaagagagagatagagagagagataaagagagggataggagtgaaagtagttagagagtgtgaaaagagagagattaagagaagaagagggagagaaagtaaatgagagagcgagactgaaagagagaaagagagaagagattgagagagcaaaggagagagcaaaggagagtgaaagaaaaatagagggagagagacagagaaatttgagcgagaaataaagagagagagatagagttaaagagagggagagggagagaagggaaatgagagagcgggattgaaagagagagaaaaaaatagagtgaaaaacagagagagagagaaagagagagacagagaaatttgagcgtgagagagagaagaaagacaaagagagagaaagagaaagtgattgaggaggttaaaagagagagataagagattacgaaaaagggagaaaggatgtgagagagggaagagagagagaaagaaagagagagagtgagagaaagaaaaagagagagagtggtgagtgagagagaaagacagagagagaaggaaaaagggagagaagagagagagaggggagagagagaaagatagtaagtgagagagaaagaaagatagagggagggagagagagagggagagagaaagtgagtaagtgagagagaaagaaagatagagggagggagagagagagggagagagagagagaaaatgagagaaagtgagtgagagggaaagaaagaaaaagagggtgaggaaacatagaaagaaaaatagagggagagagaaagaaagaaagagagagtgagagaaagaaaatagagagagagagagagtgaagaagagagagaaaaagcgatgaaagaaaaagagaaggagagaaagacaaagaaagagagagggagggagataaagaatgaaaaagagagatagagagaaaaaaagagagggagagagtgaaacaaagaaagagggagggagaagagagagagagagaaagagagagagaaaaaaagagagagagaatgagttagaaagagagagactgaatgagaataggagagaagaaaatggaaggcgtgatggaaaaaagttatttttagacaattttaatatcatttaaaaa

SEQ ID NO: 6211 - DNA, 1106 bp, Heterodera glycines
ttaattattcgttcttaaaaaattatcacttttattttaccgttcatgtttttcttccaatcggattcagtttgcacaccgaatcgtcgaatggcattttcggatcggatggtccaacggaatccgacggttggacaaacttaagggaattaaattgatcaaatagttaggctgggaaaattgttactaaatgttatatatccacataacccagataaagaaaaatggttaactcagtaaaaaattggatctcttcagatcgggtttgcctttctttctacccatgcttccatggagcaattggagctgcggctgatgaacagctccatcttcagctgttctctttgctcttctgctgtttggtgtgccatcggcagcatgtccaacgcaagaagccaaaggtcggcataatccgacaaaaaagacggaccatttgaacggaggaaatcattttgcatggcacgcccatcgaaatctgagaatggcattttgagaattgtggagaatgccaaatttgaaatattaaaacataaataattaaattatcaccattttcctccaaagaaaagcgagagaatggcttaaacagtttattccattcgaaaagcagagaaagccgttttcctgctcccaatgtatagcttaataatttataatctttttactataattttttttttattaaaaattttaaaattacaaaaattcaaagagttcacttacgcatttttgattaatattttaataaataaaatatgtactaacaatttcttaaaggcaattgatgactccaaaatgattgatctttctttgtcattgttattcgtttgcattggcactgtgcgcattttaatggcgcgccaaatgattgtgccatttttgttgccatcctttggcatcttttccaaacattccttttcaatcgaatttccctggggagttaaacatgtaattaattaatttttaattatgtaccccaaaatttaccaccattttagcatcaacgatgaattttcttttgacttttgaatttctgctgctggtgtccaaatggttacctcgttgaagcagggcccggtaacagatgagaatgctattaattcaga

SEQ ID NO: 6212 - DNA, 4475 bp, Heterodera glycines
ttttgtgagtggtgattttcatccaaagtttgacggacaaacaatcgaaaaatttccatggagaatcttgtttgtttccgccttataaaatggggtgaggaggacgatggcattgactcatcaaattggcgggaaatttgctgttgctccatagacattgtcactacttaaaaatggggaaaggtttttttgaaaatttctcattggatttttttacatatttgggttaaatattttggacttttttcttatatatttcatttgttacagattttgaggattttttacggaaatttttggaaatcatcaaaaaaaatccaaaatttcggcaaattttttgtatattttttcattttttatatattttgagaatttttgaaaatttgtagtgaaaaaataattttgaaaatgtacccctgaaaaataccaaaaaataatttttaaatactaaaaggttattctaagcctatttaggatgtttttatggcattttgtgcctatttaatccattaggaagaatttttttccaaaaaaaaaagtttaaaaattttatttaaatattcagtacatatttatggttttgtgtacatatttcgggatttttgttacatatttatgtacatattacatattttgaccaatttttgtacttatttttggcagccctatttattagcattttaaaaataaaaaaacattaataatcagtgttaaattagggacaaccattttttagttaccaaaaataagcacattctggcctttttttaacatttccagcaaataaagaaagtatttttcataaattcaaaattttcagaaatttttcctcgaaaatacaccaaaaacggatttcccaacaattagttattttggataaaatgtaaaacaattttgaatttttcaactgactattgtcatcatcatcttcatcagatgttccgacggcgatgttaaaattctgcaaaatcagcacaattgacaatgccaaaacccatcttttgtatgcgaaaataaaaagggcaaacattaaaagcattttattcttttacaaagaacggatttgcctaaacgaatttcagagcaattactgacttaattaagacagattttgatataaattaaaattatattaaatataaaaagaaaaatatgctattttaatataaatgtaatttaataaaatgtaaaagccataaaataatttatgaagcatcataataaatcaatttacagcaatgcaattggcatgcgaaaatggcttttacaaattcatatgacattcattggctggcgtggcgactatttgcgtccgcagagccgaacaaaattatgaattggattaattgtgaattaagaaatattactaaaaaaacatttaaataaaaatttaaaaaattacacatttttgaatttgaacagaccaaagaaaaaagtaagtaagaaaaaatggtcaatgatttgacataacatgcataatgtaaaattcaatttttcgcattatttaactttttttaaatttaaatttgtgtaaataatcattaacgcgtgatcagaccaatttaataactaaaaaactattatagttcagaaacaaaaggcatttttaaatgatacaatttgtgtcaattaacaaaatatgagggaaaaattgaaattaaaattgtcaaaaaaaagaatttttttaaatcattcaaaaaatattttgtcgataggaaaccaatgaatatacaaaaagaaaattcaaaatatttcaatttctggagagggattgaacaatgggaaagaagtagaaaatcaagaagactagcctctagaccattttcataattgtgttcgctacttttaaggtatatattaattattattttttaattttttcctttaattccaattttcatcactaattataccagggttcgcagatctgaggctttagcctcattttgtggttttttgataggtcaatgaggctaaatttcaaaatgaggctttgaggctttttgtggttttttgagaaaaaccgcaaaataaagaattttttaatgaaaatatgctaaaaatatggtcaaaattcttaatttttcccccggcggcgcctatcggcaacgccggaccgtaaaaatccttaatttacaagcaaaaatttgctcaaaatcgcaaaatttggtcatttttcggacaaaatctgttaacaaatcgcattgaaaattacaaaatttttcccgtcggcgcctatcggcaccgccggcctcccccttttcccaagtttttttttggaaaaagcgccgcaaaaaaatcaacttcgtttttcatgttcagaatccccaaaaatgcttatttctaacaaaaaaatgctcaaattaatcatggacaatcaaaaatataacatttgaacattttaaacgtgttttgaataaatttgtgaaaatgaggctttttgacccaaaatgaggcttttttgcttgccaaatgaggcttttgaaaattttcatctgcgaaccctgaattttacactccgacccccattcttaccagtgcttgtgtttcccggttgccctaccgggaccgggacctgagatttaaagtgaaaaaaggaagatttcgagcatttaaaaagaaaaaatgttttttttgttaaaaaatttagttgatcactacccgatcggggtccccgacccccgacatttgagctccccaaggggtcggggagcaaccctactaaaaattgaccaaaatttcagcctaagaaatgtaaaactttcgctgaaaattcgttccaaaattagtatttatatatttcagtttttttagcacctaaaaattcggtcttatctctatgtaactaaaaatttaaaaattgaattctaaaaaaagttaatttattaatgattatttttaacagaatgttgcatatttctctgaacagcttccgacatttattttatttcattttaattagtgaaattacgtgaaaatgtgaacattaattaccgatgttgttgaattgcttcgatttcgaaattgattttatttatttattttatttgcctttttgggtcatcattttgccttttttaccattatgccttcttccccccccccccccccccccccctctgactcggcatttttttcaattcaaaatgaccctgaaacttcttatgtcattccatcactgtttatttgcccttggttgagcaccaatctctcttcggcacaaaaatgagaatataattaatggcaaaatgacccatttaggtaggtcaattaataagaaaaaaaggacattaactcattttcattttactaagtgggaaccaaaagagcaaaatggacacagaacgggaaccggccactttggcgcaggccattttggcgcaagactctatatcattttgatttcacagcaaaattaaataatcttggtatgattttaagtggcttgatagtgcctattaacctgcaaagtttcaaaaaatttagctgagaaacaaaaaagttatggccaaaaacctcaaaaaattgcattttcctggccattttggcgcagcgcgccatatctttttaaaacctaatataattttttgaaattttgcaggctaataaagaacatttagacctattgattaatatcaacattattttatttggtcaaattaaaaaaaagttatgaatctttaaacttgtctgcgccaaaatgaccccgaccccacagaacagcacaaaaagggaaaaggaaaaaatattacaaaaatttgcaaaatcaaagacaattcaaagagttttaatcaatgaaaaaactcgaatttccttaaaagcaaaactaaaaggattttcggggaaaaaatcggaatttctttgacaataaatcccaggtaaaaaaatatggaagtaaaaattaccagcagttgcatatttttattgcaaaatttgattaaaattaaaagaaacattaattagaatattaaattcttctctttttatattttattaaacgaatttataaattattttcaaatgaatgcccacgcgccgttagaagctgatcagaacaaaggtaaacactgaatcattttcaattttctaccaaatttgaatttccatccattttggcactttcatcagacaacaatttcaaacgctgtggccaattttcgtttcggctgaccaatttcaaagcatttgcggaaggccgtgggccaaaggaagtgaccaatgaaacggcggaacacatcaacggattggcatggaaaatccaagtcaaacacagcgaacaaagcattgggcttttcctgcactgcgaaggaaacttagccggtgggaaatgaatttaaaaatgccaataaacgcggcatttaacaaaggcgccctagggcattggcatatgaaaaattaataaaacaattggggttttagactcggatttacgatggcttcttcgaggcatgggatttgttcccaagtcgcccatt

SEQ ID NO: 6213 - DNA, 6806 bp, Heterodera glycines
aataattactctgaaaattagcgattaattgattgacactctttgaggagctgatggatgtggcgaatggtttttatgatgcgaaagacgacgcaatggcattcaaaatggaagttgccgcggaagagccgaagctaatgccgtaagtgatcactgatcagtgaacaccacacagaaagaatgatggtgatcagtttttggatgtgtttacagtattttaacaccgtaaagcatgtccatttttggcaattaaaaattgcaaaacgctgtttgttgggccaacaaaaacccaatggcttatttaaattaaataatttattcattttttagcggacttcgcaatgagcacgcattggtggtcaatggcaaagtgcttttcgtgaacaaatatgtaagccaaactgattgtatttaatttttaattattcaatttttatttcttttaaatttagcttttggccgctcattcgaaatttttcgaagaattattttttggcgcaaatgcgaaagaaacgccagagattgagatcaaagaagttgagaatgcggcggaacactttgaacgtgtgctttccgtaatgtatccgcagaacatcgaattagacggtgaaaatcgaaattaaattaaattttaattttaataatgaataaaaaaacattttatttaatatatattttcctgaattccgcattctctaattagtaaaaaaaaagatttttttaattatttaacataaatcgctatttgtgatttttacataaaaatcatattcaattttttattcaaatattatcattttcttcatttcgcagatgaatgcgtcgagaatgtccttctgttggcccatcattttctgttgggttccgttggaaatctctgcgtcaaatttttgctggagaaaagcaaaaagtcggccattagcaaattccgattggcacaccaatgcggcatcgttggcatgaaagtgaaaaagaattgaaaaataaaccaatttaaatcacaaatttatcttttagaagaaaattctgcaggggatgagcaaggaggactttgtggtgacggcgaccaattacatggacaatctgtggaacagcaagaagttggaggcggacgcagtggcggaactgacggaacgccacaacgaattgttcaaaaatgaatgaacgagaaaggacgggcagagagaagggaccattctgctgattatgttgtatcacaagttcatcatttcttacagtacacttatcaataaattttcaaaatttgcacgagggttcgcaaatttgacggaagccctcaaagacactgacccattaaagacccagcttttgtggacctttgtaattaaaacggactcataatcaattaaaaacctgcaaaatacaccaactctgactgatcattgaattaatagcctttaattgggctgtatttcactctcaaaaataaataaaaaataatgatgatactatgatttaaaataaaaagatttataaaattttggaatttaattccgaaattaatcaaaccattttctgaaattaatcatcggcttcgtcctattttcccttcatcacagcctccagcagagatggcatctgatatttgtgtccggtttggtagccctgtgaattttatttaattagcaaaataattataaaatttttaattgaaaaagaatttcaaaataaaaattcaaccgaccgccccgtccaattggcgcatccacgcctcccactccaattcgcccactccccattcgatgtctcccattttctcataagtgtgtgccattgtaccgttttggcccgatgccgtacgattcattccgttggctaaacaattttttaaaattaaaatacgaaaaccaaaaactttacttagtttaattgtcttttgcttataataaccgcctgtgtttgttttagaaatgcgccaaatgaaaggaaatcaaaaaagtaaattcataacattttaaaatccaaaattttaattgttttcctaatagcctgcttattttatgatataaattttaagtctcaaaaatcttttcaacttttatggtgattttaagtaaagctgtaaatttattctttgtgtttctgaccatttggcgaactaaataaaacccattagcaccataattcccgccccctcccttaattggtgtaatttcttctttaattgtttgccccccccctccctccccactttcatttccttcttccatttcccccattttaatgtttcggctttatccccacccctaatttgctgccctttcttctttcctccacctccgtgctgtgcgatgtcataagcgcgcttcttcgcaatttcatttgggtatatcaaatttttttcgcccgccgccatcgcggacacttgagtctcacaggcgatcagcgtgtgataggccaagtggagcgcctcttccacggaggcgccgcaggcggcaaagccgtggttacgcaagaaaatgacccaaagggataattattaattttaattatgtaaagcacattttaagttgtaattggaagaatcataaaaaaaggttgttgaatcccctattttaactaattatttgaatttttcattagaattttagttttatcataaatcatcgttttcatatgaaagtttattaggaaccaattattccttttaattgcataacataaaatcattcaaaaaaatattataatcatttaatattataattatttacttttttgtcccccaaatgtttgacaatctccgttttttcatcttcggcagaaagcattccctaaaatgggaagtcttttcaacaaattgctctcactctaatccaaattcgcccaatttacacaatattcgtggtacgccacaggtccgatgaccatcgattctgtgaaaattcaatttcaattgaacaatagagacatctttttttaatttagaaaaaggcactattaattaccctgattcagtggcaaaagaccgcatttcattgacgaaacggcggcacccgacgcgctgtggaggtgaagcacacatttgacatcgggacgggcctcgtgaatggccgtgtgaaggcttaatgaatgtgcgttgtgcattcatttcaaacaattaattatgtcttatcaggaaataaattcgaatatataattagttcataatgacccctctgcttacatatatccggcctggttgatccctgcggggaggcgattagcattcattatggctcattagtctcacaatagtttaccgagcggagttgatccagggtcaacaatgcgtccgtccacggatattttgacaaatgaactggcggtcacctcgcgatagatcatgcccaaagggttgatcagaatttcgtggttctttccgggcagtcgaagcttaacacgaaaaaaccatgatagaaaaaggaagtcatgttagtttatggggcattgaaagagggaaagctgctgtttttagtgccgaagttcaagccaaattaatctcgtagttatctctcgaatttcaaattccaccggcccgaataatgcctcaaatttgagacagattctgttcagggatggaacggaattccgacttacgattcttttttgggcctggaattcatccctgtttctgactgactgtgatgtggttgtagatggcctgactccaatggaacaggtcgaccagccggtacaatgaggccaatttattgcggcagtccgtctcttccgccgagtacttgttgctgtcgcccaggtcagcaatcggcaccaaaggctttgctaaaaacgaatggcaaattatgccaatgataaaagtgccatttttcacaaatccgacctccaagtccgttcagagacagagatatgtccatggtgagtaattactataaggatttgagtgcaaaaggatctgtggtaatattttgtcatcatcattaattaattgtacccctaattatgcacccatttggtgaatgcccagttttgacaaatttgttttgggtaaaacttcaaatgagttagtcgagacgaacaaatgccttaaatggtggagcgagaatgcccttcccttctgctgatttgtgttaaattcctcaatccaaaaataaaagtgatttcatttgttgccaattcatttttaccgttgtttggatttttagggagagaatttgcaaatattttgagtttgtcctgtgatatttactgtccacatttgccatggttttgcttgcttttggtgagtacacaaaacgtgcaaaatgatcaaacgtggaagtccaacccaactgataaaccctaattactatcagtgtctttatcaaagcacagcaaagaatcattaattaattaatcacccgaccaaaagaaaaagaaagtgatggcaagacaaacaagcagcaaattcagcaattgagcagaggacaacaaaatgaatgcttaataataattatttattttacaaaattcggcgaatcgatttggtccatccattcattttaatataaattgctctttttcttctattatccttcttatcatcatcagaaagggacataaattttcaaatttcagtttgtattgataaagaataattataattaattttggaatttcgaattttatttctttttcgtgctaatggcactttctttgcctgctaacttttcttcctccggccatttcacttctatggcacaatttggtcgtcctgctgctggtgttgttcctcagctgtgaattgccgccttcctggtacgacttggtcctgctgttggtgcctgtgcagcgacagcgtcggcaccaaatggtcctgcgtttgttcgtcatgagtttgttgcacgagttgcggcaccaactgcactgttcctccctctctttcggcaccattcccgtgccgttgttgtccctccttctagtcctccgatttctcttggtcccgcatttcttggcattgtccgttgcgagttgtccaatgagtgtcgggcccttccgtggctcacaactgctgaaggcggtggtgcagaatatgtcgaggctccatttccttggcccatatttggccacgaattctcatccgatggattcactgcctcgagactttcttaaaattaggaggttcccgacgcaactcaagttcgttttttggggaaaatttaaggaaaaaataatttagacaatttaaaaattaaagtcggcacttccgagaaaagcgtttgaatccccgaaaaacaaagaacaattatgacaatgcattcggattctaactaaaattttatactttcaaacagaaagaaacaaaatgctattatggctatttgttaattatggtaattaaaaataccttccgaactaatcggatgtacggtaagtgaattgtgcacattcgaaacagcgtcgttggagtttctgtcaacatgcgaattaaccgatattattacaaataagagaatgtaaaaaaagacgacggagaaaattatcaaattttttatttgagaaaacatttaatttttgtaatttactagggaatattatatgagtttgttttcgcaaatcgaatttgtttaaataatgtctatttttagtttattttttaaataaattcagctgattttactcgagaaattcatgtgcttacttaggctaatgatgctaacattaattgccacatgaaaaagaactgttcagatcttcacattttagcagtaaatatgaatatccatccgattagatcggaaattgaaaatgctaaacagaaaagaaaaatacgccaaaacggaagagaaagaaaggggcaaaaccacagggacaaagccgacaaagaaaaagagtgatggaagagactgtggctaatagaagagagagagagagagagggaagggagtggggggagaatgcggctaattgaacagagagagaaaaagagtgagagcgtaagacattgattactcttttgaatgatcttaatcatcatcctcgtcctcatcatcactttcttcctcctccatcaccatcttcattttcagctttccctctgctgctgccttttcgttgcactgtttttgccgttctctcaatttttggatttggcgttgctcgtcaatgcgaatgccatttcctctctgaataaaaaaaaagtaaattgaaagcgtcagaaaaaaagttggtattggcacagacttcggttgagcagctgctgatgccctgctgattctgagcagcggtgcgttcggcttcacgttccgaactcgtctgccaactcgggtccaacacccgcaatagctcacgtgccatctttccgagcagccgacgaccccagcggttgtaggccggcgttgccacatattcgttggccaatctgtgccaataggaatagtaagtaaaaagtgctccagaaattatccaggtcccgcttatccataaatgagtatctttccttatttggcggcggtgcaccccaaaacttcgccggccgaaacgtcgtcggaagactttttgaaccataactttgttcattgtcaatcaaattaagcattgttggtgttgttcgatagctctgtgtgtctattattaatttgcaaaatttcaaaaatttttgttaagtttatggccagaaggaactcaaaaacctaatatttcgaactttttttgcctgattttttgtgcatgaataaaaatttttgaaaatttgcagtttaatagcgttttttcaaatgctttcgaataatagcaacaatgtttaattttgttgagaaagaaaaaaattatggtccaaaaacactgcgacgacgttttgtcctgctccg

SEQ ID NO: 6214 - DNA, 6701 bp, Heterodera glycines
  unsure (1)..(6701): unsure at all n locations
gtttcagcatgttcagatcaacacgcancaaaattcagttcccctcattctgatgcctgtggccactnttgtgtctatttcttggccagccgatgttctggcaccccgttttgcgatgtaatgaaacgctgcgcaaaacgcgtgggatggcggactggttggtcaaatggtatgtacgtacactggcgcgccatgtataaaaggccgactaaaagtggggagggcgccacattttttctttcattgcgagaacataaggatgttgttcttttatttcttgctgatcgccttcatcgtaatttttttccatgttctccgtctatctgctggcgaatggattaatgttgagctgagtgtggacccaccaaacttttttgaccgttcatttcgcacaatttccaagacttcaccggcgcaacattggttcggctataaccgggacacagcatgtcatgttgagttggaaaggaacatcaatcggctgtacaccaacccggatacatggaacattgccctgacagatgttgataatttaatgagcatgggacggacaacagttgagataccgtcaaccgccttaccatgggcatgttttgggcatggcggccatagttttgtaattttcaaccttcaaaatgctgcgggtgaggtgaccgtactgcgtggacaccagcaaaaaatagcagggcaattgagcgcgtatggccgcattttgtttgatcatattgccgcccgattgtacattgtggacaatagcgaacgccgaatcaacgaattgctcattggcgatttggagcgatggtggactctgaataacacggacgatggtgtactgaacaggacggcaccacatgtcctaagaagcaattttgttggctttttgccggaacaaaaaacggattatttcattgcagctgaccatgtgtaccttatttggcgaaggcaagtgtacaagttccgcattggacactatttcaacgatccttcgtcacagctccagtttctgaccaactcaagcgacattcgcttcaacttcctcttatttgaagcaggtgccgaaaagctgggtgaaggcagcggcgatcatagaaatagcagatcagctattgttgtaccaacggtgtcgtcgaacggaattgaacgcctcttgctcgccttgacttatctctttgatcttgccgtcatattgattgccatttgtgcattccgccatttgcgccgatttcgaggtggtggtgatggagctgcacgaaatggggatgacgcgatgaaactaaatgaatacgatcttttccattcactttcgttgcaaaacaacaatgggggcggagcctatgatgcgtctgctgcatacaatccaaccattatagcaccaaggaccgcccaccagctgagatcttgtgccactatttaaatgctcacttttttttgaattttccataccacttgcataaatttactgtcattttatgacagccaaaaataattctattgtgcatttgctgctaactatttcatgcaaagagcgataaaatattttcaagaatcttttgcattcgacaccgttgaacagttgtatgcgcattttaaagaagagattttgagctcccccggtgaatattacccaaaccctctttgtgtgcttgattgtgtacacattgtcaacgacgaacacgctgatttgccggtgttcattgaaggaacgcttgatttgatcgccggactagaactgtattccacatgttatccgaggacggaagcagggacaatcaaatggtaagcgagcagagaaatcaaaattcctagataaaaaaacatttttaatttaggagcgaagtcttgtacgtggagttgaaggacatgatgatttgtcggggcgaatcggctcgctgtcgctgcgcacaatccatcaacaacaacctgtcacactaccagctgatcgtggacgagctggaccgttggatgatggacaaccaccaactcaatcggcgggacgtcgtcgaacaagaagaagaggaaaacgtcgaccactcaacctggtgaaggcactgtgtcgtttcaacggcggctgcatgccatcagttttgccgcagatgattcagaggagacgaatagaaaatttgtgttttcttcgtgatctcaggctgcaaacagtgcatctgaagagtaacattatgatttccgccaactcattgtcatttcacagtgcaggcagtttgcttgcctaccgtggctatttgtccataacggtagagcagcacttgtacgttcgccatcgtgttcgtcttaggttccccttcctgccctgcgttgtgcaatatgggggaaatcaccatcactattattttccattagaactgcttgaaatatgttctcgtccaactgacgaatcctcctaatctacacaccttccgaatactgttttattgttgctgttgctattgtgaaaaataaatgtttgttaacacaagtgccgatttggggttattattttggggtgagcacttttcctctattccaactttcttccctcctgtgcgttattctggactatttagtttgccgccgcctcctcctcctcatcatcatcaccgctatcgtcatcagtgacttcggcttcagactcagttgaagaactctgggccccttctcgatgagagtcgatagctatttttttaattttgtaataatcatcatcatcatctgattaccattggaacaatgcgcggcctcccaatcacgaaccttttcctcagaacgttcaaccctacacaaaaaaaattggttgatcgagtcaacgcagtttatttttgctaatacttttttagtatggtgtccaaagagtcttccccaaaatcgaccacgtccgaggcattgtcgtccacacccatttcttcctccagtttggagtattttttttccaacgcatccagcctgtttttaataggaggcatctatgttatgccactttcacaatttaccattcggcacgtgcttcgccctgtgccttgatcattgcgcccaacattgaggtagcggacccatcaaatgaatgacgtcgttttcggctatcaccactgctcgtggaaggcggtagctccttcttttcatccttgggcgtttcgtttatcgtcatgccgagaaaaacaatttcttcttcgcccttttcctctccatgtcctttttcctccggtttcagatccatttccttttcagttttgcattcactgttgtccatgttgtcactgctaatttcttgtcctacaattgctctttaaaggttgttgattagtcattaatgaaataaacattgccaaaaaaaccaattgaaaacggaattatgaaattcttaaaattttatctacggcgattaaataggtatgtgataggttcattatcgcttattcattgataaccaaaaggaagaacatcaagctcatcagtgataattcccttctggcagacgggcagatatcgcttgcgctgctcacgtgtcacaatctgactcgcacgagtcggttgaattttatcataatggaacacggctggctcctctccttgacgtccatagttcaacactttctgacgaaaatgctcaaactgtagggtctgactgttttgcacgtcaaaagttattcctctaattttttgcacatatcggatttcgccagttcgctcatcaaccatttttagtgcatattgttttgctcctaagcggaaagaaatatgtctattacaaatctatacgccgctatgtacctccacaaacgaagttttttatggaaaatccggtgtattcttctgacatttggccaaggaattcgccggtttgaagtggcgccaaatcacgcctatgcttcacaatgacactgtcagtgtcctaaacaacggggtgctaattgtgttacaaaacacaagacaaactaccgtataaagcaattctgctccttcggtgttgtacacttgctgcatataatcgagtaacttcaaccttgcacgaccttaaaataataatgggagcaatgctagtgttgacaaaactaactagtggtccacagactgagcacgatattgctggacgaatgttcatcgataaaattttttttggtcctgtacgaaacacgaatgacttcatcggaaaggggaattatggcataaatttcctgcgttggaaaatttccataataaattaaggcgagcattcaaatactactactactacttacgactttatggtcaaggatgagcttgtaaaattcctgaggctttgtgatcacacgatttgcgcccaactcattgcgcatgctgaattttcccctaaattttgggttactttttttttttttttttttatcgttcctaaaacataccacaaactgttcagcattaacttagaaatgaatcggagtccaggatttttgttaatgcgtgccaaatccagctggacgttgtaccttcgcatgtattcatcggcaaaaatttttctgtcctggtctgtttcaacgccatccgggaagccgcttgcctccacctatatgacaattgtgaaacaaaatgagtgcaaattgtacgtattgtacaaattacctttagctttatcataaggcgaacatattctttgaaaattttgtcactcctaaatgtagctgatggatgttaggcggcaattcatacactcttaccattgctcataatgccaagctctccagaatcggtccacccggtagccgcactctaacgcacgtgccagctcaatatgagtgtaggttccggtgtaggctcgctgctcggctgtgtgttcacattggtgtgcacgccttgtgcccatatggcgaaatttgcttgcacatctgtggcagcaacagaacagtaaacgatcatccatcttgagtggcagaatcggtattcgaagcgctcgcggtggaatcacacgcacacgatacagtcccctgtagagcaagtcatccggtgaattcctattccgcaacaacataatcagggtgtcgtgtccgccacttaccaatcaaccattatttcttcaacgcttgggtgaataattttcggtataccgacagggtaatttgtgtcgtagttgacctataatcaatataaaatcgatccctccctttaatcacaaaatttattgtctgtctaatagacacaacatacccacggatacaagctcacaatatcataaacgctgattttttcatcgtcagaagcctctgcaaacagcttcagtggaccagttcgacctgttaggcaaacattaacgaggaaaaaaaactgggtccacttcacctccacagtaagcggcacgtgggtcgattggccccctttcattgcccaaatcgtcaaaaaattcgcgcatctgcctgttacgggggtctgatagcagagcgttgatctcgcattcctcaaaaaaaaaaaagaagagcagttagatttataaattgcgctgtgttttaacccaaatttcttccacttcaatgcatcttcgatactcgtctggctcacggagtttggtcagacggtcctgggttgattcgttcagctctctgcacgtttttccgtccaccagcttatcaccaggatcatagcaacgctcacatccatgccaataactgtagtagcaatagcacccgcacggaatgaatcacacttaccatccaagcacttcaatgcatttgttctgttcagcaatccatccgtcaattttgtaattttttatgcgtttttctcttccattgcctgcgtgttgtacttgtactccttcacttttggctctccagtccaaatatttaattgcctaaatgtcaaaataaattttaaaaacgccccgaaagctccaataccagaacactggctctgtcgtttctctcgtaccctgtctctgggacgatggccaactgattctctgtcatgaacattgtacgaaaaatgttcatacagacgctattttgcaaattgaactcataattatcggtcatttcctcccttcccgtcatcttacctcgcaattgtacaactaattgggagaacatctaacccattggttatgtcgcgcaacaaaatttggcgaaatttcagaattgcaagcatcagaatttctgtgtcattttcacaataatcgcgcaactctgcaggaagaaagaatggcgtgtgtcggttctcttcgtacctttttttagttcaaaaaatttattgtatgccatatagcgtgtgtaaacaaaattaccattgttcaaatttttcaagttttgccggcttcattgaaccggaaaaatatgcttcttttggtggtagatgcgggagccgaatttcataattttcccttaaaacatcgatgacaagtggtagctgtgttcgagagatgtgtcttctacctccgattgaatccgtagggaaaaaaaggtttatcgggacagtcgagatcaaaggtgcttttcagtccatccaaacgtatcgggaacagcaggcatgagtcgcgccaaattaggaaggagttcaccgccgaatgttgtaaacgaaactcaaaaattttaagtccgttcatcacaacgtccggtctccttctggtctcgcccagataacgaagaacaaaatgtccgtcaaatctggacgcgttatgggccttgtaaaggggcgttatggccaaaaagcatgacttaattcactgcttgttcttaccccaaatgtaa

SEQ ID NO: 6215 - DNA, 2475 bp, Heterodera glycines
ttatccttcttaattgcgtcaaatttcttacagttagttattccatgtacgtcgttaaaataagcaattacattttatggcaaacaaaaattattataaaaaaatattatccaaaaatctaaaaaatatgcaaacagcataaatagtcaataaatttatcaatcaaaaatggtgaatatatttttaatgtttcaatattttattatacccatgaaaaattcatccactaaaatttgcaatttttttcctatttttgctctacaattaggcttttttacgattagaacatatatgtacatatttaaattatttataaatttattattttttcttttaataagaattttggagtttttttcatacagttacaggaatgacctacccatttttgcgttacagtatattaattgtcattttgtgccttgtgtacggtaatgatgacgaaaacaggcaagaagcaattcataaaaatgacgattatatcattggtgatgtttatcttggtgacgaattttgggaccaattttcaccgatcactgatttgcccacaattgatggagtcgaatttattggaaatcatttaaaatatactgatcaaacggagaatgataaaactcatgaaagtgtgattgaaaaataactaattaaaacattttgataatttgacacaaaatcaaaaaaatatataaaattaacaatttttaatatatcgaaaaccgatgagtattaaaaatttattttaaatggagcggcattcctcgacgagccgctcaaacttgatgtccgtgttcttggctcggtcctcttccatcattttgagacagcgctccctcaaatcgcggtcagctgagctcagaccgctgatgaacacgagagctttgatctcctccttggtcagtgtcatttgtgcccgttcacattgtgcgctgacttgtgccgcgaaatcgattggactctgtgaaggtgctttctgcaactgaaaacactcaaatcgtttaacaaaaattgatttgatgccgcaaaatagactctttaacttgcttactgtgacattgtatgataggtctgttggtttttgcgggagaatgctctccgtgaaccgcgcgtattcttgcgcaccaagcttaccgaccaacagacgtgtcttcatttcatctggcaatgattgtccatctgtctcaagaaatggcccataacgttcgtgccaaatttcaaaaaccaaatccgcctccgggttgtagatgaattcggacaattgggaattaattgtagcgaataaatcggagttttgtttattgggatttgcattttgatttgcaatgtttttgagagtgtctgttagctgttggaacagcagtgccatgtccgcgggatttgccatgattatgagtgaaatgaaaacaatgcaatgatcgagtccgaatgagagtcgaatgaattgggcggcgtcgggaatggcttttggtgtgaatgcttatgaattggccagtccgcgggtcaaatatgatgatgaatgaacataaaatgattggcgtttaaaccgtcggctgtttgtgggaatgcgcgagtgaatggaatacacatatgttggcttcactgtccacctcaatgtgttctcattcactttcaactgtgcgggtgttcacagagctcgcaatgagttggaattccacacagagtgttacgtggaggtggcctcgggttttgccaaagatgaatgaatgaggagagaaatgaaagatgcctgggactgccaaaatttaaatgaaatggatgaaaaatgccttatgctgactgcgccaaaaatgttgtgtcttttgcttgaccacaacacttagaaggaataaactttaataaacaaaataagtccacaaatagataaataaaatagaacaataaattgatgacagaaaataatgcgaaatgaatgagagatggcaaatgacatggactgaccaagactcactgtgtgttcggctatttatgaggacgaacacagggaagagacgcatgaatagtgaaggagagagacatgacaaaataagagagtgcagcgggagagaaatagagaaatgactgaaagggaaatgagcgaagagcaaatattgattgactacccaacacttttgctttttattgttgaaatgcgctcgacctttctgcggctgatcactgctcttttcaggcgattacgtcaacggcacaatgctcaccggactgtgccggcaaattctgctcgaagaccttaaggagtcgcgaaagcacgacattctcgagtggacagaagtgccgcaaaagctgaaagaacagctggaaaagcaggaatttgatcagaaatgcaactgaacagaatggaaaaagaaagagaggacaaacaattgcaaatgaatgatcagaaaaaatcaaacgggacagagaaaatggcccaatcgggccactttttttgctgaaacgaaacattttccaataaaacga

SEQ ID NO: 6216 - DNA, 1471 bp, Heterodera glycines
gctccctaaaaacaacaaaatgattgactcattcccgcctcaatgccatttcaatgccaatagttcctccacatcattaaaaaatgatcaccttcccattgtgccattcatccaatcaccgccccttcgtctcctccgcttcttataaatgagtgccgtctctctccgtgtgccatttagcacattccgcgccctctctcactccctctctctccgccattctctctctctctctctcactctctctccctctgtccgaatgtctctttttctcttccactctgttctgctcttcatttttcttcagcttaattcttcactcatcagaggtccgtttctccattcattcttccgtcgttcatttgcttctcctccctctcccctcatcagctgattacgtgactatgccctcaagctatggaacaagcggcgcaatgagtcagagttacggtatgggaggaggaggaccacccgcggcatacgataccggtgcacgaggatcatacggtagtgcaggagcagcctcatacggtaccggcagtatgggttcgggagcatcttatggacaggcagaaccgaaaatgtccgtggcaatgccatcggcaatgccgccaccgccggcaatgccaatggctgcgccatacggtggggacggaagtggccgctatggaaatgacggtcgtcgatgaacgaaaagaaacgaaacgatagattaattaccgtatcattaattcccactaattacaaaacatttactattttttaaataaaatgttttttttttgctcatttaatttggtgtttttttttgtagttaataaatttccttcctcccgtttaatttcattttttcataaaaataattccgccattttttcctcccattctccaccaaatattttatgaactgatttgtgagcaaagtgagaaaaggcagcgaaatgggaggagagagtgcgtgggtcgattctgtcattaattaccaaagcgccaaattccgtcgtttgtcagcggcacaaaaggaaatttgggggaaaagggggggggggggggaagtgcgaattgggggatgacagttcgatggttttttcttttgggagggcggggattacactccgtccgccgcacactcaaaactcaaagatggccccgtccttcgcttattccggttcggcccattggcattttttttcaactggcgaatcgtttttaaagagagaagagttgccgcttcaaagacaaacgctcaaattttaaaacttcgccgccaaatataaatttatttacaaatttattttaattattttttgtttttttattttttctttaagcaaatgttccaaaaaaacacagcatttttcctcctatttattgccttctttctcggcattgcttctgctcggctaaagcgtggtaaaaaataaattcagtttccaagtttcgagacaaaataaattaataaattcgaaat

SEQ ID NO: 6217 - DNA, 1497 bp, Heterodera glycines
aatccgccgccaactcctctcccgtcgcctcagccctgcgggcagtacaatcagtacggaagcggcggcgcctttggaggcggcggaggaggcagctacagtcagccgaactgcaacacatacgggcagcagaacaactacggccagtccaattacggtggtcagagtaattacggtcagcaggaaagtgcgggtggatttggcggaattggcggcagcccatctcagttcggagtgggggcgccaggctgtggcggggcgagttgctaatcgactgaccgatcggaccgatgcgaaaagccaaccgatcagcgaccaggcgattgaatccgtcatttcctgttaatcaattcatcttagcgttctttttacaaccaaaaaaacaaaacaaaaaaaggaaagaggaactgccagttttgtgtgctttagacgcaccaaaagccattttttatcaactccattcgccgaacatcccgatcacacggattctccctgccaatccgatggctcttccctttaatcccccccccccctctcttcgcccatttgtttagcgatcatctttttagtgctgatctgctgatgacgttgttgctaatagatgggtatttaagcgcattcgttcgatgttcctttaccattaaattaatttcccattttcattcgttcgttcgcttttccaaaaatgccgcgcctttctttcccccttttgttcctttcttttgtcattactttgcttctgattttcacgtcaacaaattctgcggctccatctgacactttacgtttaaagcgcggtcagtgcttaaaaatatggggcgggggattggaagaaaggggaggcatttgacaggctaaaagataaagcggggaggagggaattgccaaaactggaagtgccaaagtcccctcacagaatgtgaaccaattaaaagtttgcatgtcattccaagtctaaaacattcgttcattatgctaaacgcttcttaggctacggcggatacaacccgggaggcaatggcggcggatggggcggaaacggcggaggcggccgcccatacggaggcggcggcaattggaacggcggcggcaattggaacggcggaggaaacggatggcaaaactgagaaacactgagggaattgagagagtggcgatacggagaaagacaattcgaagaaagtgcaattcgacacaaattcattttgtgataaaatgtttttataatatttgatgaccccaatggcatttccggcaaatgatcagcgatttatcggcaaaatgatcgattggtgaccggcggctgagctgctctcactgatcggtcatttaacgccttctccggcgggcgcagaacaaacagcacaaaagggacagaatgacagaaaggacgatggacacggccaaagagatgagcagagtgttccaccagtcgatctttgaaaaggaagggcacagaaagtcgcttcgaaagtcccctcggtactcatcttactg

SEQ ID NO: 6218 - DNA, 1751 bp, Heterodera glycines
atcagctggaggcggggcatcgatcggacggacggctgccgagaaaatcgaagggggggggggatcaaggcctacggcaaaggaaccacgtaactaacacctgctgtttgggggggggggggaagaatgcttgcaattccgcgtgactaacgtgggaaaaataaacaatggcacccttcttcgacgttcattaattaagcaaattgcaaattggcaattaacgaatgacccaacacacttccttttcgtttgtttatgaacacaaaattgatgggaataaatgagtgatcactgatcaaattaatgtaatttcgaatgattagcggaagatcaaacggcgtttccgctggaccgaacgacattagccgtccattcattagcctttccccgcgcgctttttcaacggctcagtccaatcggctgctgcacgttctccccggccgcgttcgtccgctgggcccttccctccggatatttgcagcaattggacactcctccaacactttcccagcacagactcacttccatcccggtcaattccacctcaccgctaatgcgtacctgtttgtagtctttgtgggcatcgatggtgcggtggaaaaatgaacagaagggagtgccattgatggaaatctgagggaaaattagaggggaaaagggatataagaaacgggagggagataagggggggggagggatagaggagagaggtggtgaggagaaaaagagggggacgagggagggatggatagtggagagtgataatgtgagaaagggcgggggaagacagtgtgagtaaggaagatgagaaagcggaaaaggccaacgatgtcccgtcaattggccccaggcaagtttaaaattcttaatttgcggttttcattgcagcttttttaagtttaatcgcttgacaacagcttaacaattgtcttaaaaagtagagcttcgaaatgatataaaagattcattgaggcggggaaaaagaacggaagggaacagagagagagaaagaagagaaacaaaggacagaaaagaaatgccgaaaaggactgacttggagtgccaatggctcgttcagaatgaccaagtcgaacccctcgccctttctgaacgggaaagggcctccttcactttcttcggcgccccattctttgtccgtttgggcatttcggaccacctgcaaattgatgagaatcatttaaatgtccatggattatgggaatgacaatttgcttgtcgaacagtgcactcattctgaacagctcctccaaactgtcgctgatcagtgaaacggcgaaatcgccgcggggaatgccataaacgaacagtcgctgcccactttcgagcgcgtggtcgtggaaagtcatttcgtacggcatttcgaagtatcggccgccccaatggacggcggacagcgaaacgtcgcccgacgcctttgaattggcaaatattggcgaatgcacggcacaaatcataggaccaccaaatgtgtttttacttggatgtggtcgatttttcggaaatccgtgcggtgttcgaacacagcccacggcacttggttgacaaaaaagtcgaatcttttctcgtggactcgaattcgcacatcaaatggtttcccatggaagaagggattcgaatgaaactcctcctcgccccattcgccgttttcctaagggacggaccaaaaaaggcgcgtggacggaaacggcacactgaccaacatcgagttcaaaatggtgatgccgacttcg

SEQ ID NO: 6219 - DNA, 4442 bp, Heterodera glycines
  unsure (1)..(4442): unsure at all n locations
aatcagcacnacgcgtggacgcgctaggcacagtaaaacggggaacaataaatcactaatggttaaatattttttacttttacttcaggtacaatcgcgcaaaggacgacccgttctcactgtttttggccgaggccgagaacaacccgtntgtgcaggaagttgcagttgaaggacatgattccggcggaaatgcagcgactcgtcaaataccctttggtgggggggggggggggaatattggccaaatgagcattattttcaaataatttacaaaaaaaaattaaaataaatttattatatgtacacgatttcagttgctggaaaccgtggccaaatacaccccggagccaagcgacgaattgcaaagggtaaagcaatttttgacaatgattgtgcatttgtattaattaaataatcgattcatcagttaactgattaatcggaattatttcccaattgtttaagctgctgagcggaatccaaggcgcaaaaaacattgtgtcggaagtgaacaggtgggtgaacaaaggaattacaaaaaaatttctgaaagattatgatcatctccggcgggggcggtgatatagctaatgggacactttaaaaatgcaattaaatttattgaaaaattacgtgatttttttaatatttccacaatcttcaacattgttctgtctctttacaaattagcccaacttctttacggatgctcaaatcattttacacataatccattcattgatttattaatgagaatgattagtccgctaataatcgcattcagtgcaaaacgaaatgcggagaatgtgcggcggatggaggagctgcagaagaaattggacttttctggggctgaaaagagcttcttccagaagttcgactttcgaatgtgcgcctttcaattatatataattaataaatttatccaagatcaatacaaattaaggcacaaattggtcttcgagggtccgctggtgtggcggcaagcacgcggcaagaacattgaccttcacgttgtgctgctcgaacatctgttggtgttcctcaccaaaacggagacgggcggcggcggacagcagcccaattttcagctcaaaattcacgaggtggcagcagaagagcactttttttaatcgaattaataaatatttttaattactcctccgattgctccgcccttttgcgctttttacttttgcttttccttaggccgggtgcattccgatcatgcgactgacatcggttgaggtggaggagaaggcgggcgacaagcgttcattcaacctgctctacaaatgcgatctgcgcatgttcgagttggttgcacaaacggcgacggaacggaaaacgttggtttatggaaagggacggggatttattgatcagataaatggaagcccatccctagtcaatgactgaccaacattgattaatcccttccgatgatcaaatgctggaaaaattctctctaattagtccattgacttgacaacggttggagaatttacaaattcattatcactgatcaatgttttggctattcccacataactttttgctcattcccctctctaattttaccacttttttcgatttccagttggtttcggctgatcgacaaccaggcgtccgtctcgcggctgtcgcccgtaccggccgaactattcctggacggcactctgtccgcctcggctctgacgatggctcagcatggcggcggcgtgacgccgctgacgaacaaaagcagcgaagacgggtcgctgcaaaggctgaacagttccagcatggaccacgtgcacgtgctaatgcacccggcacttgtcaacgcggtatgatcttatccaatcacagtatccaattaccatatccaatcctcatttactaataattggtaaaacaacctgcggcctctttcggcattaaatcgaatttttgtttatgagtttttctctgtcttaaagtgatgataattcacattttcgattctcgggaaattgttcgagtaccgtaaattataaattaaaatcttcaataattagccgctcactccttggcatttctgacatacaaagcgcaatgcttacttgtacattttatcattttgccctttcagaatgaaattgtcatccaacagcccaccgtgatggacaatgcgcagccggtgctgagcgtatcggaacggttgcgcaaaaatgaccggatgatttttgcggcattggcggaaaagcaccaaattttggcagaacttttgaacgattacggaggagcagcagcagcggaggaggacggggaaaggaataatgaagtgagtgaggagagaaaaaagagcaaattggggggggggaataagcaccaggggaaggatggcacggcacaaagtgggaacagagggggagtcacggcgcaaaagcatggcacggcacagatcgcattaccaagcgtacaagctaattttttttttcattaatttaaattgattttttctcgcttatttcttgtaataactcttttggttttttcattctctgctaattgataatattgataagttttgcccctatcatttaactcttcagaacaatggcggtcgaaaagcagcgccaaacactgccgagctgctcgatcggatggctgatcagatgaccggcctggcggtgctcgacttaaagcaacggaacgccaaggaattggcgatgtccgccattgtgcagggcaaccgattgctggagagcatcaacaaagtgggccatcatttcgtatatatttctatgaaattaaaataattttgttagggaatggttgtgaagccgtccgacgacccaactgcgaagcccaagttggacaacgaagacgaactgatgttgccgtcagtgccctgctacaaattgacctcggtcgattgtgcccaaaactgaaatttatgtaaaaattgcaattttcaggtggcagcccccctaatgaaccatctgaaggtttattggaggaccaaacaaatttcaaataatttttaaattttttcaggcaatgctccaagtgcttcaggaccaagagcgcgaaattcagacactgaagcagcggctaaaggtgcggcacttttcatcccttagctaaacaaaatgccaaatttaccaccactattcacatataaatttttatttggcaactcgtacttttcgtatttttgaatttctacagtatacgattggatggatcagtccgaatcagttttgcccttctttatgaagcaaattttcacttaacaaaaaaggcccacagaagcgaaaattactaattattttatatatttacatttaaaaacaaatttcgctttgcttaattcgattcattccgcaggacactcagtcaaatccgtcgagaaaaacggcaagcgaagaaacgcttgtcgagagtggagagcagcgcataaaagtgacgaggacatccgtcgaggaggacacgccgccgccccctccgagctcgaacccgccggcctcttagtcaccgcacacgcgaacgttactgtactagcaaattcagctacagtacaacaaatcccacagtactacgttctccttttctcattggcccgaaagcaacagcagacaattgagaattttgtgtgaaaccgatagtgtgcaaataaattatcaattcactgatccattcacccattatgcatatatatgtatttaattaacggataaataattaaaatttaaatcttttgtgacagctgaaagtgccggtgccattggaaaaatattgattgtaatattgatttcttaagggtctgtttatgtcagtgtttcaatctcaaaattttgaaaatcctcatttcagccataaaaaatcctcaacactaaaatacttcaaaaaatcctcattttttaaaacatcataaaattgcgaacaaaatcagttaactgtcatatttttaaatgcttgttttacggcgctttttccaaaaaacttttgggaaaaattttgtaatttgtataatacgattgttaacagattttgtccaaaaaaacagttcattccaatttttgctccttttttagcaactattttgggcatttttcagtttttttagcaactatctaggcaaatatttcgcgatttttagaaactaaaaatcccatccctagcataaggtgcgcaatgaaaagcatcatcatttttggcccgcttaattactccattaaattctttttcgtaagaaagaagaaattttcgtttcgatgacatttatttttttgtataaaattagctaaaggaaattaattaaaatttatgcaaaatgaggatttttcgaaaaatgtttaagatttgaagaaaaagttcgaacattttgccaaatatacctaatgcacacatttttcgattttgcttacatgtaatttaacagaccaagtgaatagcaaaaaaatgaccctgac

SEQ ID NO: 6220 - DNA, 1742 bp, Heterodera glycines
ggttcatatttcgtcggcaaagtgtagtttttttttaattttaaattcgtttcgtttggtttttctgccagaaaattaaaattttcttttaggtttcgccaccggaaaaaaaaaatgaattttcgttccgtagaaactggcaaaattcgtgaaccattccaagacaaataaattcctacggggattcctattctttaaattgcttttttaatcattaaaaaagcatttaattgtttattttaatttggcacgattgacaattagttgattattcttgcgaaaatcgttaattagattgattaaatagtatccttattaagtgaaatataattgattggttaatccctttaattatccccgctaatcggcagctatttgatttcgattgactaaccatttttgttaaaaccaaaccgtttttttcatacaaataaatttgcattttgtgaaaacatttgtgaattccaacaaactcggtacaattacttataaatcaggcactaatcaacaatttttatttttaataaatacatatttttcgctgccattttcaaattatatttattgaaatcatataaaatttaaatggaaattcataggaaatatatacgatattttgttgacaaaacaaaagagaaacacatacttttacaactgctgtttgatgatgatgaactaagaagatattattttgtggggtctaaaggctttttgtctgctgatcagtgagtcggatgaaatgaaaaaagttcgaaaaatgcgcaaaattaaataaaattaaaatttgtgcgattgaggaacgaactcgtctcggaagatgaaaatggatggaaaggagagcaacaataatcggaaaaacgatgtgcataaaaatgtttggatttgaaatggataaacgaatgccgtgccgaaatgcaaatgaatgaaaatggattaaatgggagaaaaacgaacacccgttttgcctaattgataggaggtccagtatttgtctcgtagaattgtttaaaaaatgacattctcattattaccggttcaagcaattatttccgaaagcgctctcaattggacaacaagcgttcatattttgcctaattgataggaggtccagtatttgtctcgtagaattgtttaaaaaatgacattctcattattaccggttcaagcaattatcatttacgaaagcgctctcaattggacaacaagcgttcatattttgcctaattaataggaggtccagtatttgtctcgtagaattgtttaaaaaatgacattctcattattaccggttcaagcaattatcatttacgaaagcgctctcaattggacaacaagcgttcatattttgcctaattgataggaggtccagtatttgtctcgtagaattgtttaaaaaatgacattctcattattaccggttcaagcaattatcatttacgaaagcgctctcaattggacaacaagcgttcatattttgcctaattgataggaggtccagtatttgtctcgtagaattgtttaaaaaatggcattctcattattaccggttcaagcaattatcatttacgaaagcgctctcaatttgacaacaagcgttcatattttgcctaattgataggaggtccagtatttgtctcgtagaattgtttaaaaaatgacattctcattattaccggttcaagcaattatcatttacgaaagcgctctcaattggacaacaagcgttcatattttgcctaatt

SEQ ID NO: 6221 - DNA, 1591 bp, Heterodera glycines
cattcattcgcaacaattaacccaaaaagtgcgctcttttaattgttttgccttttcctaacaaattttattcggacatttaactgctaattgactgctctttccttctccttaattaatacgctaaccaaatgcacagaaattggcggacaaattgcgccaaattcaaagcaacacttcgcttccgcccggctcgcgtggtgccaccaccaccaccagccaacactcccaggcgggcgcaggcgccgacttcgcctcctccgcgggtgccaacgcgtcgtcgacgttgcgcctgcggctgttggaccgatctttggacggcgccaacagtgccgccggaagtgtggccaacggcggagggggcagcagcagagggacaccgccgccacagccacagacagtgcagctacagcagcaaatggcattcggagaggagagacccgcctcggaggcgagcagcagcacacggcggatggaaaacaattgcaatgagaagcagcagcaacagcacagccgaagcagaaggagggtcgaacaggttgagaaggacggactaacggaggggggggggagagaggaaatgggatgggaaaagggggacgaagcggaccaaaaccacgcccatttggcaaactaactgttgtgtccccacgagtttcaggcaaatgcacttttctcagttctgacaacttttcctaatttgacccaattcaatctctttttttcgaccttttttttttgaggttttattaaagcaaaacagttattaaagcaaagcaaaattgtttaagagtaagaataagcaaaattggttatagcaaaattggttaagagtaagcaaagggagagtaagtaggaagggagaatggcagtaagaagaagtgttttccaaagcagaaagagagcttaaatacggcacaatttttgggaggagccaagcgaagccaagcgggtgagaatagtctaggccacattacacaaagcggagagagagaattttggagagagggatttggtaaggattgagagatggatgaataaaatgtttacgatgagaattggtggaaaatgggtcaatgcaaaaatgccaaaaacaaaaataaataaaaagaccaaaatgcagacaccacaatccctctcctccttcgagacgtcccgtccatcatcattcccaatcagcgtcctccgtgagatgggccggcatggtagtgcgcgcgtccaaattgcattccacgtcccccgcgtccacgacctcctccacggcctccgcggtcccatcctcgtgcacggtgacaggtccatgatgaacagcttggcggcacatcgtgatgaccatggaattcgcgctccagctgacggaccagatagcccacgcgcttttggattttctggcctccattcttccattgccctctagggccatgccctcccatggcatagcccctgcctctctttcccagaggcgctcgattaattggctctttgggcccttgccctgggttctgtgggggcaaagcctggacaggctctccatcttccatcgatgggcttttctccacagtaccttccgatcgctgatcactggctggtg

SEQ ID NO: 6222 - DNA, 6962 bp, Heterodera glycines
ggctttcctccggcaacagacgctgttttcgccctccggcattagttgacatttttattgtgtccagcactgtccgtatctctcttcccaaaaacttttgggatggactctctccctgtgccgctgcacacggcgatgccctatattcctgcataaaaacgaattgtgcaattttgagggactttccctcatctagcaatttcccaactccttctttgaaggttctgacgaagcgctctgcttcgccgtttgatgaagggtggtagggggccgaggttaagtgtcgcaccccttcgcctttgaggaattcttccatttcatttgacacgtattgagtgccattatcggttacaaatgtttttggcgaaccaaaaatgccgaataattcacgaagggcattaataagagtcgaagagtgggttgaactcatttggtacacaaatggaaatttcgaaaatgcgtcaattacaataaaaaaattggtgccccaaattgggcctgccaaatcagaatgcacgcgctcaaacgggaaccgcgcttcaggccatctgcggtccggttcctcgcgcggtttatttggcccatttctctggcatgtccaacattttttcacaaaatcctcaatgctttcattaatccctggccaccaaaccaatccttttgccctgtccttattgcgtacgatcccaaaatgtgccctatgaatcagttttaggatcggatcacgcattttctcagggatcacaatttgccttaggggtttttttcgaatgagtttcccctctaagtacaattggtctcgtattctgtaaaacggttttagcttttcctctacgggctctgaccaattttcttttattttcaaaacaatttctgacaaaattgggtcctcaattgtctctttctcaattttatcacgacttatttcattttcgttttcttctgaaacgagcaaatatggtatttcttcttttatttttgcttctatttgttcccactttattggcacacgcgacagagcgtctgccactcggtttgcctttccctccaagtaaataaccttgggttcaaactcttgtaaagccattagccaacggtttaattttgggttggaactcgactttgaaaacaaaaaagtcagtgggcgatggtcagttaaaatgattatttcggagccatatattattggccgaaaattttgcaccgcatgcacaattgcggccaattccccgtgggttgccgggagttttgcctcagttgcggttagtgtcctcgaccaaaacccaaccgcatgcatttcatcacttttctcagactgcatcaatgctccggcatatgcagttgcggatgcgtcggtaaacaaataaaatggcagcttatagtccggcgctctaagacagggcgctttaagtaattgccttttcaagttttcaaaagcttctgtctcctgatcttcccatttaaactctatgttttcctgttttgtcaattgatttaagggataggctaattttgcaaaatcagggatgaattttctaaaaaatgacatcattcccaaaaatctcttcacttctttggcatttttcggcacaggaaaggcttcgattacttctcgattgttcagggatggactgtacccatcttttgtcaaaacatgccccaaataagtgcactgtgttttaaggaaactgcatttttccttttttacttttaatccgttttttcccaatttttcaaaaatattgttcaaagtgtccaagtgctgttcaactgtatttgtgtggacgagaatatcgtctatgtacacagtaacgtttggaattccatccaaaattttatccatgactctttgaaatatgcttggggcattttttagaccaaaaggcaacttaagcatttgataaagtccccatggtgttacaattccgcatttatatgagctctttttatccagcggaatttgccaaaaccccgaagccaaatctaaggttgtataccacctttttcccgcagctctgataatcgttttatccattctcggaattgggtacggatccgggatcgtaattttattcagcggtctaaaatctacacatgggcgtagctgaccattcgacttctttaccaacactatgctgtgtgcccagggagtgcaactttctttaattactcccgactccaacattttctcaatttgcactttcaattcactttcatatttttccggcactggataaggctttattttctctgggatttcagttgttgttaaaattggaggggcctcgtaggcacagtgtcctaagtcatattcatgacttgaaaacacatgtttatgtctctccaaacagcgttctaattcaaccttcatttgctctccgtcttcaattttccgattttcctcacaaaattcaattttaactcctttaactttttcacaagcaaaaatttgaccattttctttactaatcaaatttcctgtttgcaaatccaacaatagaggcatttggcggaatgtgtttcttcccacaattaaatcataactctgcgttccgccgatttccgcttcggtcacataaacaattgtctccacataacatccggctaattccaacaaaattttgctctgtcccaaaataggaacaatctttccacccactccgattactccagaaatttgggccatttccaattttgtgattcccaatctgattgcagttttcatactgcacaatgacacatgagctccagtgtctaacaagaaaataactcttttctcatttaccatcccaccaattttaaaatttgggccgcatgcctccttctcaacaatatttacttgtgccactccttcgtcttgcccattttctttaaaattcaccttttttccttgtgacatttggccattttccggggatggccacctttctgttaatggcatgatatttatcacttccctttctttttttaaaatgggcttaggaggtattgccaattcatttgaattattttttatttccggacggcttgcatttctctctcttggaattcttcgccttttccgaaaaatctttgtaatttgaccgattagtcctaagtactgaaaggcctgggcaattcgttgtgggaggaataattggattaaaatagttatcgtgacatagcagcaacagataaacacccacaattgatttaacgtaaaaagacctcctcttaagaaagcaaataatccgttggcaacaattgttgccgcaatttgatcagttcgttctgactgttcgtcccacgagtcgggctttgataaacgggtaatttcttgaacaatctttgctgcttcaattgtctcgttaaaattttccggtgaatataattcagtcaaattggccattactttattcttaaaaagctgaaccggaaattcaggaaaatcaattttcccatgccgtgtgagctgatggagagaatcagaggggatatgatttatatcaccatttaattggtcaaattgcaaaatattttcctttgttgccatatataaaaaacgatatttctggcaatccgtttcgctcgccctcgagcgaattatcatagttttggtgtccaaaaatccgtgtttttgtctcccatataatgtaaaagtaatggggagctgctcaaaacaatgccctttttgccagctaaaatgcatgtcacgttcaagtaatggaaaacacggctttatttccagggtctcttttgtcactaatcttgctgataaatagggatttgccaaataaaaacgtgccaaaagggtcgggtttgcatcagcgagtgcaattgtttgatccgccaaaaattgtaaacttgagcaaattttcctgattgtttcagcaaaaagacgctgcgtatttcgagaaattttgacgctgagggcagtcagttgcgctgctaattgagacgagtagaccaagccaacatctctttctcgtcgtcccatattactttccctatttcggtttacaaatctcgtcatattggtgtgacggtacggcgaatgcttggtccgaaattacaaattctgccccattacagtccgtttttctcgaggcatttaaaaatgttagggcgaaatctccataattggctgtccaaatcaatgtcgagtattctccgccccagcctccgactctgacataggcacattgctgggtttcatccggtttccatattagactagcctgtgggcatcggcatgcccctgactggtaaatgcatgctgtgcattcacttattggcgtaccaattccgggcattccatgcctggtaaatacgactgtttcataaacatagcaatttgacacatctgttgtgctccaaaataaaccagcaggccatgctctccatcccacctccaaagaattatttgtacttcttaatgttccattatttgttgcacttaagtctcctgctggcgagtgatcaagctctttcatttgatggcaagttgccgtcggaacatcaatgggatgggaggttatttcttcgtatttagtccaaaataagccaatcctccgggaaatactcgtttttacacatttacaaactgtggccaacgttttatactgtatggtgttttgccgaaagattgtgaattgcgctggagttggctcttctgttggcatccaagttggacaaaatggatcggtgggaatagaccaaagacttaatggtgcgtccggtaagcaaatcatgggaccggctgctgcattcattgccatattaggcgtaaataatgcaaaaatcgcaagaaacgccaataaaataggactagcaactcttgcagcccctaatcttcccccaaaatgtactcttctcccaggcgattgtgatgagttggcataatccctggggttatcatttggcgtcggcgttcctctgaaattcctttcatttcttggggccattcccctcacataacgcgaatttccttcgcccgtgccggtattccattgcctttctctttcataatagccgcctcctctttgcctcccgcggacattttgtctttcatcatttttctttgttctgcaatctcttaccacatgccctggccgcctacagtaataacatctccgtctttcatttcccattttattatttatcccctgatgactctgccgaattgtcaaagcctcgacctttgtggacaattcagcaacagaatcagcaaccgaaatttgatttgttcgccttgaacttaaaagcagctcaaaatgctgtgctagctcatatgcacttgaataattagttggccttccaggtttaacttcaaattgtaggtcgggggttaatctttccacaaattcttcaaaaagtcttttccttatcacgtcttcaccctctccggccagtgcagtccttattgcctcatttaatcgattggcgaactcgtaaactcgctctcccggcgcctgtttacagattgagagtgcctgacgggcaattgagcgtgtattctcattttcaaatttttgtcttaaataatttaatgcactagctaagttccggttgcggttccatcgattccaactcggcgcgggcttgtccaatcaaaagaattcttaaacgacttaatttctgcgcctcagtaagctgtggatagagcgaaagcatgtcttcgaattttgaggaccacctcgaaaatgaaatactcgggtttccgtcataactttccaacggggcaattccaccaagaaatgggtcagagatcattatttcacagttttctccggaatttggtgggtcctcattaagaaattgctcatgctcaaaggaatgtccattctcagcccataggttttcgtctgacacttcctccatttccagaaattcaactcgttttcgcaaaatatcaatgtcttctgtcattttcgccatttcacttttcattttctcaattattttgttaaatctgactttcgtaaacttttcaagacttttcagacttaaaccgaccgtatctattcttccctcaatttttatgaccttttcctccatctgaaaatggtccaattcttcacggtcttccaaatcagccattgattgttccaattttccaacacgtaagttctcattcgatttttggaacatcccgtttatctccgctaactcgtattccaatctccgaaattgccgacaaacagccgactcaaaaagtctcattcggtttagaagatttgcaaaatttccattttcttcagcggtgaagaaaactgggtcaaaatcggagccaatttcattttctccactttgtgaatttgaacaattttgattgctcattttgattcactttttggctttttttttttttgaaaattaaaaattagcacaacagctcggctggaaaacacacttgaccagctcaaaatttatttttgtatttggcacaacagcctggctggtagtacacaactagaccagctcacagagattgttttggtaatggcaccgagcctttacccctgctgaattttgttcagcgcctggtttaacccgtgcttctcctcgtcccgggtcgtggcaccaaaaattgttgtgtccccacgagtttcaggcaaatgcacttttctcagttctgacaacttttcctaatttgacccaattcaatctctttttttcgaccttttttcttttttttttgaggttttattaaagcaaagcaaaatcgtttaagagtaagaataagcaaaattggttatagcaaaattggttaagagtaagcaaagggagagtaagtaggaagggagaatggcagtaagaagaagtgttttccaaagcagaaagagagcttaaatacggcacaattttgggaggagccaagcgaagccaagcgggtgagaatagtctaggccacattacacaaagcggagagagagaatttttggagagagggatttggtaaggattgagagatggatgaataa

SEQ ID NO: 6223 - DNA, 1271 bp, Heterodera glycines
  unsure (1)..(1271): unsure at all n locations
catcatttttattgttaaaattattgttgaatctatttttaacctgtttattttacatttttatgctgaaattgaaaaagttgtttttactgtgatttttcatttttctgtacttggggcccaatcgaccctggggcccaaacgaccctggggcccaaaaacgagggcccaaacgcgggggcccaaaaactggggcccaaacgcccnccactcatgttgaggttaatttttgaaattgaaaatttccaattttttggcattatatctgcattttttcgagccaaaaaaaaataaatttttcgtgtttttggcttttgcttcacatccgtcgtttcctgtgtttatatgagggcgaattgcaggccagggacgcgttgttggacttttgtcagcaacaggtgctaacaatggcaaaagaaattgcaacttttatgttagctgatcacaaaaaacagtaaacaactaaaggacaaaatcatttcataatattattgctcacaatccaaaaaatcaaaaccgaaggaagtcgaaaagattcgtcccattttcagcatggccgcacttctcttttctcctcctccaattgttcttccgttgcggctgcccttctcccctccacctcatcttcttcttcttcctctgctgctgctggtcccaatgctttgctccgcgacgcgcattttctggacagcggacgcaccggcgaatgcgcacagtgcgcaaatgcgctgctgcacgccgccaaaattgtgcaacgccagcgcaattgggagctgaaaattgttaaggtggtgagccaaaatggcaaattgacgccgatttttatgggaattttcaaagcgtttatttttgatgattttaataccaaacaagacgaaagatttaaaaacaattttattatttggacatttttgtagcattgtgccattattataaagtattaaagattaggacggtgggggcttgtaattccaatttttgccgactttttgaattttgttccccatttttgcctaacttaatgcctattatctgctttattggacatttaggtatttgctctgctcaaaaaacgttatttggagggcaaagaagaattggagggtcgccaacgccgaatggaattaatggcggaagaaaatggacagtacgtaaagcaattggagacagaaagggaacgactggtgaaggagggtcagtcagttttgacaaatatccatttttttccgatctcagaataatgaatgtttagaaaaaactgcatatttgac

SEQ ID NO: 6224 - DNA, 1740 bp, Heterodera glycines
  unsure (1)..(1740): unsure at all n locations
gatgggaaatcagttgccattgcgtcaaatatccgattgaatcgatgagacagacgatgaattattcagcgccattgaaacggaaaagagaaatgagaggcgaaaacggagganaagccgaaggaaaagcaggaggagaagccgaaggatgttttagggacaaaaggcggagaaggcgaagacgacagagtaaaagtgaagggatattttacaaaagtgccaattgattcagtgggctgtccctgctttggttgtgctaattgcggttacgatcgctgcaatgagcagagagctgcgagtgaaagtgtaggaattgtgttgtattatgcaatttttttatttcatttcaaaaggtgccaatttcaatcgctcaaccgcaaaatgccattgtccctttgcctttgcagcagatttcgccgttaacttcgtacaaaattgctccacaacagctcagtggacttttagcagaaaatgattggtattcgaaacataaaacgccagaaaatggaccagagcaaacgcacgcaaaagcaggacaattttaccctttggggtaattaattagttaattaggcaattaataatgggaaatgttttcacaataattgcgtcggaaaagtttgacaaatgctgcgagtgcaaatgtcgatcaaatccaaccacaacattcacttgcccctgtttcttctgccgatgagccgacaatcaatcgacaacacgcggcgattgtccaccgaccgcacagcgattcgggatatgccaaaataccgcaattagcacgaaaatacccactcccagaatgttacacggacgagagcagtcagtcagccgcaaaaggacacaaaaattaattaaaaatcaattaaacaaccaaattatattattattattattattattactttataaaaaatggcttaaagaaatgcctttctttgttcatttaatacgaatttccattctctgtcaggttttatgtgctgtaatgcccaattggaagagaccattcaccgggcttttcagcatctcatcgacaccattcacaactttcataattgcaacattcagaaaatttcgagcaccgttcaggtgacgctaattgacttttgaattgaacactgttcagtcatttgccgagaaacagttcaacatttcattcgaagtggtcaccgggttgacagattatgcgtccaaaagtcacttttacagcaattacatttgcaaagtgcagagggacaatcggtaaaacttgacgaatatcgtaacaaagttaaatgaagcattttacagtaggaagttttaatgatcgattcagtgaccattagtcgaacagtgacttacaaattagttgtggcaaatttaaaagtgttcttgaggtaattgaattggtttttgttgagtgcagcgggaccgggaattttgggcaaaaccgggaccgggacctgagaagccgggaccgggacctcggttttttcgggacgtgaaccgggaccaaccgggaattttttaaaattttaaaaatttaaaaaaaattcaaattttaatttattcaagtgaaaatatcaaataattaaattttgatttttattttataaaatccaaataaaaattttcaaacaaattttcttcaattatttcaaacaattaatcaattttggactaaatgatcgaatattattagaaattcagatttacttttcacatcactttttttctgcgcgttttttcaaaaaaactttt

SEQ ID NO: 6225 - DNA, 2647 bp, Heterodera glycines
aaatcaaaaattgttcggagataatgctatttttggacttctctcgccatacctaagccgcaaaaaaaatatgtaaaaacataaaaatccgggccctagcgatcactgatctgcaacgcataaaactatagtgaacaaattttcacgaaaagatgataataagaccatatctgggacttagaacttgtatcaaattaatagattaattgttggttaatctctattacgactaacttcaatcgtttctcagcaaaatatgaatgtaaataaagaagaggaacgactggaaaagaaagtcaccaaatgggctattatgctaaccagtgaagacaaggtgagcatgggcattcctcagtatgggattttgggtaatacataatactgaaaaattgcggtaaaaaggtaaaacagaaacccataaataattagatggttttgcaaaatataagtcagattcgcaatttagcaattttttttactggatttatttcagagaaagttataacttggaatcgcaattctgcaatactaccgggcccattctgcaatataaccagatattcaaatcgtctccgccgccggggggaaatttgaaaatttgcgtgtaatttgttcacagattttcagcaaaaaaaaggctggtttttgggataataggctcaaattgtaaatggatttctttaaaaaatgataaaatatgtgtcaattaaaaagaagactatgaggaatcatattttctcaataggaaaccaatgagtatacaaaaaggaaattgaaaataaactccaattttcatcaataatttttcactcagacccccattcttaccagtgcttgtttttcccggttgccttgccgggaccgggacctgagcttttcaaaatccggaaccgggacctcgaaaaaccgggaattcccggcctggtcccggtcccgctgcactctagttttttgtatcgttaaagcccagcagaaatattaaaatctatgaacctttgggcttaattttagcacttcgggaaattctttgaaaagaattttctcaaatcagctgaatgaataatgatctttgatcgatttaatagtgtaaaaaacaattttagttatattttggcttatgcaacgccacgttgggaaattgaagaagtaaaagcccattttcaaactaattcttcttttgttgttatttcagaacggaagaaacacaaatcaacattttgtgctataattagggctatacattgtatttttgtgattggatcccggaaaatgcgtcagtaatacagtattttacgtaacaaatacatatataaaaattctttctgaatttttttcaataaaatttttgaaagaaaattaacccaaatccctataaattactactgtaaatgggttatatgttgtaagcttgtttctatatagtgtcacggtaaaaagtatttgagcaaaaaaaaattttttttaaatccgattttctcaaaaatcagtagtggcatatttgatgacgagaaaatcgatcatgacccaaacaacaccttttttggtgggacaaaagtaatggagcaaaacatttatgaacttgggatggtaggtctatgacctatacccacagaaaaacagttcatgaaaaattcgacaattcaaaaatgactgatttctaccgtattttaagggaaaatgatcaaaaatttatcatttttatggtactcaattttgacaccctctctttctctgctggtattagtcctagacccaccattccaaaagtaattcggtagagaattttgtgctctttattacagtcctattgaaatttccagaaaaacccaaccccctaggaatttttttcgaaaatttcccagatttcaagccatttttggctttttaggtcaccatgaaggagtgatctgaccaagttggtagaccttaagatttcaaatcatatcattaccccgcctcgtttcagagattctgtcgctgatgcattttccgttttttcatttctgcgcatatgataatactacatatgtgaagaaaaaggctcaaaaatttgttctgcgttacaattgttgttttggtgaaggtttttggtgcatataaatgcatattttgttgattttaccagaataaatgtatattcactgtttttgggttgaaatcgatctaagggtgggggacgttgatcagaagcgattaaaccggtttttgaaccgattcaaaccctaagaaaggtgcatttaatgcagggcttccatttgttcttatttctaagaaatgttctgattttggggtagcgaccagaaattgttctgatttcttaaatatattcataattttgatattttatggcagaatgtcactattttatcaagaaaatataagatttgaagcaaaatttggttatttttgacaaaaattgttagcaaatcgcattaaaaattacaattttttccctcgcggcgcttatcggcgccaccggacgctctggtccccaaaatttttggaagaagcgggccgcaaaaaagcgtttttaaaaacgaaaataaaagtcgtcgcttggcttttaaatctaaaaattggccttttttggtgaaaatctgtcaacaaatcagagcgaaattaacaaaaaaaatttccggcgggccta

SEQ ID NO: 6226 - DNA, 7548 bp, Heterodera glycines
  unsure (1)..(7548): unsure at all n locations
attcaattacgattgtgccgtgggttcgcttgccattgctccctttgccagattaattgttttgattaattttagatatgcgagaattaataaggtagggaaacatttgaagaaaaaatagttaacatgaatgcgttagtgtggaggatgtgctagaagatgaggacatggccatgggaccgaatggggcattggtctattgcatggaatatttggccgacaatttggactggctccactcgcacctcaacgagggcgaagacgactactttctgttcgattgtccgggtccgtttttagagtttaatccctttataattggctgtaaaataagggccaaatggcggttgtttttaggtcaaattgagctgtacagccatctgccggtgatgtgtcaaattgtgcaggcgctgcgcgagtggaacttcaacgtgtgcagcacctttgtcatggacaccaccttctgcttggactcgaccaaattcatgtcagccactctcaccgcactgtcaacgaccgtttcgctgcaaacgccggcagtgaacgtgctcagcaaaatggacttactgaggccggaggaccgacggacagtcgaagaaattgtggacggagagctccaaaatgcaatggaaaaggtgtaaaatgaatgcaatgcaaagacacacaaataaattatatataattanagcaagggaaaagccaatgggaggaaaagcatcgncaattaacggacgcactctcgacagtaatcaacgactacagtatggtcagattcattccgttggagcttcaggatgagcaatcaattgaaggtggacgaatgaacgaagaataatggggaaaaccccttcgtccgttaattttagaaattctcttggccgttgacagtgcaattcaatatggagaagatgcggaagttaaggtcaaatatccggaggaaagggatcaagattttgaatgacaaatcgatggcagttgttgttgtgtttggacaaataaaaatgggtcaatttctttaatttacaattgtccatttggccggctgttcacagtccgagacgttgtcaggacagaaacggttgaaggttgtccgtgcgtcgtggccgagtatttcgcggtcctcgtgaatacggaaggaaaaggtggacaaatgagtgccgatgaaaaacctgtcatttatttacggatgtcacagaaaatggcatgggtaatttgccttgaatttgcgcaaatccactgaaatttttggggattaatgggttaattgtaaacacggaatgtgtccgacttggtcgattatcgaaatggccgctcccgacagttccatttgctcattttcatcagaaaattttaccattcggacattttgtttcgccaaaagattcgccaatgtttcngacttctgagggggtcgcgtcggtgctaaggaaaacgtcgctgatgtccaatttcgacgcattttgcgcaatcttagaaggggcattgttttttgctgacaatccaaagtgccatcgcttgctttcgacctgtgccgcggcgccttcaattgacggaatttcctcgcgatgggcccacacaaagtcggcccgtcgcaaatgagcgcacaaatagtcggacgtattggccaattggtcggcgcggaaagtgtcgccaatcgaacgaagtcttttggcgtatcgcattgatttccgcgccttccaaaagaaatggtcgccgaattggtcgtgcagaatcgtttcggcacggtcgaccatcaaagaacgacttaaaattgaggaggcaaattccgccgcacttttacacttcgccaacccctcggggaataattgtgcaattgcttctgcgagtgtgctcgactgtccctggatggacagacattgcaaatccttcgcatggaaatggtcagcgtaatcgaagaaatggccgttcctgtgatttccttttttgtttatccttggcaaatgtgtcactttctcttcgttttcccaccatttgtcgccccttttagcgtaatatttgtccgcctcaatgcacgggcgaatgtcgtatttgagagtgtattcgccgccttcggcccatccctccgcgtaatgctgcaaatacaaaacagtgctgacggaagtgccctgagctaatgttgaaaatgactcccggggaggcggtccttttgtccaccttcgaggaactcgtcgaactctatgaccggcacaaagtccgacagactgtccaagtcgaacagttcagaccaacggattttcgtctgccgcggctttgtgcgccaatgccaacagtttccccaaggcggcagcacaagaacaaagtcgaagccttccaatttaattgtcgaattcattccctccacttcattcagtttcacctttctctctgagctgccgtactgtgttggccactctcaaatagacatcccttcgcaaattgaagccctcgccggggttctgtcaaaaatgaacactttgatcagtgttagtctcatattagatttaacccaattctaatatattaattaacaaaagaatcgaaaaattaaccacatcgtagagcaaaaaacgccgttccgcaaaactgaatttttcaccaccggctctaaattgtgccaaagtgacaaaattttcatggttgttgggaaatacgaagtcgataaagagcagaaataccgaaaagatttttaattgggacgaagaaatatccatcgaagaaacggacgaaaaccgaagaaaaatgttgaaggaaattcaaagattcggattctttaaaccatttctgttttattgaagaaataaaaattaaagcctttaatataaaacaatttgagcatatttgacaattggaatttgcttacaaaaaaggaaaaaggctgtgaaatataaaaataaatttaaagtgtcgaaagaaaattggtcctttgccgtctttttgcttttcaccggttttattatgccacttttggacattggctgtccattccctgttcgtcaacaattttcggcaaacgcaccgcagcagcacaaataggcaaaacattccatcagatcggacgggtcgcagaaagcgcagcaaaggaaacagtcagaacacccgctgagatctttgaagggaaattcctttttaattttatgtaaaaacattttcctataattttcctgtaaatttcacttttattttatgccactcaccgccccctttcgttggcgaattctctttcaattctccgctcggagtttcgtttgtcttcggttgtgcggtgattactgcttttgtgtggtccaatcctccgactgtttttccgaagtcatttgctgcgctgttgcttaaccgctgtcctttttcctgctgctctccagaaatgccaggcaaatccatcagaaaataatggcttacaacccagtttaaatctttggttttaaaatttaactgaattaaatcaacctaggtaattttcgtttgttgactttggctgtctcacgaaaaaacagatgaaactcaaaaaaattcaaatacccgccatttggcaaaatgtttgttttattttcgaaacaccgaaattccttgaaagtgaaagagttttttgtgaattttaacgctgtttttgaaaaaatgagtaattttgacgcctttcagatcggttttcgaagtttctgtccatgtgggaacagaatgaactgcaacataacttctcaggttttattttgcttataataaatcaaagtgttgttacttcttgcattttttggatttttaaatcccgtaaaatgcaaaagtaacaaatgactcgtgttttatgtttgtaaatgccgtcgtccgaataaggacgggaacagggacacgcaaatgcaaacattgcgtaaagggtaaacccaaacggctgcgagttgcgtccgaaagcgtcccccaatgaggaaaagtgttcatttgattaacgaattccaaaaaatcaaccaaatctcagaagcactgaactccaacaatgtcaagacccattctcgacgaattaactagggcgctttttgcgcatctccgagggggaaatgcgtgctttgatgaagtaagccaaaagggttggagaaaccctccgacccaacggacggtcggaccgtccggggcatttcatgacggatttgctgggcgagtgatgtcggtgtgggcatgcgaaacgaactgaaaatgcacttttgcaggaaaacgaactcattgaactcttccgacggtgtccccgctgctcgcgcagtcttcgcccgatcattttggacaaatttaccgacgaaaaagatggccaacagtacgagcgaatgtggtggacatgtccgggcatagagcagaaggtaggcatatccatttttgaaattagcttttatcattttgtccactatttgtttctttaggagtgtttcttccccctggacatccccaaggaggtgttctggactcgtcgctccatggatcagtcccttcgtggcattctccctttgcccaacctccatttgttgcccctctctttgcgcgccctttaccacaaactcttcaaaagcaaggtcaacattgagaaaattgtgcgcatttccgccttcgttccgtcggatggacagaagagtgccgtacaacaagcaaattttggtgccgaagaacagccaaaacggcaagaaagtgctcaaattgtgcaggtaaaatctggaaatttctccaatcatttccattttccgaatggtttcccttttcagcgttccgtcggttctgtcggcccttcgcttccgagcactttcccgccacttcctgcctcttctgttcgacatttgccaacccctccctcagttcgttctcacaatcagtgcgcctccctttgtgacggctttccatcgtcgtcaaagcgttgcgaccaacgaacggtgcattcgtagtaagaaattcatccaataatttgagttgattttcccgtttagcctcaaagaaacaatgcacaatcgcctctgttctgccgaaaaagcatccgttaaacgcgacggtcaccgaaaaagcgtcgatttgacttcgaatgcgagtacggcgctggtaaagtgtcattattttctcgttttaatttgcctatttccccagaattctcacatccttctgaatggcaataacgatccgaaatgggtggtcatggtcaattctctcgactcattggacccggagactcgcaaaaagacgagtgttccccgttactattcacagcagcagcacacgcgactgcaagggatgttcagaagcgcaacactcagtccgaacggaaggggagagttggaaaagacagcacacgacggccgttgcccgcgttatttattcgcacgaccaccgctaaatggggaggaaacgacgaagaataaaaagaaaagggtagaagaaaagccaaaagggaaggagaaacaatcgaagaaagaggcgaaaacggacgaaaagggaaaaaacaaaggcaaagacgaattggacgtattcgccgcattgggcacactgcaaaagtcactggtgaccagagacttgatgagccgattctgtggacaacaggtgagagaaaaagagcggaattggcatttgttgctcattttatcgataaatgccatcaaattttgccatttaagcgttcgtcattggtggcgccctccgaagaagcgattgtcagtcattcgacaaaagcggacaaatctatggacaatggctaccccctccgcggcacaaattcctttttgccacaatcgccgtccgttgggccacggtcgactgcaacgccattaacaaattcgtcgggcagcagcgaaagcgacagctcatcgttgggccggtttcgaagaggtcgtcgacaaaaaatacaacttttgttcagtttcattagtcttttaggactgtccattggcccggcatttcccggtatttctgattccgtcgaagacccctcgctggccgagaaaattacacggaattacgaaagtatcttcctaaagacattggagcaggtgaacatcactcgccgttgctctgagacaccgtcggcatcctctccggtaattgcaattaaaatccctcccccattaattgagtgtgcgaataattactaattaatcctaattcctgtaactgtttgcccattttccccttcagctccgtcctcccatttcgccccaatttgtgtcccacgaggcgctcgttgcggaggaaggcaccctcggcgggattccgcacgacttccacttcccttctcaacccgtgccgtcttttcctccgtccgttcgtccgtccaaccaattaacgcccattaattacgccgatggggagaatttgagcacgcgcttcgcgcacacacaaatggaagtgaccgaactaagccaacagcagcaacagatgcccggttttgcattggaggaaatgacggattacgacacttatttggggttcggtctcgaggaggagggcgacccggcgaatttgcacatgacgccgatgatgcccgcgggggaggcggaagacgaaagggactttctccggaaccaattgggcatgctcccctgaggggacggactgtctttttttttgtttgactgtcgcccgtcgttttctatctttttaatcttgtcacaaattttgtttgtttaaccgataattaaatagaaagcataaaatatgcaaaaaatgattctgcgcattttctccatgagtatcagtcgcattttcaatttgtttttggccgccattgcactcggagcatttcccatttctttgggaagagaaaaaaaattgtttaaatttttaagttctttggaacaatttattttattagaattatatccgaacgcaattttcgagtccctcccattattaggacagttattctcaaccacaaattgccggtgattggcacttttggctgtctttttcggtgcccttttccctacctgccaatgttcgtccctccgttggcatttgcttagcgatggcatttcttttctctcctccgttgtcaaatgcgcttttttggtagggccgccgaggcaaaggccgctcaaacggtgtacaaaatggcccaactgacaaatgaacaatgggagggaaatgccattggcaaaagcagcggcggatgagtcaccgccactcacccggcggtcgaagtgccaccattcaatttctgagcggtttcaattaggctttacctccgcttttcctcccttttccgcccttaccgtgtccgccgcactctctcagtgcgactcgcctaaaaagggaccacttctgtctgatcactttgccctatgtttgtttctctctcaattgtcaccattcatctcctccgttcgccgtctctttctgtgcccccaggcatcggttttcgtcgcttctcagccgccaccctccgccgccctttgccttcttttccctgctngataccacaattgccacaggtcgaatcccaacgagcacaattcatcgaaangtggtgccgctgggccatcgnaaggctggaagaggggcgactgagcagacaaaggcgcgaagacgggtgac

SEQ ID NO: 6227 - DNA, 1152 bp, Heterodera glycines
  unsure (1)..(1152): unsure at all n locations
atccggtgttgcagaaaatgttcgggccacacgtgctncaggtactgttcgatgttgatgaatgggtgtttttgttgagttgtttctgtccctttacccatgcgaacggacgacagcccaaccgacggcgcaattccacgcgttcactgaccttcactttgtcattattttaattagtgccattttgctaattgccccgctttcactgacatcctgcgagttgacagccatccgtgcttctgttcgggaaattagtgcttttttgggggattttgcgacttacggggcgccactttatagaagaaatgcctgcaatggtttgggtggttttggccttccttttggctcgctttacctccattcgtccatccaaacttcactcagtcgtgccaaattcgcatttaaaactctgttggacgaactgccggagggaaagtcatgtggcgacgccttgcggaacacgtggccaacgtgggagcatgggacgatctctactcgaccgccgcactgccaaacctttggagcgaaaagcacgcaaaaatgccgtggcattcattccccacaaaacggacccgtaaagacatttcgatgttttcaccgccccaaatgtccatgcccggatcgtaagtgcccaactgctcgaaataggcccggtcgatgctgaacagaccgccagccattgtgggcgaactgcgcgagcagtgcagtggcggagtaattaaggtgctaatgccatgctcacctgattggcgctgttgggacggcactccgtgcgcgcgcaatgtccaatggcacggaatacctttggcaccggggggggggggggagggaattccatccgattggccatcaaagtgccatttctgaactttgtcacttaccaacggaattgcaagttccaattgaatccgcctctgaacagttcgatgcccttctgaagttccgttctcttcgttctttggtttgatcagttcccacctgataggcaaaggttcggtcgttgatcacgtcaatgattggacatgccaccgcccttttctcctcgccaattcgcgccaacaaaggctccaaccatccaacggtgcactgacagaacagagaatggcattccaaggcaatgctttcaaacttaaatacctcaccaatggctat

SEQ ID NO: 6228 - DNA, 1328 bp, Heterodera glycines
  unsure (1)..(1328): unsure at all n locations
tcctattaacaattcttttcgctcgcccgcttcacgacctcgcacccttttttggcattttcttattgtcagacatttcttctcaatatnttaatgacaacaattttaaaaatttatttggcaaacgttaataccaaaataagtgtaaacatataaccatntacaaataaaatcacaaatcaaattcaaagtcgatctttttcatattacaaagtgaaaacaaattaaaaatcctttgcttcttcaattttttactaaacaaaatcaaaaaaacacgtctctttaactatcaaattcttttctctttaacaataacaaattcttttatagaattaacaaattcaataatgaaaaacgcgggaaaaaacgattaaataatgtagaaaagtaaaagcaaaaactttctcacaaacaaaaacgggaatcagaacgctcgttttcctctttctatttattaaatatttgatataataaaagatgggatacaaataaggaagggatgcgagacaaattttctattatctctcgctttcatttcttttctcttatttcttttacttttccacttactctctctttttcctcactccctccctcttccacacacacgcacgcctccaacagactgctgctgcacaacagcacgcgcctgttcactgtctacccctcccacccgccgctgcccgcatcaacagacagtcagacagtgcactatctccctcctccctctacctaaccacaacagcctgggaagagaaatctttttgctttaactatttcttttgcttttttcttttcctatactatttcttttaccttcttctttttcaaaactatttcttttcatctctttttcttttcaatctctcctcacagcaaatacaaaacgccacattcaaaccatgtcacaaacagacaaacactcaactttattatataggattgtgtattctttaagtttgtttaagcaaatattgaatatttttggaattttagtaaattaatttttgtcagtttttagtccatattttggttaatatttggccatttctgagctttttagtccatataatttcgagccctactgatggcactatttagtcatttttaattttattatttgtgaatggcctgctactaatacaccatggatattcgatctgaccagcaccggtatcctttttgcattgtttggacgccaatccccctcatcagttggttatttccctttattggacacattggtattgcaactagcaaaggtataaacaattctttcctttttgcaatattacatttaaggctgcagtttgtgatattgagtatat

SEQ ID NO: 6229 - DNA, 2200 bp, Heterodera glycines
taagcagcgtgaaatttcccttcggaatctgcaaattcctaccattgaaaatctcggagttaccagggtaagacagaaatgctgttgttatatataaagtttaattaataggatcaatttgatgtcattgatttgactgacaataatattcgaaaattggacaatttgccgagattgaaacgtttggaaactctgcttttgcacaacaatcgtgtcgactttatttcaaaggaaatcggagatcaattgacgaaattgtccacccttgtgttgactaacaataacctggcacaacttggtgatattgacgttttggcctcctgccctcgtttggaatatttgaggtgccatttttcgtatgtttgttaattattcaatttttcagtctccaagggaaccctttgacccatttgcccaaatatcgtcagtacgtcatttataaactgaagaatgttcgggtcctcgattataaacgcattcgccttgcggtcagtcattttttggcggggagcgatgtttttcgtttgtttaatcggacagatactacacttaatccccccttaggaacgccaagcagcgaagaaactctttaaaggtgaaagcggtgcgcggctgaagagcgaattggtaaagcgttcgcagcaaatttcggaaggaggcgaagagacggaacagccgccgaaaaagcgcgcgacggaagagcagaaaaaaatcagagtgagttgccaatgagcacagcagcagtacacctagcaaagtgacaagaaaagtaaagtaatattggccatgtcaggaactgatctccggtgctaaaacacttgtggacgttgaacgagtccaacaaatactccaaagtggcgaagccaacgggacagaggagcagcagaacggccaaaatgggacagacgtacacatggaggagcagtagtgattaagagaggacaactttgaccgattgataatgggatttgcttaatttgataaattttgttggaatttttaataactaagttaaaagttaagccgtctttttctatttgtcgtataaatttcttcttaacttattatttaatgaatttataagataaatggatgaacttgttcatttcgaccccagcagtgtgagttttactatttgatttcagtacacttatccatgatagcataactggaaaaagatattcacagggtgtacaaggcaccaacgtttttgtccatttttcaataatttttaaatgagcatccctttctctgtagatttctctcttttcggcaaatgcgttgtccgttgatgatcagagcagcagcactattgccgaagtctgttgcccttctctttctttcatttggtgtgttctttttcaggaaaggcctctttcgtccgagtcacaattagtcgcccaaaagtcaattggcacagatcagacggaacatggcgaaacggacggaaggcgagtgacagagacacctttagggggtgggcgaagatttcatgctttcatcttcctcccccccccccaattcgcctccctattttggcccctttttgttagtgcgcgggagaaggtcactctatttttaatatgtggggaagcccttggcaaaacgaattcgtttagattttccacttaccatcgaagaaaaaacatggaagtggtgcacagacggaatttgatcgaacgtttggataaactgaaggcatcgcacgaagccttcttcacagttccgcaggtcattcggagagactcgattttttgaattgaattttttaagcttaaagccgtctcaaataatcaattgtctctttttctgcgtcggctgctaaagtcagcggacatcaaacagcacatttcaacagaacttttggaaaggattcttttgattgaagaatcgaatgaaaatgcatcagacacagcaaaaatggcattccgaacggagggcgaattgggccaatttgcagatcgactgacatacattgggaagtccgagacacatctgaatttaaatcaacaaactgacgaggaggacgaactaacggacgaagtcagtccatccccaaaaaatacgagtgaaaaaagaaaagtgggagggggaaagtcaaacgagttttggtattataacattgtactttttctattaaggaagttacagaattcgaggatgacgacaacatttttgggccatcggatgagtttacgtt

SEQ ID NO: 6230 - DNA, 1438 bp, Heterodera glycines
gaaaaaggagttaaaattgagggggggggggggggttacgacgaagaagaagaaatgaccaacgaaattgatcaagaaaggtgtttaactgggtaaaatcgagatggcggaaggacagtgcgttttcggagcagccaatgcaaaacgacgaccaattgggggaggggcagcggccaacggagaatagtgcgcggtgccgagcatttctcagtgggccacgacgtgccgtcatacggcgcgattttgacaggtgaacgaagcgatttgatcattgaattgaacagtttttgacatttaacgaattttagttcgctgaaaaaacagcgcaaaagtcggcccataataccaaacaaacggtgcagcacggaacagtacgccttcgcggactgttcgattcactcggaattgtcacttccttccggtgcgctcatttgtttgattattaattaatagggctgtttatataatacatattttttcctggattctccatgctctgaataataggaaaaacatttcttttttgtgtttgcgaacaaaagtgtggggacatttatttacatatatttacatatttctattttctaattatttcggaatttgctacatattttcaactttttcctacatttttgcactttttgaggattttaaattcttatcaaatgccccaagatttcacaaatttttcgtatataccctacacatcgaaaatttttgagaaatttgtagaattgcttgttaaaaattaaaaataattttttattcaaaaaaggagatatcaaaaattaatttgtaaaatataaaaagggatctaagcctatttaattttatggcattttgtgcctatttcaccgtttacaggatttttttccaaaaatataaatataattcagccgtaccattggatgctcaaattatgaaatatttgcatgtcgccgatttcatcccagtggaaattgaaatgagaaggttctaattatatatgaaaacgcccttttaagaatcatgcaaaaacagagcgattgattctctaaacctgacaaacgcttcggtttctgcccaattcttatttttccctcttttaggtttaaaacctaccaaacggcgttgaaaagtcaagaacaactaaatgagctgaagcatgcattttacaatttggaggaggactttcatgaagacgacgacagatttggcactaccgaagctaagggcatcaaaatttcgctgccattccgtaaaatgttaaagaagcgaagtgttattgtggaccaaaataccgagcaaactgacaccgaaagcgacccggaagattatgaatatgatgccgacccatcctcgccacgggaaatgtgcaaattcaaacgacgacggatgacatactcttcaggaacagcgaagccacccaaagtgactaaatcgaaataaacgtttaaaa

SEQ ID NO: 6231 - DNA, 1688 bp, Heterodera glycines
  unsure (1)..(1688): unsure at all n locations
agtgattaggaacgagtgtgtgatcaaagagagacagagagagatcggtgtgagtgagtgatacangagagagtgaatgatcatanaatgatcagagtaagagttagagatcagatagtgattgggacttaataaatgatcaaagagaaaaaataagtgatcacaagttagtgtgttgtgtatgagtgatcgtgttaatgtgcttatgcgtgcacgtggatgtgtgtatgcgcatttacatttagatgtgtgcatgcgtgcgtgcgtgcgtgggtatgtgtgtgcgtgcgtgtgtgcatgcgtgagtgcgtggtgttgtgaaaattttggtgcaaagtgcatttgatgtgcctgaaagtgtaggtgcaggtggttgttaagtgcaaatgtgtgcgtgttttcggtgcagggcagacacaaaattaggtgaaaatgtgtgttatatgcaagcgttttgggtctaggcaggtatgtgtgggtgtgtcaggtacaggtgcaagtgtgtttctttgcaactgcaggtgcaaatacaaatttgatgcaaatgcatgtggttgtgtgcgtgctatggcgcaggtaggtgtgtgtgggtctcaggtgcaggtgcaagtgtgtttgtttgcaggttcatgcgttcagcgtatgtgcaaatgctgtgcgtgtgagtgtatttgtgcaatgtgtgagtgtctgcatgtgtaggtgcagatacgtaaggtgaaaatgcatatgtgtgagtgtatttttggtgcaggcatgtgtgtgtggtcaaattcaggtgcaagtgtgtttgtttgcatgtgcatgcgttccgtgtacgtacaaatgctgtgtgtgtgagtgtatttgtgcaatgtatgagtgtctacatacatatgcaggtgtagatatgtacggtgaaaatgcatatgtgtgcatgcgtttttgtgcaggcatgtgtgtatggtcaaatgcaggtgcaagtgtttgtttgcatgtgcatgcgttctgtgtacgtacatgcgtgcgttctcatgtggtgttgtgcaaagttaatgcaaagacaagtgcgatgtgtgtgcctggaagtataagtgtaggtgcatgtcaggtgcaaatgtgtgtatgtcagatacaggtgcaagtgtgtttgtttgcaggtgcaggtacaattgttgttttggtatgtaattgtaggtattcatgtccaaaagataggtaccaaaaagcaaaatacacataaaaataaggagtttcatatattttttgcaaaaaaatgaaaatatgttaaaaagtagaaatgaatatataaaacaaaaatgatcaaaaatgcaaaaataaaatgaataaaaataaaattttaacaaaaatttattataatttaaaatctccggcaagtttcgctgggattcaaaaaattttaaatgaggccaaaaagattgacccggaaattacgaccgatgacgtaaataaattcctagaaaaacagagaacatacacgattcacaaacccataagaaaaaaattcccgagactaaagacgataccgagcggcttccataccgattggcagtgcgatttgtgcatatttgaccagttgaaaaagcataacgacggttacaaatatctgttggtatgcatcgacgtgctgagtcctaatgatcttcaatgtaccggccaagtcaaagaaagagttacgacatgattga

SEQ ID NO: 6232 - DNA, 3432 bp, Heterodera glycines
cataaaaataaggagtttcatatattttttttgcgaaaaaaatgaaaatattgtaaaaagtagaaatgaatatataaaacaaaaatgatcaaaaatgaaaaaataaaatgaataaaaataaaattttaacaaaactttattataatttaaaatctccggcaagttttgcggggattcaaaaaattttaaacgaagcgaaaaagattgacccagacataacgaccgatgacgtaaataaattcctagaaaaacagagaacttacacgattcacaagccaatcaggaaaagattccctagactaaagacaataccgagtggcttccacaccgattggcagtgtgatttatgcatatttgatcaattgaaaaaacataacgacggttacaagtatttattggtctgcatcgacgtgctgagtcgaatgatctttagtgcaccagccaagtcaaagaagagtgaggacattatcgaggcttttgatcgggttttcgaaaagtcgaaaattatcccgatgaagatatatagtgacagcggactcgaatttcaggcgggaaaaatgaaaaattattttgagggaaaattcatcatcaaaaatgtaatgtatagccccgacctccacgccggcgttgttgaaagggcaaatcgaacaataaaagagcgcttgtacagatactttacaaaaatggacactctacgatgggtcgatgtaatagataaaataattacaaacattaacaacagtgtaaataggacactggggatcaagccaacttcaattacttttgaaaatgcaggaattatttgggaaagattatttggaaatatagaaactcaaaaaaataataaattcaaaattggtgatttggtccgaattacaaaagaaaagggtatatttgcaaagggttatcttccgaattttacggaagaaatttttaaaatttataaaataattaaatcagacccaatcgcttatagaattgaagatttaaatggagataacattaagggaatattttatgatgccgagttggtaagagtttcgaaaaatcaaataaataaaatataaaagaactttgacaaaagcaaaaaataaataatgaataaaataattttcttcgtagtttttggtttggcaatcggccaaataaatagtgattgttgttgcctatctaatgaagagaaacaacaattaaattctgctagaaaaactattgaaaaatgttttcgggatacattccgattaaatactgaagcccgagattttgctgctgcttctcatagggcaattacggaagcagaaaaaattaaagttcgtcatcctgaggcaccgggtatgaaaacgtggttcggtaggttattagaaggggtgagaaaagtacaaggaatttccgaaaaaattaacgaagaaaggcagaaaataggccacattagaaaagaaatggataagtgtttggaccgaaaagatgttttaatgtgtcgtgaattggcagacgaagcgaagggagcattagaaattgttaagcagtatagacaggacgtcggtactgcgtaccgtaacgcctatactcaatctgacctcgggattggggaattggccgataaagtaaagaaaacaatgaaggaatatttatcccgccccggaccttccccaagaccaacatttaaagaccaatttatatctgattaatgtataaaagagaatggaaagataataataaatttttaaaaatgattcaaagaacagaaaaaggaacagcaattttgttggaagcgctcaaaaaagaggctgaaagggcatggaaggaagtttcggtattggcagaggaagccgatgattttgccaaatcttcacatggagcccttaatcgggcaattaaatctcgagaaaaggccccctatgccccaggggttcgagaatggttcgtaaaaatgtcagattgtatctgggaaatttacaccattctggataaaattaatgcagagtctgaaagggttgagaccatgtggtttgagattgaacgttctaaagatttcgatcagaccacaaaacttgaggagaaagtatttaagagtttaaacgaaaccaagaagttgcatttcgagtcccgtcggattcatactaaaatattggagcaagaaagcagaattcagtctatagtgttgggatttattgagcttcacgagtaaaatggaggcaattcagtataattgtcacgtaattaacaaatttgggatcaaaaaaacatattacaaagtttattttttccggtacatctgattatgaatttaaacaatctctagaaaaaatattagaaaatgcatatataaaagaatcaggaatttttaaaacaattctaaaactacaatattctaattttctagtagtcttgccactacgattatcacaggaaaatacaattgacgttcttttagagcagcctatattttcacactttttaccgttggatgataccgtaatttttgaaataacaattgttaattttaataatgacaacaatagaccaagaaattaattttataaagacacaagtcgaaaaggcttggaaaaggggtagaaaattagttagagaagcagataacttggtatcttatgcctatgagctttcgaaaatagctgagaattatattacagaaaatgacccacgaaataatttattattcgaagatttttgaaacggacgagaaagacttggattctttttcagaaaatctcacaagaatataaaaataccgcctttgcaatgagcggatttgagaattgcctaaatacaaaaaatttgatgatttgccaacgagcagagaaaattttgaaaaaaagccaagaattttttgatagctatcaaaatcaactcgcgaatgttagaattgacttagaaaaattaattcaaaaaatacctgagcctaaacaagtagagcgagaaatattctttacaccctaccgtaggagacagtccaaaattaataagtcttatgaaatatattatacaccctattatacaacgacaattaaatgaaatattttacagtccatttaggatggattaaaatttaaaaaatcttaattccttaaaaaactctaaataaagtaaatttgaaatttagtagcacaaatggttgtaaattacgtgctaatacttattattttaaatatatcattattcgtcaaattaaaaaattaaagtaaaataataactgcaaaaatgtgttccaaacacaacaatctttcaaatattcaatctaattaaactatttaaacaattatttcgaattattgttattttctcttttcttataagattttataaattcaatttttttatatttattatattccttaatttttaattatttttcattacttttgattctgtccctaaatttcaatttttttaaattaaatatttccaatc

SEQ ID NO: 6233 - DNA, 1711 bp, Heterodera glycines
tgcagctgatgccgtcggaaaaagctcacgattttttggggaaagtttttttctttcagtttcaccactgattgttgaggcaatttttttcgccaatttcttttgtctacaaacattatttattgcgtttcatcctgtagtgtgtaaaaaattttcagtaaaaaaaacttgttatctgaatatttacaagcaaaatttaagaccatttccaaagaggaaggaacaaaaatttttgcctaaattttatattatattgttgaattgtttgaaatgcatctgttgtctgccgttttgaaatttttcaacttttcgcttactatcggccgaccaaagacaaaaggacaaaaaggcttctcacatccgactcattcttgccactgatgcacacaattgttgttggctgatttggcacctttaggaaatggttcggattataaaaatggacaaaaaggaaaaagaaatgccaaacagggccaaaagatgaacactgaccagccacagctctgccgacaattctccgccatccattggcgtcttcgcgaacattcgccggcggaccgccaatagccgcaggaaatgtgccgatcagtgcatccttaagacgaaacaaaatgaaagcttcacaaattcggtccgacctttgtgcgccgtttgcgcttcgcattgatggcacgctctgcggcaatatctgtgcataaatgccgggttggccgagcattcgctgagttttgcccatgccgaacagcacgggtcgtcgttgaaacagtcgttgctgtggccaattattgctactgattgtgagtttgtgccattctctgctccctttgccattgtcgtcgtcgcttctgtcgaattgaacgccttttgcgcgaaatgccaatcatttcgattaattcgccaatttcaaaattgcctcgactcgccgcgtttgtatctgaggcatcgaaccaatcgcattttggagaagttcggcaaacgattcgccgttgctgtgctgaagggacatcgcctgtggaggctgaaaagcaggagtcaaagtgatcgaaattatcactaatcaatgggatacccttttcgacaattgaatttggcgggcgacgcaacgccaattttggcactcgccctcccagcagcagtcgatcccctcaaatccttgacaatttccgccgattcttatctgggaaaaattatcattacaaacattaattatttcgagagtaatgcccttaatgacattaatttgttgtgtcctttccacctttgacacgcaatgcggagtttcggcgtcccttcggtcgcagaataaaaacggagaaccgcagtcatcctaaaagaaatgttgagaaaaatgcaaaggaaggaaatgccaaggaaaagttgaggaaatgccaaggaattgccgaagtaaatgttggggaaagttaggaaaatgccaagagaaatgtctggaaaaatgccgatccaaatgcaatcacttcaaaactgcaacttgggcgtgctgagaatctgaacaaattgtccgtgtaagcgttggacaaacctaaaaaaggacaaaatgtccagcatttatctaaccatttttggatttaaataattctacgattccaattttggcactgaccatctttgttggtcaaatcgaacggacgcatttgtgcgttggcgaagtgatgctgattggagcactcagaaaagtcgggcggaaaagcct

SEQ ID NO: 6234 - DNA, 3809 bp, Heterodera glycines
aaaaaaaattttttttaaattcaaaatgcaaaattatatctctccctagtgaaaatttctaggtaaagtgataattgttaattcatacaaaatactttgataattaattttttatatcagcaaatgcttgtttatttatagagttgcgtgcactataaaattatatttgtttttccaaggatatatttcttttaaattattttgttaagttttattcctgtacatatgttttttattagtttctttaaattttttaaatttaaagctataatgtaatgatttaatttgtccaagcataaacattttccaataaaaacaaaacttaataaagttaaagctcaaattcactttttggttaaatatatggtatctcgtttaattactttcaaaactccagtattcgaaacatacaatttaataaaatttgatacattatttttaatttttatcttttaattagctcgttttctctaacatgcttttaagagtattatcatatttataacaattttaatattattttattaaatggttcaggaattgtaattgactcattccatttattctcgttcaaagcttccattcgattgttgaagcttatagtctaagatattttaaatatatattttagtatgttttttaattttcaattattttctttacaattttgaattctaattattaatgaatggacactctgatttaaaatactgtttttaatgaaagatttattaattaattattttttgttgcttttcaattttcactaatggctgacgcaaagccagtgtattgcaggcctcgtccggtaccatacaacaccaagttggttgttgacgctgaattggaccgacttttggctgcaaatgtcttccgtcctgttgaccacactcggtgggcagcaccaatcgtggtcgtcaaaaaggctactggttcggcacgtgtgtgtgctgacttttcaactggtcttaataatgttttgctgtcaaatcagcacccgttgccagtgcctgaagacatttttgcgacactaaacggaggacaatttttctctcagatcgatttccgggatgcgtatcatcaaattgaattagaagagggatcaaaagagttgtgtacgatcgcaacgcaccgtggtaattttgagtaccattggttgccattcggagtgaagtcagctcctggctttttcaatccattatggattcgatgttggcagattgtccatttgccattgcttatttggatgatgtgattgttgtgagccggactcggaaagagcattggacacatttaatggaagtcttcaaaagaattgacaattaattttgtttaaacaataagtaattatttaaaaattaattattataaaaataagcccatagaactataaataattaatgcgtttcacaggaaagataataaagttttttgatattttgcagaataatagcgaacttatagtgctatgaactatttaagcaaggttatgataattttttatattacaatttagatataatgtattttcataccatgtatatttttatttaaatttgattttattgcatctttttaacatttttctattaaaaatttatgaaaataaaaatgaaattaaaaaaaaaattaatttctaagataactcaaatatgaaaaaacattaaaagaaattctattattaatttattttttaatgtttcgaggccaaaataagaagtaaatatattgtttcctatttattttcgataaatatttacattcatttttattaaatatgttcagttacaaaattatttttatttaatatgcacagaaaaaattaaattatattcagaaaatatttttcgatgaattaaacagattttattcgtcttaactcctatttttgtaaccatatttcgaaaaatgaagattgacgtctgctttaaaattttgatgaaataattctacgacagagctatagtttgtttattatcgttttttaattgttacttagttctatattttctaatatattcttgatttgactgcattgagttacgtagttgattgaagaccttttaacaatttttttataattaatattagttacaaattattcttttttcaaataggtggataaattttttatttaaaaatgaaattttataattctttatcttcttgagcagccaagtacaagttctttcacgaaatataatttgcttcacacttgacccttggatatgtttattcatcagtatttattatgtaattttcaaaaaaaaatcttttcaaatatatctattgcttttcccgctacatttataaaataaaaattaagctaattgcagttatgttttataacaaattttactaactggaatttaataataaatataatttttatttaataattataaactttcattaaaaaaaatgaaaattgcgctcgataaattataaaattttattgtatgaaatttaaaatacaaataattagggatgcgatttttaggccttctccgtaatgggaattacaaaagtaaaatagtcacaaatgtaaaggataatcagattaatttaatattcataaatattattttaatccgtattttaaaaattaattttatttaatataaatattaatttaaaaatttattcattatatgcggaataaataacaattaattacgacattttacctttttttaaaatataaaaataaattaaataaaaaaacaaaaaaaatgtaaagtttacaaagtgtaaattacattgacattcctaaaaagacaattcattgatggctgtaaaaactggagcagctcaaagtctcaatgtattatataaattttacgtgaaatacaaaattaagaatttattttaagaatttgatattaaataatttaattaactattgaacaataaaaatatacaaaaataaatgaaattgatttttttaatataaaattcatcaggaattataaaatgatcaaatacatattatgggactcagttttttttggataacaaaaaaaacctatttgttaacacaaattatggacaaaaaaaaatttttttaaattcaaaatgcaaaattatattattaaaattgaaaatttctaggtaaagtgataattgttaatttagacaaaatactttgataattaattttttatatcagcaaatgcttgtttatttatagagttgcgtgcactataaaattatatttgtttttccaaggatatatttcttttaaattattttgttaaaaatattggttaagttttattcctgtacatatgttttttattagtttctttaaattttttaaatttaaagctataatgtaatgatttaatttgtccaagcataaacattttccaataaaaacaaaacttaataaagttaaagctcaaattcactttttggttaaatatatggtatctcgtttaattactttcaaaactccagtattcgaaacatacaatttaataaaatttgatacattatttttaatttttatcttttaattagctcgttttctctaacatgcttttaagagtattatcatatttataacaattttaatattattttattaattggttcaggaattgtaattgactcattccatttattctcgtttcaagcttccattcgattgttgaagcttatagtctaagatattttaaatatatatttttagtatgttttttatttttcattattttctttacaattttgaattttaattattaatgaatggacactctgatttaaaatactgtttttaatgaaaaattattaataaatattttttg

SEQ ID NO: 6235 - DNA, 2543 bp, Heterodera glycines
actagagatcggaattttgcgaaaatacggataagtatcagtattacgtacttgacatcgatacggattacgtactaaaaatacggaaaatccttagtacgtaaaaatacgaatcggccgaaaaaaatacggactcggatccgtaaaagtacgtatacggatccggtccgtatccgatctctagttagaaccatagaatgataccaaccaagagtggtttaatgttcgagatcagctttttcaccattttcccatttcttttaaatgacatttttgtttgctagtgcaatgtcgtcgacatttccctgttcctcttctgctgcacttatacaaaaggcttcgccgttggcttcctctcactgttttcgatttgatgcacagtcaaaaacaggttgaaaatccatctcattaaaatccctaattgtctaatattttgaaaattcatcagagtttttacttatgatacaattgtacttgcaatccgagccaaaatatcgtgaaaattcgcgcgcattattcgccgccattgaacagaatgaggtaaaagtttgtaaaaattaatttatcatgcaaaaaaagggcatagacttgtacttctggtggtccttaatgggtttttttatgtgacaaataatcaccgacaatttaacaaaatgtgcttgtcatggtgctgttcaatgactccctcctttcagaccattccctttcgctacgatgtgaatggaatttcgcacccgcaaagtcttacgaattatgtgagcctttttcgatgctttttcttttcaatatttttgccataattccgcgctctgttcagctcagttccgtcctcccttttgccgcctctttgcccactctcatccaccaattgagtcggctgcagacagccgccaatccctcgccggtggccaactttcttcccgtccgtttctttacctcgcgccgaaatgcactcgaccggcgtgcggaaggtcgaacaaatctgaaacaaaaggggctaaaagccgggagaaattgttcaattttgttgggcggacacagattagttgtatttaaatatgggctgctttcactgtccgtacctcttgctcattgtcagaggttacgcttattgttagaaaaaggtaaaactcatttcagaaccagttcgcagcccctccaaactgcacaccgtggtctcaagacggccgacaactgacgcaattcactcaatccatccaattatgtaatgatgtcattaatatggctacccgtacagcaagggcgtagccagacccttggcgggggctaattctcctctcaagcgacgtcctttttttactccggcctcaattttttgccacgattttccgaaatttttgaagcgtaggttaaggccaccggaaaaatttggaatttgggagcgatttttgagtcaattttgaaaattttaaagcaattttgggtccggtggtgtcgataggcgaattatgagatttttgattacattttttaacagggcttacaattaggcttgattttgaaaaactttgatgtacgaattgccatttatccctcctctgttttcattggtgcccccattttgttcagggcattgcaaagtcgtgaaattggtcgctgtgtgtcgatgacgccgcgcactttgtttcgcaaggagttgtacaatttgcatccgcacacgcgcatcctcggccatctctcctccattttttgcgtggcctttgaccgctccggacgatttttgttcactggggccgacgacaatttggtgagcacggaggggagggggcgggcaataataattaagcatattgacgaatcccatcaaaatgaattattgagtaattaatcaataaaaaatttaagaaaaaacattgcaatgttaatttttctttaattaacaattaaccaattgtttttcaaaaattcaggtcaaagtttgggatgctcagcggtgccttcttcgtttcacggtactgaagtaaaaaaaaaaatcggtaacatattaaaatggcacaaattatctaccaataaattatttcataagccgcaacagagacgaaaaaaaaatccaaaaacttttcagttccgcggccacagcggtgagataacggacctttcggtttcgtacgacaacaatttgctggccagcggttctgtggacaaaacgatcaggtgattttgagtgtttgatgtttttttaaatcacgtttcagagtttggtgtcttcgcaaagggaccgcttttcgcatttttcggggccacaccggcacagtgaactccgtccaatgggtccctttgttggccggtccgatgcgctatttgctttcggctggaaacgactgcgctgtgatgttccaacgatacaatgcagaaacgcttgcatttgaggacccacccttcaaattcaacgaacgtgccacggggtgagcgcatagcaccaaaaagccaaatacgacggaatgcacaatttatggggggggggggggatcttttgcttatcataccactttttcggcgcatttttcaaaaaaaaaaatgga

SEQ ID NO: 6236 - DNA, 2201 bp, Heterodera glycines
  unsure (1)..(2201): unsure at all n locations
cgccggacccccttgtcccccaaaaatttnnttttggaacaactgcgccacataaaaaacgggtgtgaaaagcaaaaaaaaaaaaaaaggtcgtcgcccggggggaggtgccccccccccctcaagccaaaatcctgggaccgtccctggtgttgagcaaattttttaaagaaaattaaggattttggggtcctgctgtgtcaattggcaccacctggaaaatttttttaatagatttttcatcgattgatttttaacaattttctccaaaaaattctaattttatgggtttgcgtaaaattcacgcaattttttgggaaatttaggtggtaccaacaaggaaaatcaaaattttcataatatgtttatttcccttacagatttcgagtgtttctttcagcggtgctcggatcatttccggcagccatagcccgggggtaatttggtgatcatcggcgacactcaccagtcactcatgatgtacaaactgagtgcgcaaggcgtcgcccgactgtacgagttccaagcacattcggtaaattaacataatttggttgtttaatttcaattggcattttacattttgattttttaggatcgcattgacactttggtgtggtcgcaccattcactgcgttttgtcagcggaagcaaagacggcaccgccaaagtgtggagtttggacgaggagggacgctgggcacccgtcgaattgaatcccttcccgacggtgcaacaaacaccgcgcgtaacagcgacaacgggcgatggtgaatcaccagcagcagggggtaaaattggcactagcaggcccgtactccgaaaaaatttcgggatggcacttttttcctgaatttgtaacagttttgtgtcaacaaatttttgcaatttggggttatgttctcaaaaaataatggtaaatggggtccggcggtgccggggatgtgcgccttccctggatacgggcctgggcactacaaaatgagtttttgttccttcactttacattttttgctgtagttgcattgccaccgtcgcaacaatcgaccaacagaagggcagccaacgcaaacgccggggcgacaccgaacaacgggtacaaactgacaatgttgtgctggacattggacgacgacatggtgatcagcatcggtgtgtgtttttgtgctggtttaaatgttgttccaatcaaaaactgctgttggggtgtgacgattccctgctgtttcctccctccccgagtttagggtccgactttttgttgcgttgttgggactggcgaaggggccaacttttggccaaatatccgggccatcagaacgacgtgttctgtctgaacgcgcatccgattcacaaagtgaacacacaaaacaattacttggtaaatttgtcaatttaaggaactgattgtgagcgcaggccatgacggattagtcattgtaagttactttttttgaatgtaaataaggcttttgccaattttttactccatttcaaggtttggaatgtttacaatggcaaacaaatgtccaaacatcgcaatgaaaacaacgaccgcgaggcggtggccattttcgacaaccaaatttcggcggacggcacaacggtcgcgtgtgtggacgccatgggccatctgtccatctacggtgtggaccacaaccaggaggcattgaaacggccccacgagcagttctttaccaccgattataagtaagtgtgatgctatttaaaaaaaacaaaaatgaggagtggaagatttttgttttgactgcaataacacggcaatagaattatttggaaaaatactactagtaattcatccgaaattttctaaaaacagaaaagtttttcaattccatttaactcaattttcacattaaaatcaaaatgcatctaaacaatcgaatcgttggatagcaattaaaaaaactcaaagaacattcggtaatactttgatatctccatgtgttttcagggtcgctgaacacgaatccggcatccatttcgctcgatttcgaaagccggatccggattcgaacaaaaagtcgaaaatttaaaattttcaattttccatttttagcctaaaaatggtttaaaatgacttttttattgaagtactaatgatttttagttcgtttccatgtatttaaacaaagttgaaacaaaaatgtgaaattcaaaaaatttgagttttcgacttt

SEQ ID NO: 6237 - DNA, 2062 bp, Heterodera glycines
gggagcagattcttcatccagaataaattttaataaaaatttaatcaattttacccaattttagccccaattgggcgacgaggtggcctactttttgcaagggcacaagacgtacctgaaagagctgaaggaaaatgggatacaagttaccaaagtaatgcagccacggtcagtgctaaaaagaaaagaaaacaaataaagaaacaattgaattcgtcaggcccgatctgaacgcgatggagttttgctttgtggacaagcttgagtgggttcagcattccggcattcacatggcccaccttcggttggcacggtgccagaatggacgacgcattggctcaaccttccaaatattgtatttgcaaattgcaaaattccttcacttcctcttcaaaaatttgttcagtttccacgacatgcaaaatgtgctcgactttctcgttctcaagcagcattttgacgccagcaaacagctgaatttgcagccgggcaaccgagtggagtcaattgtggacgacaaattctacacgggcaaagtgttgcgagtgaccgcggcggagtacgactcttatccaaagtggggaactccaaaaataatacagcaaaacactaacagacaatttttataatttttatttttcttaaaaatttgaattttcaatttcggggagggggtcattaagactttttcctcttccagctctgattggtgcgccgtttgtgtcgagtgggacaacggagaggatgaccgctattcgccttgggacttgcaagcgttgaccaaaggcagaaagtctggtgcgtgcgtaaccgtaaatggatggagtcattattacagccaaacaatatgaaaatgggggcttagaccgcctttggcttattgtcgatagaaaaaattttagggtcttttttctgaaaaattccggttttagtaaattttaaaaaactttcggggaggcgagggggagaccgtgctcatgaaaaaatattttcttttcagaaagtccggctaccaaacatgacactgccaaattgggcgagtaccatccaatggccggcgaatggctcgtgccagaatgggcgcttgccaacgcgccgccacgtgcctccagcagcgccgtttcgtcacggccgtcgaattcgttactgttagcccaggagttgttccagcagcgcatttccaagctgatcgaacagctcagccatgtaaaagaggttatcccttggatattgtttttaaaaatcggtagaatttttgactgtagctaaaagatatactatacattgaattgcttagcttttcgagctttcaactagtaatttctcggggttttccggtaaaattccgttttcaaatggcgttttaaccactactaaccttttggtctgtcgtttaggtgctcccctttttggaaccggtggacctgcacttgtaccaggactaccccacttatgtgttttatccgatggatttgacaacaatccaagagcgcattcacagcaatttctacaggtggggagagaaataatcaaaattaagaattaattaaaacacataaatgttcaggagaagtttggccattctgtacgacgtgcaaatgttgggcaaaaatgcgttggcttacaacaaaccgaagtatcccatcgtgcgccatgcttgcgctctcgtcgaaaccatttttgtgtttatggagtaagaaatatcctgttttttgaattaaaatgggttttttgccatcttttccagggattggaagcaaaacgatcccttgccgatgtttcggcattttgtcgaggccggcaccgaaggcaccaaatattggcagttggatctcctggccacgtcgaacggtggcggcattgggtcaacttcgactttgttcaccaccggctccggcagtgtttctgggtcggcattgagcaacggaaccgccaatcaccaacaaaatgccacttctgcacgtcttcaagtggcaccggggccatcttcttcgtccgcaactgccggattgccgctgtgggcttctgagtgttctgccatggtggacgaattggtgagtga

SEQ ID NO: 6238 - DNA, 4591 bp, Heterodera glycines
acagcgaaaggagggacgacgggtggggggggggacggtaggtgtcaatggcatttggccaactgcgattctgagacaattttaagaagccatcacttttctctttgaagaaaaaagttatggattctttaagttggaacagacgcgcagtcgcatgattctggagggggggggagaagtgaataattaggttactggtaaagcagcggtgtttcaagagcagaaaatgaatggggaacagttttagacagcagcgaattgtcgaatgtttggaataggtaaatgggaagaatggtaacaaaagggaaaaaacagcgcatttataaaggaaaatcgtggaagaaaagggaaaactgacaaaaaaaaaaaaaaattttttttgaggcgggagggattataaaaggtcgactcatgatctaaccattgccattatattctgtattgggcgccggtacgtttggcgccagcatgtttttggctataacttttttctttgtctaccaaatccaacattgtttcctctccctctccaaaaactgtaccgtggcgcgcaaacgatggatacgttcgacgggaaatgcaacgccagcacgagcagagcgcgtgttcttcgatccgctcgcagcaatcttcacttttccaccctttccgcccgccttcacttttccgtccgccttcgctttgccgccctttccgctagccgtcgtcttcgtagtagcttttccggctttcactggagacgccacttgagactcctgactgttggtcgtaccggtcgaagcaacggaggcaccacggttgtcagacattgcgttgttgttgttgttggttgagatagagagagagaaagcaaaatatcagtgagatgagctaaaatttgaaatgacacgaaagtgacgcgcggtaccattacatcactgttgggtggtgggtgaaccatgtatgtatgtttcccaaacggtaacaatttttgagatattttcatttttaaagatatgtttaagagagaatccgagatccctacttatctatgtatgtacaaagaaaggatacaataaatgttttattcatttgtagcagtttagaatttagctagaaatcataaaagttacatcagaatatctgcatatttactacctaatttaactgcgattaaaaaaaagcatttttcatcattgtcaagggtgggggacgcactttcgaaaaagctgtgttcacggatcacgaaaaaagaaatgaaattcacattcgcagagtttgcactgacgctgtttcagtttggcgaaaaaaatggtgcgaggcgaatgagaaattcagtgagaaaactgttcttttatgcagtcggttccaaattagagcgccaaaaagcgaatttttgaaaatttggattttcgactttttgttcgaagtcgagcaaatatgatcgtggaaatgaaatttggaaatatgaacattgaaggcattggcaccatttcaaatgtatcattttagaaattttcagacaaataaaaatgctttttcggtgggtggacccctccccgattctccaatattgtcacggatttttcgaccctgaaaacccttaaaatgtggtttctcttggaggaaaaagctttgtttcatcaggaaattcattgatggacccctaattctccaatattgctttggattcgggttttacaaccttgaaattgcttttcccggggagaaattgaagaggcaaatcaaaaaacaacaacaacaacatgaattgtgagtttatttccatttattttacaagacgactaatatgaacatacaatgcaatacaaatacaatacatattatacagagcatacacacacaataatatcaattggatttcgagttcatccgcttgtagacacacaataatatcatccgttattctcttcgtcgctcagcaccgaaggactcgcattggcattgttgtcgcgctcggctttcgagttcatccgcttgtatcacgtggctttcgagttcatccgcttgtagtacagaaggaatgcgtgcttgctctaaaaaggggaaaagaaattattatttttttcatttgaatggtcgggaacgaaattctcacaacgggcgaaggagcgctgccgcacggaatgcatgcttcgtcgtcgaaactcagccactcccgatcagtgctgatcaaattgatcacggacgatgtgtaatggccactgttcagccgaccgctgtgatcctgaagggggaatggtgaaacataattagtgtgattagtgacaattttaaccaaatttgatcactcaccgttatgccgtagagactgagtgctgtgttgtgatgcggagacttctcgtggagaaagggcgccaggtccaactcggccacatcaaacgttacttcgacctgaaaattgtttaaaaaatcagtgaaaattacgctcaaaaaaaaccccgacggaaacttacgttatttttgacgtagtgtccatcattcagcgaaaatctcttcaaatggacgatcagcaccttcgggatctcccaaatttttgtgctccgtgtcgccggctgtttgcttttgcacttcggacaatcccatttatcctcgagactctgaaaaagggaggggaaatgggatcagacacaaattcaggctgaggtgctgctcactgctgatgaaaagtgcgcctccaggcagtccttgagcgtcaggtcgtcggtgttggtcggcaattcgaggctgaaaaattcaaagggaaattcaaattatggaatttcttttgggtctgtgaaaaactcaccttagttggttgacgacctcgaagcgaacactcgtcgtattgcacgtgctgcattggaccatggagatgtttgtcagctgaacaaaagggaaaatgattagaaattggcggcggacaaacaaaatgaatgatggctccaaactcacgttgaacagatcgttgaccggcgacgaagagaacagtttcgacctctcattgaaatccgaagcgctggcgcccaaatcggtgtcgtcgtagttctgttcaaacgattgtcgcttgttgacctgaaaatggggaggggggagggtgaaaaatggaacataaaatcgcaaaactcacccggttggtgtcctcgtgaagcgcgtccagcagatagagttgaaattcttgggcgtcgtgctgctgtcggtcggccatttcggtgttgacacggcgagcgaagaattcctgggggaaaaaggcaaaaatttgattagaatggattgatcaaaggcacagtcactcaccaggaaggtggtgggccgaagtgcgttgaacttgccagaccagatcaggtcgatgagcgcagagaatgagccggagatcatcccattcgtgccaaacgagttgttcctgaaaagggaaacaaaaaatgaattttatgaaaattcgaagacggcgctcggctcccccctcctgacgcacccattgacgaatcgctgcgcgctcttttcttggaacagttgagaaaatccgggcgtatggaacagtggctgaagagtggcgttcatgaagcacgtatttcccatattgaagaggccagtttgtccgaggggctgaaaaaatgaaagaatgaatttaagccaagttttttttttctggccaagtcagtcccccgaaacccaccgttttcttccactccgaatcgctggcgatcctctgcgctgacatggcatatgcgctcatgaagaagttgccggtgccatcatcagtgctgaaagaggagaaagggacgcgattcatcagacttaaacacaacaacaaaatggggagtgcatgcaattcactgacagaggctgcgctggttgtcgagttggaacaaatggtgctggtgacatggtcggatgagttgttggctgttccgtcacgtcgtccgaagtgggcagtgcctttcgtctgcgcggatggggagggcctgcatggttgccaaagttgccgtccggaagcggtcgcccttgactcgaggcagtcatgtcttattggctacagaaaatgtgaaaaaaatgcgttacaaatacacaacaagtggtgttgaatgtaaagcagcaatagggtaagaaagaaaacatggagtttgaattgacagcgaaaggagggcacgacgggtggggggggggacggtaggtgtcaatggcatttggccaactgcgattctgagacaattttaagaagccatcacttttttctttgttggtcaaatcaaacaaacttggtatcatccgaaggctctaaatgtttcgaaaagatatttgtaagcagttttggaagcgattaagcaacccaccaaaagttaaagcctgaaaaaagcagaaaattcagaatttttttgtatattttttttacgaaatgttggttgtgaatttggtttgactgttagagccggttaaggtctttagaatgatgccaagtttgtttgattggaccaacaaagaaaaaagttatggattctttaagttggcacagacgcgcagtcgcacgattctggagggggggggggagaagtgaataattaggttactggtaaagcagcggtgtttcaagagctgaaaatgaatggggaac

SEQ ID NO: 6239 - DNA, 1048 bp, Heterodera glycines
  unsure (1)..(1048): unsure at all n locations
ttttaatgagaattttttgaaattgggcaaacttgaaggtgtttttgatacaacgancaccaataaaaaaatatgcatttttaagttttaaaaccccattttttggttgtttattgtactttttaggtttatttaagcaaatattaaatatgcacacctttttttgggatttttgggggtttacaacatatattttggcattttttatccatattttggtccatatttggccatttttggcctttttagtccatatttcgggcttttttagtccatatttaatgtccatatttcgcgttttttagtccatataatttacaaccctatatataatgattaaaaaattaacagaaaagcacaccaatgcgaagaaatctttataaaataaaataacaaaaagaaagggaaataaaatctaaaattgttcgaatttaatttccatcggcatcatcagtttcttcaccactcttggcttttgcagactctcaagtatttcacgtacagctggcatttcttactaaaatctgaattacctttttgtttggttagaaaagaacttataaaaatgaaaggaatacttaagctttgattgatgcaattctttcgtctttttactttttttctttactttttttgactacttggcgaaatgtcagttggcgaaatgtcagattttggttaagttggcgaaatgaatgtttttgactgagttggcgaaatggcatccccacaaagtgtccaagccacgaaatgtccaagccacgaaatgtccaagccacgaattgtccaagccacgaaatgtccaagccacgaaatgtccaagccacgaaatgtccaaaagagtaaaaaaccacgaaatgtccaaaagtctaaaaagctcataaaaacccggaaaacgggtctaatttagggttttcggggtcactgagtaagaatacgacctttatataacccatttcctaatcctagacccacacgaataagaaaaaatctcaaaatttgtttaaaatttatgcttttttttactcccagatttttctattcattg

SEQ ID NO: 6240 - DNA, 1785 bp, Heterodera glycines
  unsure (1)..(1785): unsure at all n locations
tatttgtattttccgttatttctttattccttaaatgctttaggcaattccattttatttaaatttggcattatggcattctgaaatctttaaaaaaaagtcacccaaatgattggagattttatgttctcatgtgatttgtaagcaaatttttgtgaaaatgagtcatgacaatgggaacaacgcttttcccgccgcctcgtccatttacccctcccttccgtcggccctttgcgatgaaaagccttcccccgccgccgttttgtcccattgcgatgatatggaaggcatcagtctcttggtaaaagctgcggattttgcagctcgtagacaccgtttccaaaagagaaaggacgagcggacgccttacataaatcacccaatcggagtcgcttttctgctgataaggtaaaacttttaccaggccaattcgaacaaagcgaagtctgccgcttttgcagcgttgccaaagtgtacgaccccgccacattggctgctgcttatctgcacgatttggtggaagacaccaaaacgacgtttgaggagttggaacaacttttcgggagagaagtggcggaaattgtcagagaatgcaccgacgacaaaaacttaccgaaagatgtgcagaggaaaaaacaagtggagaaagcggccggttcatcttacaaagtaaaaagaaagtccgaaaggagaaagaaacattgtgctgattaaggcgaagttggtgaaattggcggacaaattatacaatctgagagacttacaacggacgctgcccatcggatggagcaaatcgagggccagggaatacaccaaatgggcaaaggaagtggtgacccaactcaaaggcaccaacgaagcgttggaaatggcattggacgatgtgatcaaccaattactcgacaagaaataaatgatttcaccggcacattccgactgatttatattgcattcctttcacttagcataagcggatttaagttaccaacgccataatttgactaatgagagccacttttacggagaaaaaattttttgggcgctatttgcaaagagcgctcttttgaattctatcaaaaacaaaagggggaacccttttgttttgcaaaaattttttgagatacaaatccatgaaaatttgatatccggggttttagaggccgctgatcacgaaactgacacctaattcgaggttatggaccccaagaaccccagggaataaattttcatgactatatattaaaaaattttgcaaaacaaaagggtcctccccccttttgtttttactttttgataaattcaaaaccgtccttcttttaactagcgccagcttttnnttattaattgagtccgaacaatgaaccttaaaattccggattggactcttttcgactccgaagccggattcgaacaactcagtttttcaagattgtgcgggatccgcggatttttttttttttcatatattgcaaaagattatgccaaatggcgttattttttaggcgcaatttcaaaaaaaacactgataactagagaccggattttgaggcatatgccttttttttgctaacttgctacggcctaatatgcacgaaaaacgagtttttaacttggtttgaagcttctagcttgaacttttttggtgcctttttttgccttttttgcgattttggtgccttatgccgggcacgtaattttggtgccttttttgccttttggtgccttttttcatgcctttttcagcattttaaaaaaatgggaaatttttaaattttttgcaatttt

SEQ ID NO: 6241 - DNA, 3910 bp, Heterodera glycines
aagcaataccgaacttgtttttattttatattcccctccaaattctattgtctgctaaaatattttttaaataaaagatcaacaaagcacgggcttaaagaacacgattttaataaatttaccattaactaaaatctcttggaactgttttttaggttgtaatgtgttctttctctggaataaaaatggaaatattcagattattgcacaaagctacagatggagttttttaaaagttaagttgaagtaaatcatatagaattaaaatttggccacaagattcaatttcaatatgtgtgaatttatcacttataatcaatttgcctgccaataaaacatttatatagcagagattatatgattgagtgtaaaacaatacatattgcccacgcaacccaacaaaataaaatttatgtgtgtgtatttttagtaatgagaggagcaagcctcaacatagcgtaggcgccaatcattaatacctaaatttcaagattataattcataagcaataccgaacttgcttttattttatattcccctgcaaattctattgtctgctaaaatattttttaaataaaagatcaacaaagcacgggcttaaagaacacgattttaataaatttaccattaactaaaatctcttggaactgttttttaggttgtaatgtgttctttctctggaataaaaatggaaatattcagattattgcacaaagctacagatggagtttttaaaaagttaagctgaagtaaattatatagaattcaaatttggccacaagattcaatttcaatatgtgtgaatttatcacttataatcaatttgcctgccaattaaacatttatatagcagtgattatataattgagtgtgaaacaatacatattgcccacgcaaaccaacaaaaagcccgatgttaataaatttgtaatctcatggccctaattaggagaccaaatcgtcatattggtctatgtttgagaatgcgtcttcttcctcctctttgtcttccgttgcttttctgtcatttgcttcgattggcatgccaatttcatcggtcaaaaaggcagaaggaaattcgtcggaatcgtcctaaagtagtcaattaatgaaacactcaacgttatgtaattgtacaatttacaagtgaaaaaaaaagttcgaatcccaataattagaagtacctttgttggaaacatttaaagctagtaaaagatcttaaatttgggcatttcccttcccatttttggctttttctttttttaagccgcttttgtttgaactgttgatgaattgctaccaaccattcctcccgtggatttcttccattcgataatgtgcagaattacgtattccatcacttttttggccgttatttttccctccgtccgtcgctcacttcgcaaaagtgttttgttaatgtccaaaatctctcccgcctcgcgaatgtacaaatccaattcattttccgcgccttaacaaaaagttcggtcctttggccattccctcgccccgtcacatcgatttgttagctgtgccaattgaatttcgtgggtggcgaatgcgtcgtccaaatcgaacagttccaattgaagcggtgccaactcacgaaattccggcgcaaaaatctgaagaggtcagcgaaggtcgttgtcagccaacgaacggtgaactcacggcaggcgcaaagggcggcattggcacttggaatgccggagagaccaaagtcagaggctcatgcttcagtccgattttgtcatacaaactttgacaacagataaagagaaagaacgaacacagagcaaagccccgcccaatacggtaaaaaccgattcatactgtaaaaattcattcagttttgactgttatcgaacaaactttgagagagaacttaaaaattggacactttaacaaataatgaattgatacagtagatgaatcacaccattcgacaagggtgcagtccgctagcatgtttttcgtccctgcagtacacctaccgtatggcttcaggccaatgctctaggctaattgagctgagagaagtgtcgaacagtttggtgatgtcgccagtgaatgtttgctctatttcactttcctgcaggcacattttcggttggccttttttgagttgtttttttcgattgttcccaaatatatattttttactcgaaagttgtaaattgtcggggatttggtggaagtccgaaatgttcggttcggcggcatcgatttgattcaattcaaagccatcggaaaggaatttgacaatcacttcctaattatatttttgttaatgcttttgcggtttagaatattacaaatatctttgcattatcttctttgccaaagaaagggtcggtgaacatttgaacggagcctaaagaaaaaagggggggaaagtgaaaaatgaaaggcaattggaaaatcggggaaaaagtaccgacaacagccaatttgccacaaccattctcctataaatggaaaaacaattaacaactaattatttgtgcttgatcatttatttgttagtttactttttgaactttgtgaaatgcacaaattggtcgtgaaattgggtagcacacagtgcccgtggacagcacacaaacggagcgacggtcaacgctcaaagtgcagccgaaaggataaacgaaagtcaatgccgaactgagaaaggagggcaaaagtccgcatgagtgagtggtattggatcaattacattaattaatttatttaattagtccgctttgcccccccccaattaattatttaattgatcaacattccccgccccctcccgcaccgaatgttcgtctcctcgtcgtcgtcgtcgtttccgtcccttctaagcttttgtccaaatgcgctgctcctcttttccgccttttgctgttgcatttgctctttcggcaacccttttctgttcctttcggcttctcttccgtggctaattgccttttgaacgcccgcggccgaagggattgcgcgattaatcactccgttgggcaccaaagcctctttgggatcgaaatatttgtggaacattgtccgaatgacgcaatctgacggaaaggcacaaacaatgggcagggatcgacgcatttgctacccgaattaaatgcaatgccaaactcttccaacagaaaattgatgttggtgccattgcgctgctccccaccctcggcacacattacaagcacagagccacccgagtgtatgaatttccgtattaaatcgaactatgaaaatttttggatgttcaaaaagggataaagccacctcaaactcagtgaattttgcacgagggcatggcaacacaaaaatgcggcatttttcaaaggcagattccaccaactcatcgccattgaaactaatttaaaaatgattgtttttttataattagtgaattttaataagtagggctcgaaattagatggactaaaaaacatcaaatatggcataaatatggagtaaaaattcctggaatatggattaaaaagctcaaaaatggccaaatattgaccaaaaactgccaattatccaaaaaattaccattaaaaaaaattttatttactatttggggggtttttgtacatatttcatacatattttagcatttttttttacatattttatttatatatttcgcgatttttcttatataaaaatggaatccctagctattatcctatatgttgatttatagggctgctaattttatgtaacaaaatttgcgaattatgtaaataaaatatgtataaaaaatgctaaaatatgtacggaatatgtacaaaaatccccaaatatgtaaataaaaaatttttttttaatggttatttttggaaaaaattcttcgtcaaacctaatataagaacttaatgccatcgaagtacgcaacataggctta

SEQ ID NO: 6242 - DNA, 2305 bp, Heterodera glycines
cacctcagtgcacacaaaaattggctcggatgttagcaactcagcaaaaatacaaccaatagcccaaatatcaattgcctggggaaaatgaaattaaaccagcaaaaaattacccagttaaactgttgtatagtgtttagaacaaagcaatagctcgggcgcgcgataccaaaaggtgacgacgacggggtcgagctcggacagaggctgaacggccaaataagaggagaaattaaaagataaatgacataaaaatattaattcaggattcgatgcgcaaatgattaatttatttgcaaatttcctcgtaacttttcttggttttattataatgaataatggaatagcccaacagtcattacctttaacggattgtgaaaaactctggcaaacctaaaaccgagcgaaaaaatcaatcaaaggacaaagccactcaccccatgtccgcaattttaacccttccgcgttcaatgcccgtcccctcacccatcacaagaatattagcgggctaaacctataaaggtaattgctaattggtcaattcaaaggactttaaggtcgcggtgcattatccaattgttgtgcaaataatgaatgccgtcgagaatttgatagagcaaacttttgaccatccctttaggcacctgaaaaacaacgtcaaaaaggtcgccgcctgagggtggcaccgcccccggtaggatttgataagtccctgggggtgctgaaaatgggaaatatcagaataaccatcacgggttgtcgcctctgttttgcagatcgatgatatttgataatgtgccaaagatcatgttcagcgtaatcaaagagtagccaaactcttttttcagtggtgagaaagacgcgcagcaatttgatgaggttgggatggcttaacaaaagttaaagtgaaaccaatcgttggaatggagcgcaacttcaattcccttagaagagccacttctcgacaagcagacatcgaaaagccctgacctaaatagtcagggaatttaggaaacaaattaagaaattaaattcgtcattctaattgtaagaatacgaccagaaatcaatgcctgatttagatttagaaatgaaaattcgtatcaccttcaattagtttcagtgcatatgccttgccatccatgccagatggagagttccgtaaaattgctttgtacacatggccttaaaaatatattagcttgaaaattttcttttctgaccataagttccgcgaccaacctgaaatttcttttaaatttaaaattaggaagtaagaattactttgtttccttcatatgtgtaaatgtcttctactttttctcgaattctggaaagctcttctcgaaagttcgtatcaatcatccgttttggaatagaaacaatttaagattcttagaattagttgcgaaggcagccacaaaaaagtgctatgaaattacaatgataaaaaattttaatgtcataaaaagaagtttcctgggcttttcgaggtcgctgatcatgaatccggcatccatttcggccaattccgaaatttatgacattaaaattttttcaaaaattttttcgaaaaaaggggggggggcaaagcacagtattaccttctttctttttagtgatttgtgattttgaatactttaagataaaaagattcaatctcgattttcgcatttcgatccaaataaacgaatcggggtaattcggatcaaaaacgaggcaaaggtatagattattggtcccgaaaattatttttaaataaagtttaagaaaattattttaggggtaatcctgaggcgccgagcacgaatccggtcttattttggctcagtctcgaatcctgaacccggactcgaacaaaagttcgagaattcaatttttcatacttcgcagttttagttcaaaacccggatctataccattgcccaaaaacgaattggggcataatgaattgtgaattttttggtcttttctatcgaattctcttttgttatttgaaagtttcttttctaactcgagatcggctcttccatttttgagggcacctcgtttcccccttcggtgacaaaaaccttcaaaaataattcccaaaaatcgtcattttttacgattttggacaaaaataaataaaaacaatcatgttgcacaacggactcgaacctccgctctttatccctttactatcttacaaaaaccatttccgccacacatgcaacaggagctcatttcctgggtgatatatacagcaggcgaataaaagacctaaatatgggctatagcatagaattgggccattaaaaaatcg

SEQ ID NO: 6243 - DNA, 1742 bp, Heterodera glycines
gaaaaaacctcaaagcctcatttcaaaaaaaaacctcattgacctatcaaaataccacaaaatgaggctaaagcctcacatctgggagccctggttatatgtatgttttagctatggatgacgcggaaaaaccgttagaaattatttcactttgtccgaactgtcacgaaaatggtacaaccaaaatgattgttatcaatattccgttttatcaccgtgttattgttatgtctttcagctgcaatcgtaaacatttattaattaactaatttattgttttcttttagactgtggacatcataatagcaatctccaatcaggggaacaagcgcaggttattaataagatgcaatcccgaaaacccgtaaaacaagtttctatgacattaaaattttgggttttttattcgaaaagggcgcggagcgccatcggtagtattacggttaatttattaaggtttttttatttgtctttaattaaggaatttggtactgaaattgttttgaaagtacaaaagctcgaagacctaaacagaacaattgtgcgttcggagtacggaactattcaaattcctgaattggaactgacaatcccagctaaatcacgttctggaggtaaaaacaaatgacattattgttgggaacatgaaaaaatatttgctgcagatttaacaactgttgaaggagtcgtacaatcagtgagagaggacttacaacattttcagcccgagaggaagaaaacggagccaaatacagcggaaaaaattgaccattttattgggcgactgtccaaacttctttccttgcagtcaagttggaccctggtaagaaatagaaaatgaccaaagtgcgggattttaggcaaaggtcacgaattggtgttccgacgaaaaaagtgttaaaaatttcgcagctattttttctgggcttaaaaaatgcgctgatcacgaatctggactcagattttgaaaatcattgatttttatctatgatttttcatcaactagttaatgtttcgcatttttaaaatttattttacaattaatttgggttagaaaaatgcgctgatcactaacccatttttttaaattcgtattttagttgtaaaactgatttaaagaaacaaaaataattagacacaaatcactgcaaaccaaaattttattctatacagattcgaacataaatatgaagtggtaagcgacctaaaaataacctcaaaaactttaagaaacttcgtgatccctctgggaattgtttcatccaaaatcccgacccgttccacgtcgaccctcgctgcatcacaagtcattattatcggcgattggaagaggacaaattactgggactgatcgatgacgatgcatatgaaatacaaagtgcaaagctttcacaagatgaagttgatgaccgggaatggaagtcatatgaagatgtgaaggctgaagtccttcacttctccactcaatgctcggcttgtggcgcttcttgtgacacgaggatgaaatcgactggtaatttttatggttttcacttggtttgccttcacttgaaaagcactaaaggaaatgaatgaacctttagtgccgtcatgaaggcaaaaaggaaatgtgacgcgtaaaggcaatggtggataattgtagcaccattgtctggtaccgtttcaacattcttacgatgagcattttggatttttttttgatttttctaagaaatttttcattttgtcaaacttttgggggg

SEQ ID NO: 6244 - DNA, 3066 bp, Heterodera glycines
tttcaaagagtgacgaatagtttgtgaattatactatatcactctcatattacaaacaaataatgccaaattcttttttgatgggaatcatataaaaaagcagacattcatccgctttgggttttttaaacacacttttgacccttcttcattctccagcttattgggaaaaaagagggagcccatcaatgaatgcatttcataaatgttgtccagaaaattgagggaggtaaactcaacacttgagggattatggttaacgatataatcttaaagatcatagggatgctttaattttggatggaagatttagaatggatgttaaaattaatttttaaaaatgaactaaaacccactggtctaaaacagcaaaaatatttcttaattttttagacattcctcacttccaaacggtcataataatgtctacggattgcgatatctgtggcttcaaatcgaacgaagtcaaaagtggtggtgcaactcaggaaaatggatgtaaattgatattacgcattgcagaggtaaaacgaccgcgttttatgtaaaaattctaactccaatttttaaggctgccgacctttccagggatttgcttaagtcggacacatgtcaaataattatccccgaattggacatcgaaatgggtcaaggagtactgccaagcagattcacaaccgtcgaaggtcttttgattgcaataaaagaacagctggagagacaggcgcctttttttcttggcgatagtgcaacagaggaagaaagaacaaaattccaaaaattattggacagattaagagatgcgattcagattaaggagccgctaacgcttgttttggatgacccagcggggaacagttacctccaggctcgttttcttgcttattcatttatactttttgctttatttcagagcctaactgaccacgtggaagataaacgtcttcaaaaagagttttacaccaggacaaatgaacagaatgaggaattgggattgaatgacatgaaagtggacaattatgaggagttagaaacattgaaggaagatgatgaaatggatgacagatagcatttactcttaaaccgatctttgttttttgttttgatattgatgataattaaaaacaaattagtttgtattatgtttcacagaatacacttatttatccaaatttttaaatctccattttgtcatttcatttttggatttagccttgccgtttcaatgttaacattctggtaatcattaatcaacctcttaattttaaagtggttaaatttagtcccacctgtggcacaattctgactctctcagacggtaaggattactgcaagcagttcagctgtggttcttgctcctatacattgccaatttccaagaaggttttggcttcatttattccttttatatatatttttagctgacaagcagaatatacagcaaaaagaaagaagatgagaagataattgggggcaccgaaatgtgggaaaacgcccaagtgacaaatggtctgttaggctcaaagcagagaaaatgcgcatttgtgtgttcagagcgatgcccaagttgttctcatgacaaggcctacttccagcagatacagacgaggagtgccgacgaaccgatgaccattttttatcgatgtgccaattgtggacacagatggaaggagtaacggatgaaatccgaatttaagtccatgttttttagttagctgcttgttgatcaaatcaaataatattgctataaagggaaatccaatttagcgcttggtaaaatgatgttctaacccagcctcattttttgccattgttaaaaatgcctccaaaagaaaccaatcatatattaattggtaatatttgaaattgattttccgggaaaaaaaaattctttttggttttggggcaaaaatactgctttcaaacctgagctcagaattttgaatttttggtctgtttttggctctaatgcactttatgagtccaaacagagtttatgagtccggtcaaatatttgtgaatccaataaattttaaaattttgattcaactttttgaatcattttattttacaccagtataaatttcactttgtttttcgcaagcgattactgtggggtaaaccatcggatgtacttcgttgatccgaatcacccaagaatgcaggttaccacgcattgcgccccagacatttgcgcttatgtctaaaatcgggttcaaacctaaattttttttcaatccagatagacaatcactttctatcatttgtttaattgcatttgggctattagtttgaaaaaactcagacttgaacccgattttagacaggcgcaaatgtccggggccaatttttgggcactttatgcataccagggatgccatcctgagccccaaaaattttctgacgtcgcaaattaataggttggactcataaaatatctttggactcataaagctaagtgcattagagcctatttcatcaagtataattttcttttatttttcatataaggataacatggaaacaaatttcttaacttttattttccgcagatacatcaattctccggtattacccattaatagggtgaggatttttaggggcgaaaaagtccaaaataggggcaaaaaattcgcgaaataggggcgaaaaagttccaaattttgggatataattttttaaattgcagttttttatatgaaaataatttcaaattaaggcaaacaattttattcactgattgcagttacaaataagatatattttagaaagttttcatttcttatgggtctatttttgaaaaatttagtgtcgattcttaggagtatattttttcgaaattttttggatcgattcttaggggtgtatttttcgtttttattgcatttttgttaataaattttggacaaaacaccaaaataggggtaacttattttacgggcgaacactcaaaatatggatttctagggtcggataggggcgttaaaacgagtttttcgaacaaaaaatgtgtttttcgtaccatttctcgtcgtattaaagccgcggaaaaaataagtaaaaacc

SEQ ID NO: 6245 - DNA, 3758 bp, Heterodera glycines
  unsure (1)..(3758): unsure at all n locations
caaaaaaattttcaaattttttacgtttaaaatttaatacttttcatttaaaattttaaatatttttattttaaaattgtccttaatgaaagataattttaaaactttttatattttagcttccccgcaacaattagtggaaagtgccgccaacaatttgccgcccgcggcgatgaaaaagccaccacattttgtgccgatcaaaccaaatcaccatcatcatcagcagcagcaacagcagcaccctgttgttgaggagaagttcaagcagtacatgccgtcttcatcatcatcgacggcttcctccgccacttcgtcccctgcggcgatgccaccaccagcggtgacgccgaataatgacaacaacaacaacgacggcggcggcggtcggcaccaaacgaacgcgacgacggccacgacggcactggccatggtggcggacgagtacgtggacgtggtgggcgacggagcggagggtcgcagctcgctgatgcgacaccagcgcaaggcgcacatcgaattctacaggtactgtacgggtggtacggtatggtacagggtacagtagaatgtacacgaaggttaagagcagcagaatacaatagaatatgtagaaatgtgcagagtttagtaaagcacctgaaggacacgttacagtagaagaaatagtttgtgcggtaatgaactactgtacattaggctacaggagtacatatgttgaaaaatttttgagttacatttattataaaattgaaaaaaatttccaaaaaaaaactaacctagttttccctctaaatttcctgcgtcgcggatactatatgtggttagaaaacaggaatattatactataagtatgtgattttatgtgatactgtaggtgaagttaatgtcgacctttcccccccccccaaaaaaatatccagaaattttaaattttttttcagaaagctgaaaggccttcgcagtcgaggctccacgctagactgccaacagtgtggccaaacggtggcaaacacggacgcgtgcgcacgctcgcatttgcacgcgcattgcgacgtcgcgcagttcgtgtgcaagctgtgccagcgcgggttcaccgaccagcacttggtgttcgagcacatcaacacggagcatccgaccaaaaaagtgtgtgcttgggaccaggcctggcctggaccaccggaccgtaaactgatggatttccaattacggatgtccatgatccgtaattaaaggcatttttcaattacggaatttcgctgaagccgtaattacggggggcggcaaaaatgccgtaattagagattttgcgtccagcccagcttggggacaagagtcagtcggtttgactcgagaattttcgattagagccccaatactgagatttcagcacgagaatcgagaccaagattctcaaataatctcttcttagcaggccaatttgatcaaaataaatgaccgattgaaaaatcggtctgatcaatcaaaacacaaaagagattgtttgattagcttctgatcaacaaggaacaagaaatcgatcagaaagatgattttggaaaagttctgatcagaggactgatcaattagtcttacaattagtcaaaaaggcctagggattaggcatttaaaaaaataaatatatttttacaatttaaattttaaaaaattttccagaatttaaaaaaatttaaaatttttaaatttaaatttttaacttttccagaatttaaaaatttacaatttatattttgaaattttccagggcacccaatgcattgaggaccggcgcgacatggtccagctgatgcaactgctcacggactgtttcccgcgcattgtgtgcaagaccaaggacgcaatgcaggagcatctagagcgtttgctgagcgccgacacgcagaaacttgctgctgctggtgatgccgtggcatgcacagccgctgcagaaccaacggtgtgcagcaacaacagcagcgatgtaaacagctctactgttggtggcacgtcgtcaatgcagtgctgccatctttgcgtgagttgggcgcgcataaattttttttctacatgaactcattaaacgccttttatagaaagcggacgtgccatcagaacgcacagcactgcatgcacacctgaacgcgcatcccgcattcaggtagcagcgcacactgctgacttgcacaatcacgcacgcatttctcactcttttcagatgcaaaaaatgcaagtttgtctgcatgtcacacgcagagcaaaaagaacaccaacgggttgagcacgggctggacgatgaagtgacagcaaattcgagtaaaaaaaatttttaaaaatatatttttttgaaaatttttcttcaggccaactgccctactgcgtgtccagcgcgcttgaggtgcagtacgacatgctgcgcgcatgctttccgctccaaaaccggcaacagcagcaaagccatagcgcaccaccaccggcgggtgagcatccagcaactgcagatgcttctgttgcggtgtcacctccagcagctggcgcaaagcgcaggcgcaagacgctgaagccggacgactcggcaagtgcggcgtgcggtggcaaacaaaagcggaacaaaaagtgcagcaccgcctcctccatcgaggattaagcagcaattaaaaaagtaatgctaatgatgatgatcaacgaaacgaatgaagaatgctcggctcagggaacagaattattaatcactgattttttgatgagtgcactaattatgaactgatttttgaacaaatttcccccaaccaccttttttaatcatttttaatattttcccccatttttttattagggttggttggtcaaaaaaataaatgaaaatttttcaaaaaaaaaaatatggaaaaaattggttgacatatctcctcggcataatccttaaaattctgtttaaaccgattattaaattggactgatggagaattttttttcaaaatcctgcaaaaaaaattttctttatttataaggaaaatgccatgccaaaatatgtcaaacattcatttcttggacttaatttgtattttcttgagatttatttattatttttatttgaaaacatttttctaaaatgtctgctacttttttgacctatccaattacaaaaaacactgatcaccacctaattttacaaatataatttcataattacctctctaaatttgataaaatggaattaattcagcccacttatttttgggagtaatcaaagcggaacacagatggatattcgggatcataaatttgggtcgagaccagcaggggtagggccggacagaaaaccccgcggtccggtcgcggcttcaattttccgcggtcgcgaattgcggaaaaaacgccgcggatctcgcgcatcgcggtcgcgtcccatccctggtcgcgactcggaagcgaagctaaaaaatcgggaaattctcgaatcaaacaacaaaaaatcccgggactctctggcagtttcaaaagaatgcaaagaaatgatcgaagatcattttgatcagattgatcagctccagaaaaaaactttaataacgaaaagctttgaccagcagaacttaagtggccagacaaattcaattctcattatcattcatacgataagaatgattnggccaaattaggaacgaaattacagacaanaataatataaaaaataaaacttagatgtatacatannttattattcactggtgagccgaagtgacaaagtatcaaatgat

SEQ ID NO: 6246 - DNA, 1221 bp, Heterodera glycines
  unsure (1)..(1221): unsure at all n locations
aattttaattttctttgtattattagatagtccaaagatttctctattattcagttaaatttcgaaaaattttattgaatttcaaaaaaagttaaggtcaaaattgctgagtccaaattttattaaattttttggttacatctttttgtaaatttttgctaaatttttaaaaaattataatatagtagaggcacttagagtgtcgcgaaaccgcgacgagagttggggtgaaggatcgggccaattgtcctttacccggggctcggacgggcactacaatgcccgtaaaatcgatgaggaggaggagaaccgatgggccaccccaggcgcatggtttactgcacccccacgagtctcgggcccgaagaagaagaagccgtggtaccattgatgatcgggaacattcccgttggtcggtcggtcggagcagaagatcggagagatgacgaaacccccgccaatctggcttttcccttccttttcgtccccttcttttttctccctattatttaaatcatcattttccattttatttctcattatctaatttgtctaccatttcacatctgcatttttctccatcttttcttcgccccatttgcattttttccatccattcacattttcaaattccttttgttcggcccgattgggcatccttttctcaaaatgtttaccattatctttttgcccgccatcccctcttttcatccattttctgtactctgatccccccaacatattcagcgatgcctttttccctttgtctctcaaaaattcccacttttctccttattcacgtgtttttgcatattttgctcgggggctatttaatcacagcgcccccctgcttcttgcttcttctcctcttttttctgcgtccactttttgttgatccccaattttgccttctgttgacctatttactcttatcgccaattttttcccctttggcaaataaatttggttgtttggtttgctgtctcttttcggcctaagggacggtcccccccttttttgnggaaactcgccaattctcgtcgtttggggcattcctcgccccagggtccgcgtcgtcgagagcagccaaattcgtacggggtcggatcaactcctctgatccgaagcccatcccctcccttcgcctccccattttggtgattggaatcgggaccgatcccggcgtacgagaaggaggttcactcacttcaaaactgagtg

SEQ ID NO: 6247 - DNA, 2359 bp, Heterodera glycines
aaaagtcaatttaatggctaattttaaaaaagtaaaatgatcgtttttatgtttgatttttttaaaataattttaaacacttagttactaaattaaattgttgagaaaaatagcaaaaaactgagaaaatgtggaacttttattttataataaataaaaaaaataaataattttacattaaatatttcaaaaattaaataaataataaaatactaatggacaattttaaaaatgggaattgattaaattattgtgcgacttattctaaattagttaactaaatagccaataaatgcaaaaaaaacagagaaatgatagtgtggaacttttttataaaaaattaaaaatcaaaaataattattttgaaaaatattttaaaaaataaataataaataatcgctttttgcatgtgaatttcttctttatgaaataaaaactaaaaaaaaattttttcaaatagaaaagtcgattttaaagcaatttcgctcgaggcgagatttggccgggattcgggatctttggtctcaatcccgcagatgattatcccactattgctcactctgaccagttggtggcaatcccactggtcattcaaactgctaatcagtgatcagttgatggtgatcattcaatgatcacctgtcaccgctcccgctcctccaccgatggcgtcgggccccacggcatttgctgttgtttttgtgttgtgccgtcgtcgttcgtcggcaccatttccacacgtatgccgccagcacaaccgcggcaacaccgcctgcaacaccgccgaacagcaccagcacggacagcacaattgttgttgatgatgatgataatattaatgttgctggcagtggcgacggcgtttggacggaaacggcggcgcggagaattggcgacaaataaaaaatgccaattgggcaagaaaaatttgattaaggattatgatgaaatgacaagaaaaattaagcggatatgtttctttattcatttatagggatttcggcaaattccaatttcaaaatttgattgccaatttcagaatttttggagcaaggacccgatttttgaaatttttcagacacttaaattccggatttcaattatttttgggtctctttttgccataaaaaatgcttatttgttagtttcttttttgtaattacataaaataaatttaattaactttttttaaaaacttggtctcggaattcgaacaagaaaaagcacaaaaaattctcaatttgttaagccaaattcctgagccttgtgaatttctttttgaatttgagcaaaggccaaaaataaatttataaaatcaattttttaaataaatagactgaagtttttgaggtcggcccttaattgccactattgtcttggataaaaatgaaatgatggctttttgttctgagccaattaagaggatttttccgattaaaaaagaatcatttataaatttgttaaatgctattgctaaagagcatattcttgtagaaaaccttttaatgagaaaaatataaagcactaaaaataattaatttaatttggaaataatgcaattaaaaaaataaaaaaacaataaatatgccaaaaaattgattttaaaattcgattgccaaatttcagagtttttggcgccgagatccgattagcgaaatttttcaggcctcgagaattccgtttagcgaaaaaataacttaatttaaaatttcaataattaattattaataccccaaaaaattttaaacattatattttatggccctttttatcagaaaaaattgctcattattattattattttctttttttaatggcatggaataaatattatttaataagttaactaaatattggtaaaaagaatattttctcaaaacgtgactaaattaaaaaaaacatggaaccccagcagaaattcaagaaaaaattttttggcatttgcccaagaaccaagcaaaaatttttaaaaaatctatacggttggaaaacggaaattaaaaaaattcggaaaatgacaaattttttcacacaaaattacagtccaaacttgaaaattgtcattacgcctcattgagaaacaatgtatgaccatggattgtgggaccattccgacaaaaattggccaacaaattttttgccttggcaatttgaccaccgccaaaaaagtcaatttgtcatccatcagctcatcagagagcggccaaattgtcctccacttcagcagccgtaaggtcatgtcaaaagcaatcattggcacaatgtttccgcttccgttttggtagtcacagccaaaaaaattttaaaaattaaaaaaaacggggaaagtttgcaaaatgcgaaaaaataaattaccgta

SEQ ID NO: 6248 - DNA, 2194 bp, Heterodera glycines
ccagccaatgtaattcaacaacatttgcgtgtacagaaaagtctgctccgaatggcatgagactcttttcaattcgcggaaatggcgttggtaagactaaattgcgggaaagtcagtgagtccgttatttagccaatgccccgcgggaggaatgaatccccgcctgatgtgtttgaaaagcgtcgtccattgggactcacttcggcccgctgatcgccgccggatttgacgtattccgtcaacaaagtttcaaatgaggcgagaaaaacgcgcgagaaaatgtccagctgaatggagaagtgtttccattagtttggccttcgcttcggccgatgatcacttgctgtgccgcggtgttcacattgctaatttcgtgttggaagcccgcgtcactgatcaatttgatggcgaaggtgagcatcagacagtgcgggaactgctcggccagttcaaagacgagtcgccgccagcactggacactgatcagcatcggaatccaatcgatggtccccgtctcgtccgtctcgaaaatggtgtccaccgcctcgggcgaaaagcgtcgtttgatcatctgacaaatggtcgactcgaaacagtcctttaccaacggacagccactgaatgacaaagcaattaattgaccgcttagccgaaaatggacgtaaaatcggtcactttattttgctctgagcgttttccaagagattggtcatcgaatgttgggaagtgttcgccgcctcttcgccgtcgtccgtctcaaggtcgacgagccaacacgctgaagaagtcgcaaatggcaaagggaagcgattaaaacaaaacggtcactccgtaccgaacaaattggcgaattggccgaagccctggtaattgttggacagaaggtcaaccactctttctgagcaagtgaatgaatgaattgtcttgggtttgggctggacaatttgcctggttggccacccgtttggaagaaggtcaacattgtggcgaccacttcgggttccatcacaaaatcagtcacttaacgagaaaaaacattgacaggacaattgggcgaaagggtggccaaatccaatgaataatccgacggataattgggcaaagggccaattttgacaattctaccgccaaaaagcccataaagcgtggggacggactcgaaaacagctcctcgcagtgtctctgaatgagttcgacgtcgctgggctgtgtgctttcccccgcaatgtccgccgtcgcttcgccttcgttttccctctcaaattcgactccaatttcgtaacttggattcatcaagaaatttgaaaaattaagctttaaatcattttctatgcacataaatatttctaaatgaactataaaattataattaatttaaaggaaaatttaatacgcaaaataattattcgaaatgaaaatgaaacaaacaaacaaaaatagggtaatacatagtttggtttgttcccccccccctcctttttcaaaaaaataataataattacaaaaaatcatgcaatacaactttttattaggttttcattgtcagcattcactgatcggtgttcggtttttgctggcgattgattcttttttttttatttatttccttttcatttgatttttacgaggcctttgtttttttaatttcgtttttctctttcctcatttgtttttctgagaatatctttttcccttctccgatttttatgattctctgccgaccaacaaaattattattctcttttcgcttattttattttgttgattaatttgagaaggtaaacaaatttcattgaagagaattacattgaaagcctaaatattctagatcgtgataactctatgaatggcgtatgggcgaattaattgataacatgtaccgatattcttcctgttctagttatgcgaccacacgcacacaacttgcgtcataacagcgactcacggttccaccgcgcgcaaccgatttcaaatggaagaattccaaaacttccgtgccaacaatttcttcgaggcattgctcttcaactggctaacacgcaacatgaacttaccagccgaagagatttgggcggcacacgaaggctacatccagtcagacacaacagtggaagaagtggcgcaaatgttctaccaagaacaagttgcagataacggacgacaaatcacacgagatcagtatttgaccgaggtc

SEQ ID NO: 6249 - DNA, 2176 bp, Heterodera glycines
aaaaaaacgtacgcggaagttgtagatggtccggatgttgaatggcgagttgaggtgaatctcacgtgtaggcaccgtggcgacatcgtcaggaatgggccctcgggaagcgttggacatgagcgagcgaccgcataactaaaaattggaacaaatttaggtaatactaccgatggtaggacaactcacgaggccggcaccaaaggccgccgctccaagaagcataaaatctcctctcctaatcgatgtcaaagagaatggcgaatttttctcctccttctgacaacactgccccaaaaaaatttctgtccgaccttgaccaactacaaatccccaaagaaatcgactcagacaactccattcccgactactccaagttgcttatcaagcagcttcattcccttttaagcaccgccttcgtcctaattcattcacaggctgcggctgtcgacgcggtcgaggaggaacgacgactgagaactgtcgttgtgacaaatgtgcccgaaagcaaatcggacaaagcggtggagagagcccgtgaggaccgtgcccgttgtggacgaaattttgaatgccacggacgtcgaccaggcatttccctctcctttttttctagaaaatttatgagacaatgcgcaaatgtttataaaagaattgaactttctaccaatgtttgagtaagtgttaaccagcagagaatggggaacagaactgagcgaaactcggcttacaatttgcaaaccaaagcccaaaaacccgaggttttcgacgcccgaagaatttttcaaaaacaaattcccctaataaaattttaatagaggtaaaaaaagaaatgaacgaaaaaaatcatttggggtgtatttttcctgaaacttagggtaatttacgcaaagttcgaagctcataaaaccctaatttgtaagttcacccagctctgatggggaagggaaaggagagtttttgctgtccaacctttgaaatgacaaacaaaactcaaagttggagcaaacccatcggaataagccaactcgtatttgatcagcaaagatatgaacgaacgaacggaaatttgatgtacaaagaaggacaattgacggaatacccaaagaatgcattcgaaccgtgagaggggcgggggaagaaatatcagtggaaatgaaagagaggtgcccggcaaagggcagttgcgcaatgccaagacagacacaattaagagggttattggcaattctctcagcttaattgacactttttgtttggatgaaacaaagtaaaggaaagaagcggagatatatttataaaggaaaattctgagtttacaaaatgagctttaaaagagaaaaccgatggaattaaattgaaataaaatgacaaaataaaattttgttttgtgagtgtgtaccgtacgccatttgtagatatctacagtatgaggagggaagaaaggagtgaacacagtgatcgattgccattgtatttgcttacttatgctaaactggctgcagaacataaaagagacatttagagaaaaggagcatcgcaaatttttgttattatcatggaatcaaaatatacaataaatagagattgtagtgaatgtctgttctgtgtaattatctattgtttctatatgggcagagacggaccatgaattagggcgaagattagaacttcacaagacatttggcggattagaatttaaagatggaaaaggggggagggggcgatgcctccaattgtgagaaggacgcacggaaacattgtttcgtcagaaattgattgccatcatgccattttaccttgattcgttctcgggtggatcattgttcttccgttggattgctcccccttcgatttctcgtcgttcccgcaatttttccccattttgctcttcatttacgggagggatatttgttacgggtgtcgttacatgctctgttaatgcatggtcaggagtccgaagtttggctgcaagttctgagtattggtcgaaccgcccgaagagacctgtcaatccgagtcaaattgatttgaagaaaacccgaaaaattagacaaacggttgagctgctgtttaatgtccgacttcgttttgatgggtcccaatcgtttttcatcatctgtcttttcaacgcgatggctcggtggtagaaaatagagagaattccctaaaaaaa

SEQ ID NO: 6250 - DNA, 1056 bp, Heterodera glycines
  unsure (1)..(1056): unsure at all n locations
cgtgaaatttggcccatttttgcgccaaacattcgccattttaaatttcccaatgctgctcatttggacaatttgcgtcgtcacatttcaccaacaattctcactgatcttgatcagttgaattcaatcgattcctatgctttgttgcccaattcatttgctgatgatggaccaaatgcaactgctggccaagcgctgtccaaatggttgcacactctgacaaaaaatggaaagccaaagcaattgagttgtgattatacgtcaaaaaccaaaagaatgatcaacaatctcaaagaggtgtgacccaatttcgtaaatttggaaaaattgcatttaatttcggtttccatttgttcaggcatttctctgtgccaccatttcttcggccagctacataattcgccttgcgctttatgaatcaacggaaattgagccatttgaattgacgaacgaacggaccaacgaaatgctaacattggagaaagaagaattgggtgagtggcaactgcttttggcatttttaaactgttcaaaagatttaaattgcgcttcatttaggccattgtttccaccacagccaggccaaattaacgcaaaagatcttcttgaaatgaatcccgggcccagcggacagccgaagaaatgaatgaattattagggaatgagatattctgatcgatcattatgaatggtattggctgataattgctcctcatttatttgttccttttttcctttgaatgcatttaattcgttttgctatttgtgacttttatagcggaaatgattagtttaaaatgagtacgatttattcgggtgtactttagtcaacgccccgtaaaaaacggcacaaatgatatacccaatcgattcgtctcgacgagctatgcacgaaaaaataggtctccagttgcggaaatgccaaaaaaccggtttaaaactcgaaaatttgagtgaaaaagtgngcccctgaccctttaaatggtcaaattcgatcaaatttggtatcattcgaaagctcttgatgagttaagtctaaaaaacaaggtctaaatt

SEQ ID NO: 6251 - DNA, 3376 bp, Heterodera glycines
  unsure (1)..(3376): unsure at all n locations
caaattattcaaaanttcgatacaaaaataaataattctcttttgctcacccaatgcaacttctgcgggcatcgttaagccaaatttcgacaatgttcaaatcgtcccgatttttgtctccccagtgaaccgtcgccgtctccccaattggacaccgtttcatcatcaattggaaaattattacatcttcgcttttcatagtcagcttttcttgcgttcgatcattcaccaattcaaatggcacaattgacggtggcgcctcatgaacaggaaaaagaatttcataactgacagaattggtggcatggagaaatttcgaaacaattggaagcgaagagaaaatggcaatcaaaatcagtctcagtcatttgggaaaatgtggcaactgaccaccttgaaagtgttgacccactcgaagtctcgttgtttgttctccataaaaaacaaccgcttcgactgtccatcttttcgcggggtgtgcagccatttggacagcatttggccagcagttgcatttggctcatcatcaaaatcaccaattgcagctgggaaaatattgtcgggattgattgagttcaattgcttgagatcagtgagaattgtgggcgaaatgagacgacgcaaattgttcaaatcatcaccatcgggaaagtccaagtgacaaatgtttggcgcaaaaattggccaaatttcatggaccaaaacattccaaattggctggacaatgtcgttgtcgttatacttccacacattcaaaagcaaagcggtgtctttgtcaaaaatttgcttattggcacggagaaacgcgaggacgaaatgatcgatgtagctgaaagaggaatacttttatcacactataattcattgaattttgatttactcaatccaaattttggtaaagcggattttgttgggcaacggacgatccggcaatgggaattcaacagaattgggatagtcgataaacacacgtaattttggcacttctgcgacacggcccttgtcaattctaatgtcattccaaattgtcaattcgcttttgccgtcaaaatgtttgtcaattaaaacattgaaacgaggcgaaattagtgccaatttgaggccgagttgggcatggtcaaaaaatgggaacatgtccatccaaacatcgttgcaaatccaactgaaatgcgggaaaactaatcagggcaaaggaaaaatttgtctaaatgtccttttaccgtcggttcattttgtggcaattagtagtgatgctcgagagtctcggtctcgagtctcgcctcgagaaaaatctcgggtttttttggtctcggtctcgagtctcggtctcgggttttcaagtctaggtctcgattttcgagactcgagaccgagacttttttacacccctaatgattgttggcctttggtaaacttctattttataaattttaggttcttttttgttcaagttttttaatatatgtgtggtccagcgggttgtgttcttagttttgttacttatttttgcgttggatcgttcccctccaagtattattttttcttctcatttttcaaaattaacaaacacaattttaacaattaaaatcgtaaaaatgtcatttttggactaaatctattaacaaagtgcactaaaaatttcaaaattttctccggcggcgcctaacggcaccgccggcacccaaaactcttacttttattttaaaaaagtagctcaaagacgcaaaatttggtcattttttggaccaaatccgttaacaaattgcagtaaaatttttaaaaattttcccggcggcgcctatcggcaccgccggacccctgttcacgaaacatttttttgaaaaagagcaccacaaaaaatggtgtaaaaaagtcaatcatatgaaaaggaaaaatgtatggtagcttaaataaggaaaaaaacaaaaatttttgagaaaactcaaaagattgatttttttcgatttttaagtgtgtaagaaaaaatttttgaaaaaagtctcgggtctcgggtttttttggtctcggggttttgggtctcggtctcgagtctcggggtcgagtctcggtctcggggtcgagtctcggtctcggtctcgagtctcgggaaatttttggtctcgagcatcactacaaaacatgggcatgaagtatttttgaagcaaaatgtacatttattgtcgcaaatttaaatttgaattcttttggatttttttaaggggggggggggtcaaattcagcctctatttcggtaaaaacccaactcggtttttggccaacgttttaacgtaagaaaattttaaaggctcaaattttcaagtatgcatcaattgcttatttgtcagcaacatgcataaaaaacattctccaattcgaatgataccaaaatgtctttgatggaggcttagaaataaacgaaaatataaatattttctattaatttaaaaaattcagtggttttttattcttgcaaaccaaactcattagcactagtaaaactcgcgtttttcatttaacacaaaccattgatcacttttattagatcataattggtgggaaaagagtaaatgaataggagcaaaattgaacccgaatcggacaaaagatgacattaattatctttgttgtcggttcataatcagagttccttcaaatgaacatgccggatgcctattcttcacaagggatttatatgatccgaacgggcaaatcgcatttgactggaacaacaagcgcactggaagggtcggtaaaccagtgtgttgtcggatacggtttgttagtgcatcggccaaccgctacacccacgcggtccatccttcgtacatcaatgccaaattatcccaatcagtagcctcttggaccagtaaatccaccttaaatatatatgattattgtaaattaggttttgccttacctgttctgctacattggccgtgcctatttcttcccaatcagtggcagccgacgaaggttctttcccagggcactctttgctcgcttcgccctccaaattgagaagtccgggcgatttccgactgcttatgttgcgacgacgtttcagctcaaaacccgagagttttcgaccaattccatacacaagaaaatcaacaagttgttgtcgacttttattgcgcagctcagaattgctctgaaaattaaaagaagaattaagtctctaaaaatgtggagagataaagagaaacgataagggagaaaaagtgtgaaagagagaagagaggagacctgaaggaaggtaaagtccaacatcggatcagatttgagagtgtccataagctgaagcaataagtgtttgtccgtccttagcatttcaatcacgcgttcacttgacaaacgaaaaattccctaaacaaat

SEQ ID NO: 6252 - DNA, 1169 bp, Heterodera glycines
agtttgcagttattttaaaattaacgactaatctaatccttttgtcttaggctacaaaataaaaaacgaaaaacatgcaaaattattcgctgctgaacaattttggctaaatctgaaggcttcctgcttataggaacccaaaggcgcgttcaacacgaagcaaaaaattcctttattttattccaaagctgggctatagtaaatttaattattttttgtatttttacatgaactcagccattgttattatgactcaactgtttacttgcaaccgtgacaatcatttataagataatattttgtcaatatggatctctaatttatttatgaggacatcagagataaaaagttagctgcaacaatgatatccataaatatggccgaatcggaaagtataaggaatattgtcaatagacatcgtagtttgcagttattttaaaattaacgactaatctaatccttttgtcttaggctacaaaataaaaaacgaaaaacatgcaaaattatttgctgctgaacaattttggctaaatctgaaggcttcctgcttataggaacccaaaggcgcgttcaacacgaagcaaaaaattcctttattttattccaaagctgggctatagtaaatttaattattttttgtatttttacaggaactcagccattgttgttatgactcaactgtttacttgcaaccgtgacaatcatttataagataatattttgtcaatatggatctctaatttatttatgaggacatcagagataaaagttagctgcaacagtgatatccataaatatggccgaatcggaaagtataaggaaattgtcaatagacatcgtagtttgcagttattttaaaattaacgactaatctaatccttttgtcttatggcacccctccccatccaatcaaaaattatcgacaaattaatacaaaattaatttgaaaattcaagtgaactattccgagattaggcaaatgagcggattgaattactgaatagctctctgctgatactcttgcaaaacatcagcagcaaattggatcggtcgggggttccgtttttggtccattgggtaattaaatcggtaaatgaatcatacatgtacaaggggtgcgccggcgcatatggggggtgggcgggtaaaagaggggggggggggggggg

SEQ ID NO: 6253 - DNA, 1917 bp, Heterodera glycines
agcaattaccaacgagtgggggggggtgtcgacggaacaatggagaaaaaggggaacgaacgaacgaaaaacaaatgaaagaggggcggaggaggaggcgctttagaaacatttctaaaatcgaacatccgataaaagtttggcgaagtgttccctccgccgatttgcattgtctcaagccgtcctcgcttcaatatgatgggccatgccgaaatgagaatggcaaaaacggcacgagttggagtgggggtggtcggatgcgagcagcgaattgctacgagtgagcggcggctccatttggtcgatgtatttgatcagacgaatgtccgacggaatgaacgggatgatgtgacgctttgacacgtacaaattctgtgtatttgacaaaatataccaacggttttatggccattaaaattatcaaccattccgcccccccccctaaaaatcacttttaccccaaaactaatcacacattgttccacttcatctgatcaatattccctctccgtaaaattcttaggtccaatcactgatcagccccacttatccttctcaccgccatgagtgcccgggattggctttttcttttacaaattatgtttgaattaggcaccccattatcctccaatttcacctcaatgataaacgcgtctctcagtgtgttattccgttgtcttttttggacgagatttgtgtacagttcggacacaagaacaacctgaaaaacaagaagtcacaatgttcaagctgtttagctctcttctttagacctttccgccgaccacagccaacgcggaacgcgcgtcttggattttacggccaaaatagtgaattttgcggatgtattggatgccgacaaggtcaatgcacattgtggtgatggccaaacctatggcggaagggcatgaaaagcaatggaaatgccaaaaggacaacaaattgtgccatggaatttggcatttggcggtgtaaggcaaatacaaatgaataggatgacttcgttgcgaatcttacctaggacgatatagagaaggatcagtgccgtgtaatgctctcgacgtggcattaaatcgccgaaaccgacctttggcagagggaattttacggtgagatacggtaatgaaagatttagcaaaaaattactgtagtcattgtgatgaaagaccaatagaaggaagtgaaaaaactctaaacataacattgactgtgcgtggtgagaaattaaattcgtaagatagtgaaactgtgcctacccatggctccaattgggacatcaaaacgccacctaaaccggaaggaatggcattcatttggaattcgtaaattggcaaaaaattcaaaaaaaaaagtgccgagtgcggtgtagaggaccaaaatggcgagcacaagcagcgcaggaattctaagaacaaaaatggagtgatcggaagaacaagcgaacgaatttaaaggaaaaagcaatccaaaaaggcaaaattaacccgagaagggggacaaaaggaaaggaattcgagagcaattttgaggcttgaacccgtgtcgcaaatcggcacgcacttgcgctcctccaccaattgaatgccgccaccacgcactgtgctgagccctctgtggcggcactttccacagatgcgatctccgtcccgtgccaatgccttccgttgcaatttattggccacaaaatgctacaggaagaaaaaagtttgatcagaataactagatcactctttgaatggccattaggtggcctggtagggtcaataaaaattagtcaccttaaagcacaaatatttgccgtacagccaaaccaaatgttcggagaggaatttgccaaggtcggcaatggtgaccagcgtaagcggaatgccgaacagagagaaagaaatgcacgcgattcggcccagacgagtcact

SEQ ID NO: 6254 - DNA, 1078 bp, Heterodera glycines
tcggaaacgaataaatgaaaaatatcggactgatcagacagactctgatcactgatcaggtcgctttctgctgggcaatcaagggcccaaggcccaaatcccccgtttttcccctcttcccctttttttgcctttttcttaccaaattgaaattgtcacgtttcgcttcacttcagtggcggtcagaaagtgcttttcgaaagcgttgaacaaattgtcgctcatttcgtgcagatgactccgtgccaaatgttcccattcgacgcgcactccgctggcattggaaagcgcgagacgaagcagcgcggaaacgaactgaaaagggtggcgaccaaatggctggcgttggacaaaagagcgcgataccaaccaagtcctgttgacggttgatcaaatccaactgatgtgatcgattggaaaagttatgtgtgcataatggggatgagacaattacggcggaataaggctaattaagcacggagaattttaaaattttctaacttactattaaggcagaacaaatttgactgtatacgagacccattttgggactcagttggactggtgagagaatatttctcgacgcgtaaaggtatttttcagtcccaatatgagtgttggaaaaatataacaaattcaatgtaaatttattaatcaacttgagtggagtctgtttgtgagtgtatggcgatgaattggcttttgcccctttctccgggactgacctgtcgtcgctttgaggcaatttcgtgtgggtgttcaactgagtagaaaatggaggcaccaaagattgtgtaggcgcaagtgagcaacaccagcgccacatggggcagaattagtttggcatactttacaaaggcaataaaaatagagacaggcaaaaaaatatacgggagccgggagcgggattcccgtaaaaatccgtccatttttaacgggactcccggcgggagcgggaataattcgtaaattaattaaatactcacaaaaatatatttaacgctcaaataatgaagggaagcccttttttaagaaaaaagaaatgtaaaaatttaataattagaaatttgaaatttta

SEQ ID NO: 6255 - DNA, 1230 bp, Heterodera glycines
  unsure (1)..(1230): unsure at all n locations
catcgatacgtttctggagaagatcacacacatacctcttcgcttctgcgacgagaacggcatagattccaattctcctttcgtgaaggacggcaaagtgtcgtcgttaaacgacgtaaaggttggcaccgaaagggtcccttcacttttgttgtgactaaacccatcaaaggcgtgccgcttcgagctcggctttctcgacgacaatggctgtggtaagaaagacgactacgggttcaacaaaggacagccgtgtgtaattcttacggtgaatcgactgatcggttgggagccgcaaaagtataaaagcgatgccgacacgccaagcgaagtccgtggtaaattccacgaaggaacggcgatagcattcagttgcaagggaattgtaagtgggcgtttacactgatattcaggagtttctcactattcaattgtttaagtctgaagcggacgaacagaatgttgggcccgtcaaatacattccggacgatggcatccacggacgttactatccctacgccaaaatgaagaattaccatcagccttttgtgagtcgagtccatcgaccgttccctttgagctttccctttgttttgcaaattgtttctccatatcaggcagtggtcaaattcacaaagttgacgtacaaccgcgtcgtgttggtgaagtgcagtgcgtttgcgaataacatcgttcaggacgaggagagcaaggccgggatggtcaccttcgaattgttgcggcagcgctgagcgatctttgttaggctttaattggttcgtccccttcacttcatcttacataacaagttcattcattatccatttaacgttcatcatttaatgtaatgctctgtgtgacttcggacatttctctgtatttatacttaacgttgttttgtacacataaatgtattgtaatagctgtagccagtgctaaatagcgaccgccctcttttttgcccgtatttctattttggactggccgtttcactcaacggatggccatgccaaatgccggtccatttgctgctgatgtgtcctctctttcgtccctaaaaatggaattcactgggttaggtttcaaaggagcgatacgacaatttgggaaaacgcatttaccggcactggcatcattaggtggaccgtaaattcaaaatcggtgcggttttttggaaaaantgattaagatttccacgctatttcaacgtcggttgccatgaatgcttag

SEQ ID NO: 6256 - DNA, 2521 bp, Heterodera glycines
  unsure (1)..(2521): unsure at all n locations
aagtgcgtcgaaatcctttgaccgggcaagcgaccgcccaatnttcgaaatcttacctaaagaaactcgcattcattggatctgtgccatttgggcatcgaattcattaatacatttgtggaaaagcaaaaggtgggccccatttgggttaaattggcgtcccaatttcactaatgccaaattatgttttcaccggttgccttgtcaatttggatgacgtcgccggccgtgattcgctctttgatgacggattcagtcattttgtttccaatgtcgtaaattgcttccatgtccgttgttttcagagtcaatttcccaactcgtggcccggcacccgactggggacggtcaatttcgagttgtacgacctcaccgcaaaggacctgcaaaggcaaaaaagaggttgtgtctgagcgtccatgccattgtcacctcagtctcctctttgattcgaactccaattgcctttcggaatgactgagtcaatgcttcgggtttactcagatccatggaaaacacttcactggccgaaatggaaatgaagggcgtatcgccgccaattgacttcgaaattcccatggccaccgccgttttgcccgtccccggctcgccaacaattagcaaagctctgcccgcaatttgtccatccttaagcaatcgctgatgaaaatagaatttaaattataaattcgactttaatcatgcgaacaatcaatccggctgccttccgtgccgcacattgtccgaccattccatcggaaataaaaattggttcgaaatttgcctttaagccgagaccagtgatatgggaatgtgcaccgatacgttcgactttagacacatttcttatttcgaaattaccaattcnagacatcggaaagaaaagacagaaaatctacctaattaaatgacaatagtagaaatgcataaaataaacacaaaggaaggaatagtatttacaatttgaacgtaattgagcttaacacgcggtattattttaccgaataaaaaccacaattacagtatgaaatattatattaggtttagggattttgtaatttttttaaaatagcgcttgaaaagatgcgcatttctaaaatgtttctttcttttcttcacactattttctcctttattttcatgtttttccttcgctattttcatttttcttgtgatttccttacaagtgactgtctaaggatactgtattttctttgacgccattaatttcctactttcatttgtcattgtttgaaaaaaacgcgttcggtgcactgtttttttagaatttcggttattgttcgaaatttcgggtgtttatggttcgaacttttaaattccttatagttggtttcttactttcattttcaactttatatgattatattttgattggttattgtcctctaaatgtttttcagaaaatgtcaggctcatcatcagcatcaccaaaatccctcaaagttgagctcaaagatgagccaaacactgatgctgttgactctttgaacaatttggaccaaaggaacaacggacattcaaaaaacttgggtaaattttgaaaacgcaaaatttaatgttttttttattattagaacctggcacgtctttcgatgatgatcaatttaccaaaagcaatgaagcagatgctagtcactcttcacatgacgcgcattccgacacaatggatgttggcgagggattgcccattgagtcaatgattgacaaagacagcccaattaagggctgggaaactcctcctcaggcatccatttccgagtttttttgaaatacattttttcaaggaatctgtcaatggcatggttcaacctcgcgttgtgccacccgtcgggaaaccaacacgctggacaaatcaattagacttcattatgaaagacctgctcaaacaagccaaaaaccacaaacacgcatggccttttgtccgtccggttgacgcaatcaaattgagcattccagtaaaaccctaacactaaaccttaacaaactgcaaactcatttataggattaccacaaagtcattaaaagaccaatggatttgggaacaattgaaaggaggctcaaaaacatgtattattactccgccagcgagtgtcttaaggtaacgtctcattgtccacatgcttttggggcacggaatccttaaaattcttccttaaacgcattttgttagacattctcgattctaagtgttccgttttggtgtaactacgccttgcaattagagagaattcggaaaagtcctgaaaaggatgttttctttttataggacatcatgactgtcttcaacgattgttaccttttcaacccaccgcattttgnggtttataacatggctaaagaactcgaacaatttatgctgacganattgactaaaatcccacctaatgtaagttctttttgcaggattttgagcagatctttgncaactgttacaaattcaatcaatgtgaagatgacgtcaccttgatgtgcaagaatgttgaaaatttgtaccgcgatc

SEQ ID NO: 6257 - DNA, 2697 bp, Heterodera glycines
aaaccaaaagatatgattaaaggtggaataatttgttgtttagaagggagtaaagcgaaaagctgacacgaccacttcttttgatgaggaaggaccttcgacaaaacagccaattaaaagagaggtgcgaccgattaagaaaggacctgcgcctgtcgactactcacagctcaagccacttctcaaaggcaaattgaatgagaggatgaaattctgtcataaattactcaatgagctcattacctccaaaagatgcaaggtgagactgacaattgaaaacattgctaatcaaatatttccatcttcatccattagacattcaattggccgtttcttgagcccgttgatgccgaggcattgaacctcccagactatttcgacgtcattaaacaaccgatggatttaagcaccataaaaaagaaaatggatgcacgtcagtatatttctcccgatgaatttcggaatgatgttttattgatgtgccggaattgctttacctacaatcctgaggatcagcccgttcacaaaattggaaaacaattgcaggtgagttaagaactttcattaaattgttaacaacgtgtaaagagttgttcaaaattagtgagcggcgttgaccagatatttataaatattccaaaactgaagtttttagtcgtatttcaatgtgaaatggaggcatttgcctgcagaaatgccgcctgatactgcagaaaaggccgtgccaactttagcactcccaccaaaggaggaaaagaaggaaattctgacaaagacttcaatttccaataagccatcgtcggtttcgccgactgcgcttctacaaaaatttaagcctgtggacgacgatgagcaaattgactttcttattttgcaagtccaagctgaacatgcacgggttactgagaaacagacgcaattgcagcagtactcacacgacctcctccaattaaagtgcataaaatgttaaaaatagttacttttctttttatagaattaggcgccgagaagcacgaacacaacaacagataacgccgccattaagtgctgaatcgcatcaggccattaaaaaattgttgaacgcgtgtcttcccatttcctccattccgacatcgctttcgttgcctcacagcactgcttttttgccttctatcaatgcagttcaaacatccgtcgttgggttgcttcaaccaaatgttcagtcgcaacttcctcccgcaatgcctacgatttcaccgccgcagcagatgaagaaaaaggctgggcccgggcgaccgcgtgtgacgaattctggctcttcggcttttatcggtttgttacattttatcacttataagtagttacttattgtttactattttcttttcgatatttcaggacaaacttctgcagaatcgagcattagtgcaccttcacaaagtcacctttctctttttgatctcccacctgaaaattttattcccatttagctcaaagcgtttccgtctcacaaataaaccaagtccctgtgcaacaacagttccctgctgttgatgctccccatcccaatctgttgcctcagcaacccaatgcgaaatcgggtcgagggagaaagcccggctcaaagaacaagccgaagacggagtctcagaaggaggacacgttgacaaaggaatacgaattcaactccgaagacgagcactcctctgagccgatgacttatgacgaaaagcgacaattgtcgatgaatatcaacaatttacctggcgacaaattgaccaggtcactcactcattcccttcctttcattatgtacttcattcatttgtttgtttagtgttgtgaacataatcaaagcacgagaacaaatcaaagatttgaaccccgatgaaattgagattgacttcgaaacgttgaagccagtcacgctcagagaactcgaggcttatgtgaaggcttgttcccaacaaccggacaaaaaaccgaagaagacttcgacgacctcttaccgttcgttttatttactttcacggtaaaatcagtttaatttaacagcgaaatctttgcatcccgaacacccaaaaaagaaggacaccgatccccaagcacaacagttcaacggaagcgcaccgcctaccggaaaatgtaaatttttgctgccttatttaattaattcagcttgattcagtgcccaatggggacagtggtcaactttcggtcacaagtacgaccacggcctttgctggacgtacgacccaaggaatggtcgcgcagaaggaggacgaaaattcctcttccgagtcttcgagtggttcttcttcttctgagtcggattctagtgactcatctgattcagaatcaggttaggaaatagtcgtcatcttccgcatttactcacttgaaacactagcattaggggagtgacttacgtacgcatttgctccattttcattttctaaattaaagcattaatttgcattgtgtgaaaccgatctatcatttctttaaaactctcatccatgtgattttcttgtacagttttttttttaatttaattttatttgatctctaaatttacaccaactaaaactttgtctctttcccatctcgcaatgcaatgagtctacattttctgccacttgccaaccaaatttccatttttaattatagccgccattgttttttcttgtatgttttcatttcgttttcgttttttaa

SEQ ID NO: 6258 - DNA, 805 bp, Heterodera glycines
actcaattgattccgccaaaaccaacctcgcaaataggaggaggcgtgcaaaaccttgggactgttaagggtattggacattgaacaatttgaattggatgtttggttgcggggtttggttatcaatttgtgcttttagattcggggtcttttgctgccagcaaagtgccccctccggtgcctcctcctccgccgtccatttcctctgccgtcattcccccatccgtccccaaagcaccgagttcacacgtgcacagtggcgcggctccactccttcagacgaacaatcccacggaaattagtgcggggatttccggctccgtgctcgaccatttgttgccgagtgtgacaaacggtgaaaaaggcaccggaggagcggctattggtgctgggttgctgaacaaaaactcgtggagttcattagcacaaaaggcgacggagggcgtgggccaaatgggtcatgcggtcaacgccacaaacgcttatgaactgttccgaaagcaagccagggaaaaggaggaacgggtgagtaaggcggcaacaaataaaaatggaatgaaataaatggtttacaattagaagcgacttctgaaggaggaggaggaaaggaaaaagcagcagcgggagagggagagacaaatgcacacgggcggaggcggggaaagtatttcagcaccaccaaacgatggacaacagcagcagcagcaaccgaagatcaacccggaggaggttaaccgacttcgcgaacaggaaaaggtttcactgttgaggggagaaatggggacaattcgcttcatttggtagg

SEQ ID NO: 6259 - DNA, 1285 bp, Heterodera glycines
caaaaataccaacatttagatccccttggagaaaacccccttatcggaaaatgtcttcctgatcatttttgaagagttcgaacaatgttcggctttttcgaccttttgttcgaactcgttattttcaataacccagggctcccagtcactgtacaaacatttaaagtctcttttgaggtcttagaaatgttctgtgaccggaaatggttaatgaaatttgttcgaactgctaaaagtgggtctaaacgtcgttttggagcaaaaataacaacattttgaccccccttggaggaaccgcctgtctggaaatgtcttcctgatcatttttgaagagttcgaacaatgttcgacttttcgaccttttgttcgaactcgttattttcagcaatccagagctgtcaatcaatttacaagtctttaaactcttttctgaggtcttacaagtgctctgtgagcgaaaataacaaatgaaatttgttcgaactccaaaaagtgggtctaaacgtcgttttggagcaaaaataacaacatttcgaccccccttggagagaccccctatctggaaatgtcttcctgatcatttttgtagagttcgaacaatgttcgacttttcgaccttttgttcgaactcgttattttcaataacccagggctcccagtcactgtacaaacatttaaagtctcttttgaggtcttagaaatgttctgtgaccggaaatggttaatgaaatttgttcgaactgctaaaagtgggtctaaacgtcgttttggagcaaaaataacaacattttgaccccccttggaggaaccgcctgtctggaaatgtcttcctgatcatttttgaagagttcgaacaatgttcgacttttcgaccttttgttcgaactcgttattttcagcaatccagagctgtcaatcaatttacaagtctttaaactcttttctgaggtcttacaagtgctctgtgagcgaaaataacaaatgaaatttgttcgaactccaaaaagtgggtctaaacgtcgttttggagcaaaaaataacaacatttcgacccccctggagcaacccctgtctggaaatgtcttcctgatcatttttgtagagttcgaacaatgttcgacttttcgaccttttgttcgaactcgttattttcagcaatccagagctgtcaatcaatttgcaagtctttaaactcttttctgaggtcttacaagtgctctgtgaacgaaataacgagttcgaacaatgttccacttttcgacttttgttcgaactccttattttc

SEQ ID NO: 6260 - DNA, 3182 bp, Heterodera glycines
  unsure (1)..(3182): unsure at all n locations
agtagataatattcccaatcaaattatcgatgatttttgggttcaaataattttgatggggttctactttttttttctctgacatccccttccacaaacccaaacctattggatggtctcctcgagagagagagagagagagagagagtacattctatgatttctctgactaatgaaatcgactttaatttaatttgttttttaaaatttattaatcgataattttatttgaccccccccccccatacctattggatgatctttgatcccttcaaccgaaacctattggatggacttgtgcgcgagaatttaattaatttaaattttaattaattaatttaaacgagcgagagctgcgcgactatttccgataaattgtggaaaatcaaaaacatggtcgcggtctcgaaccgttgagagtggaagcgaggagcttaaccacttggccacaggggcagttgaaaggtatgggataattgttgactttatgatgaaaattccgaaaaattgtgaaaaatcaaaaacatggtagtggactcgaaccgttgagagtggaagcgaggagcttaaccacttggccacagggtgagttcaaaggaatgggataattgttaactaaatggtgaaaaattttcccctttgcttctcattttataataaatattaattccttaattatattcgtttttatatattaattttctaatatgaaaaagaatattttcaaatgaaaaaatgcattttaaaattactttaagtaaaatgtattaaatcactttattacgctactttatattcatttttatttaattcagattttagacctaatcctgatcatttttgtagagttcgaacaatgttcgacttttcgaccttttgttcgaactcgttattttcagcaatccagagctgtcaatcaatttgcaagtctttaaactcttttctgaggtcttacaagtgctctgtgaacgaaaataacgagttcgaacaatgttcgacttttcgaccttttgttcgaactcgttattttcagcaatccagagctgtcaatcaatttacaagtctttaaactcttttctgaggtcttacaagtgctctgtgagcgaaaataacaaatgaaatttgttcgaactccaaaaagtgggtctgaacgtcgttttggagcaaaaataacaacatttcgaccccccccttggaggaaccgcctgtctggaaatgtcttcctgatcatttttgaagagttcgaacaatgttcgacttttcgaccttttgttcgaactcgttattttcagcaatccagagctgtcaatcaatttacaagtctttaaactcttttctgaggtcttacaagtgctctgtgagcgaaaataactagttcgaacaatgttcgacttttcgactttttgttcgaactcgttattttcaataacccagggttcccagtcactgtacaaacatttaaagtctcttttgaggtcttagaaatgttctgtgaccggaaatggttaatgaaatttgttcgaactcctaaaagtgggtctaaacgtcgttttggagcaaaaataacaacatttgacccccttggaggaacccctgtctggaaatgtcttcctgatcatttttgaagagttcgaacaatgttcgacttttcgacattttgttcgaactcgttattttggtctgaatagggctctaatccattgcgcaagtatttttgacgctttattttaatttgtaattaaaaaaatatatatttaaattaatttttgaatataaatattagaaataataattagcgaatgggagcgccgtagcatagtggttaacgcttttgattaaatgctttggggttctagtccgcacggcgctcccattaggtaggaattaacatcatttcatttcatttcatttcatttcatttcattacattacattacattacattacattacattacattacattacattacattacattacattacattacattacattacattacattacattacattacattacattacattacattacattacattacattacattacattacattacattacattacattacattacattacattacattacattacattacattacattacattacattacattacattacattacattacattacattacattacattacattacattacattacattacattacattacattacattacattacattacattacattacattacattacattacattacattacattacattacacacacacatttttttataaagtttttgttataacaaccaacattttggtatcactacttcattttagtactaatcattgtcattaaatttacaaaagctcgtttttatttatttattatttagtttagattttattaaaaaatgaatcgttttgaccaaaatgatttcactataacttctgttcatcaaatgcgcaatcgccctcggaacacaattggagaaattgcggaagtgagttttgcgccacttgaagaagtagaacggcccgaccgcgtgcttgagcgtcttgtgcgacggttgtttgatcgagtgcttgatgggcgttcggcacctatgctaatcgggcttcaattacacccaccgacctttgaaaacccatttacaattccgcttcgtcctcccgagcagaacaatcccgccgcaattgccgatttaattcaaagacttaacgatcaatctgccgctggcatagatctaacagctggcacaactgtgacaaaagtacttgcggtatggccaatgcaagcagatcagagcgacgctggaagatcaggtttaaatcttttttcttttttttttgcaaaattttttaaataggtgcatgcagtcttgaggatgaacatcgattggtgaacactgttcgctctttgattcgcattaaaaatccgaatgatcgtctttgtttggccagagctgtgttgcttggcttgcatgattggcgggcacgaacaccaggtggcggtggaattcccgctttcaaaagctacgcgaatcgccagcatacccacgggcctgaggcacgtaacttattgcgtcgcgccggaaataccagaaacaagcatatgtacacaattgacgatgntcaaaaatacaagcttggattgatcagcngtatgggcatggagaaat

SEQ ID NO: 6261 - DNA, 889 bp, Heterodera glycines
aatttatttttggtcactcaatggcacagccaattatctgttggcactttactccttttttgagctggttcatcagcttggtcattttctgtttgtgtacaacgcattttctggccaaaatttcatggagtatcgtttgacagcaaaaattttatttatccctgtgattggaatgggtaatttataaaatagaattaataaaaatatgtttaaatttaggtggaatttttccggcaatgtttttcactggcattgatcgactgattgcaattgctttttgggaattgtataaaaatcaataattcctatcgctaattacagtaacttttttagtcacgagtatttggcactgttaactgttatttctgtgtcctatgctgtctgcgaatctgttgaggtgtaccaaaaagcaattatgcatggtgatcagatgaccaccggatcatatttagatttcatgaaagtaattatcgtattgggacatttataaattccgccaggggtaaaaatgaaaaataaaattatacataaggtaatatattcaaaatcttggtaatatttacccgaaataaaaaaatcaataaaaaaaaaatcttcaaatatttacaaaatataattaaaaatgaaagaaagaattcactaatttttgaattttattttgaaattatcccatggcggcggcgcaatttatgaaataccctagcatttatattttttacaaaatataattatttatatttttttagattaaatcattttcaaacataataaatgttttgcttatttcaatgacttgcatcatttatgtttttcttggaattgtggtaaattttcaaaagtcaggtaaaaaacatatccacgtttattgccttggattttgtattgcatg

SEQ ID NO: 6262 - DNA, 5347 bp, Heterodera glycines
  unsure (1)..(5347): unsure at all n locations
gaacttttctttcatttttctatgtcagttaaattattttattttaatttgaacaaaaaatcccttgaagtttgccctttttgagttcaatttttataattcatttagttgatttgaagaaaaggtgtaatttcattaattaattggcaggtgtattgttgggattattcgaatcgttttcttttcattgctactttttagctttaattcattaaatatgatggaaaagccagacagaaagctcattcgtcttcgacattcgctttaaatttatttagaaaattttcaaaatgaatgttacaatgaacaatacggtcttatcattaattaaattaatttaaaatttttatttattttagttttatttgaccttcaaagatgtccctcccagctggtctatgattggttgcgcactgacttatggaatcatcaccacatttggcatcatttttaattcctctgtcattgctgcaacatatttaacaaagtgtgaaattaatgtcgatgaaaccatggaattttaaattatatattaatatttcaaaatgaaccctaattaaggtcattccgtggcaccgccaattatcttttggcactttgctccttttttgaactggttcatcaacttggtcattttctgtttgtgtacaccgcattttctggacaaaatttcattgagtaccgcttggcagcaatgattttattcattcctgtgattggacttggtatttgcacggagcaaattattaaataaacattttaaatacatttaaattcaggggcaattgttccgacgatgtttttcactggcattgatcgactgattggaattgctttttcggaattgtataaaaattaataattcctatcattaattacagtaattttcagtcacgataatcttcaaaagcgactgtatttggcattgttaacaattctttctgtggtctatggtttttgcttctctgttccggtgtaccaaaatgcaactagggatggtgatcagatgaccaccggatcatattttgattttttaaaggttcttgtgtgatcctgatccgataataattaaatatttctctgctttttagagcgcacctatttttgacaaattaagttttttgattacttcaattacttgcattatttatctgcttcttggaattgccgtacgtataaaagcttcaggtaaatcagtcgttcattaagcatttctccggaaaatggtcataaaagcagaccaggattttttgtgccattggcaaaaaaatttcggcatcttttttcttaaaatttgataagttttctaatttttgcaatttttgagttaattctctttttaaaacaatgattcacttgtgcaacattgctattaattacctaattaattgatttttataggtttgccgtccgccgattcgttcaatcgtcgcacttttcgcgcacttttttgcatcatttctgttaatattggcggctatttcttttcattaatttgttacattcttttaattcccaaaatttcgtctccgatcactgcgtggttttgcaatgtaattaccgcaattccaatgaacattggtgcagcgtcaggcggactcattttatattttaccaggtatttttaattgaaaaaatatattaaaaaaaattaatttcaattttagtacggaatatcggcaagcattccaaacagcgtttccatttgttttcaaacaaatttcgaatgtaaatcaagtaattccattgcaaaatggggctcaattaggcaccacacaatgttgaatgatgtcactcagcaaatacaattgccctatcaggtccatataaatggcactgaaattgatacagcttttattgatctgtgaccaagaatcacatcaatttttaaattcttgtatttattagactcatttcttgtaataaatagtaattaaaacaggccgccatttagtgcaattgttaaggaaaaaggttataacactttaaagcacactactgggaattttctctttatatatggcatgtttttttttgcttccatattggccttgctcgctttgtgtgtgtatgacaaaaatatgttggcgaaaatgccataaaataaggcccggcgagttgagcagcggcgagttggctcgcggcgagttggacgcggcaaactgattcagaccagtgtgcaagcactcaagctcttaagcgcaacacgctccagcgaaggggatgcaagtgcgacaaggcagcgaggttcgtcgtcagcaacaacaacaacaatagggcttcatgaatctgcatctgatattcacgaatattttttgccatgactgctttcacaaagccagccatcgctgtaattattggctccgaattcagtaacaaaacgaaatttttttgccaatggcacaaaaaatcctggtctgcttttatgaccattttccggagaaatgcttaatgaacgactgatttacctgaagcttttatacgtacggcaattccaagaagcagataaataatgcaagtaattgaagtaatcaaaaaacttaatttgtcaaaaataggtgcgctctaaaaagcagagaaatatttaattattatcggatcaggatcacacaagaacctttaaaaaatcaaaatatgatccggtggtcatctgatcaccatccctagttgcattttggtacaccggaacagagaagcaaaaaccatagaccacagaaagaattgttaacaatgccaaatacagtcgcttttgaagattatcgtgactgaaaattactgtaattaatgataggaattattaatttgtatacaattccgaaaaagcaattccaatcagtcgatcaatgccagtgaaaaacatcgtcggaacaattgcccctgaatttaaatgtatttaaaatgtttatttaataatttgctccgtgcaaataccaagtccaatcacaggaatgaataaaatcattgctgccaagcggtactcaatgaaattttgtccagaaaaagcgttgtattgtttattcataaaaaataaaaaagtcatcagaagggcgaaaaccacttactctgacgactattccggtaaatgtgtcgtagagtaagtgacaaaatatatggatgatcacaggaattaaaaaaagacaaaaatatgtgaaaataaataataaataaattgaggtcaaagtcaaatgaggtcgaaataccaaatcacttagaaatttgttacattcttgctttcccggtcttacatattaccctagtgaactttaagttttattttaaattgatttagagaatttgtttttattagttctttatcgagttgattccacaattttgttaccctcccagcaaatggaatgaattttttgcccagtttgtattttgtgttaaatctataaaaggggatgttaaagcgtgctgatggattaaaaatagaaaatagtttcagatctgttcggccataaacaattttatgcgccatgaacagatcaaatagctttcgcctattctcaagtgttggcagttgcaggtattctaatcgattttggtatggaattggcggaaggctacatttaaaaaatactcttttggtgaaatattaaaaagtagcaatgaaaagaaaacgattcgaataatcccaacaatacacctgccaattaattaatgaaattacaccttttcttcaaatcaactaaatgaattataaaaattgaactcaaaaagggcaaacttcaagggattttttgttcaaattaaaataaaataatttaactgacatagaaaaatgaaagaaaagttcctttttatgcaataataatataattttattttgctcatttcatcttaatcaaattttgcactttttgttatgtaatggcgtaattaaataaaatgcgactctgagaaaattattttgattaaattttgtaatggaatattaaatgaagcaattagtgaaccagcagcttacactttcagacgttaatttatctgaaaacaaattaaaaatgaattactaacaaatgaacatgaaagcgagtcattaattgaattttacataattccaaggttaaacacctgtattaaaggaaatattagccgaaattcccactttattttttaacttttcatttaaaattataaaatttctatgaaattttagtttctgaagcatttaaatatcaaaaatgaatgacaataacgaagtatgcgattatttgaacatcaccacaaccaccaattccgattcaaataatttaacggcaaaatgtgccgttttggaagcgtcgcaaaatgtgaccattttcgagtggtttttcagctcaatgacgcaccaatttgtggtggcaaaatgcgcttatcaattcaaagtggcgcaagttgcggtaaaattagacatttttaattatacgggtaattaattaattacaaatttcagtcggatttttatcatgacaatgtgctcattttctatgagaaatatccaattatttctccagtgaccgcatggattgtgttgccaaacattttcacaccgatttcgatcattttcaatctttccctcattttggtcacaattacaacaatgtaattaaaatttttaattagttttttcaatatttttcgtttcaggagagatcgaaaagtttgtaattggctgatcgccttcgattcgctgtgccaactcttcgttgtcgcaactttcggcgtcaatttggtcggcgtcattttccagcacagtacgattgactactgtatctgtcttgccactctcatggccgctaccgtagcatcatatgactcaattatggcaatgtttctgatctctgtggagcgattgttgatcgttctgtgtccaatcaggtgactctccttatatatggaatatttattttatatatatatcttttttagaatgaattcgatcaaaaaatcgacagtttgccaatgttcacttctttccgtcattctatgcaccctttttggcttggtaatgaatttggaagtgtttaatatttggacaattattaacatcccttgcgacaggtaattaacatttggtttaaataaaataaaagttattttgaaattatttcaatttgttacggtattcagatgggtttactgtaacagtgggctttatgcggatgttctgaactctgttccctcttttgtcatcctctcactgtgctgcgctaattacgcggcaatttttggcttaattttgtggcgcaattttcnaatganaagaaagaatcanatgaattcacaangttnggncatnnntttaatttctttttttggtttctaattttttgccatttagctgctgatcagtcagtgcgca

SEQ ID NO: 6263 - DNA, 3015 bp, Heterodera glycines
  unsure (1)..(3015): unsure at all n locations
aattgccgagcgcaaacgacgcacgaaagaagcgcaaaaaaaccaaaactatctcaagttggacatagagcaatctgatcgttgcttcaagcaaaaggtgctgtgatttgctactttctcataaaacaatcagctgacaggggaaccaattttctacagtaatttggcacaaaattctgtagatagataaaatactgtattctgtagaaagatttatgaaaaagagcagaaactgtcaccctccactaccggtctcccgccccccacccatatcgtttccccctgaaaatttttaaaaattatcaaaccgaaatttaaaaaaatactctagattttttcaaaaagttaggatggctaattagattttcaaaaatatttccaaaagatcacaaagtatttttcaaatttctttattgaagttttctaagattttttttgaaaaatttccaactttagtaccgattttaggtgctattgtttagccacttttgtgctattggttcctatggcttaaaataattgcatttagtcggctgttaccgtaacgcaagtcaaaaagaatgcgaaaggctcaaagcaattgccaacctctgcttctacttctaaggcggtagatttataattttttttttgcactgtttaattacagtaagcgcctcccatttccaaatttctttagcatgaaagcgttaccatgaaaaaagaagtggccgaagttgacaacgctaagaacgatgagcatggcttagaagggtaagtaatcacttagcatctctaatttttttgcgtcgtaaaaaaattacaatataattgaattgaaaaggccaggattttaaagaggaaaaaaatcaaaaaacggtggtattagttaaggaaaaacgccaagccaaaatggggatgtcattattttaggggcgaaattacaaaacaggcatggacaaataaggagcattaaatgaaaattttattttcattgtttttttttatttaaaaaaaacaaacttcaaaagcctctccatgaccccattttatgaaaagtcgctgcaaaaaaacaaacaaaaatttcataaaaaacaaatatcgattaatttttgacttttttgcgggtaaaaaaattatttttgtctttcatttttaaaatacttaaatttattaatcaccgaacaaaaactattcggctccagaaactgccttattttttagaaatggcagcaactttgacgatgatgagaaaaaggatggcgacgaggacgattaaaaagagactgttgagaatggatttattaaaatgatgaaaatatttattttcttttgataccgtatttttgaattagagccccccccctttcttttaattaaattccttttgaggtgtttaaaaaatagtaccccgaggggctctaattccgtaaatgctgcatttttgtcggcattttccgaacgaatttagcaccgtcactttacggattctttaaaaaattgcattctttgccaaatgtatgagaagatgttgttgcgctcatctatatttttgaataatttatccaatgcttaaattcgttttgtttaagcaaaatgttaccgtaatgcaagaaaccgaacaaaaggcggacggtccaacgcaattctcggccgctgcttcaaagccggtaaattgacaataatggaatatgttccttaaagtagaaaaaatcacaaaaaaaattgatttatcaaaataaaaaaatccgtttcaaattagcatggaaatgacgtcacggaaaaagaagctgaatttgacggaacaaagagagtcgggcaaggctttgaacggtaattaatgccctgctaataacgagtcatctttaattttaaatcataacaaaagttctttttggccgaaataatttttaaactacagaatttaacacaattatactgagaatacaattcttatattctttacaacaactttttttttgtaattcattttgcaaaggtcgaacgagacggaagagccgacgatgccaccgccatttgtcccatgccgacaagcagcagcccatatgtctgattggcaccattttttgtgtttaacaatgcgtcatttgttcaactcttttaggactgacaatggcaccggcaattacttcctcagtgcgtacgaaaagactgcgcagagaattggcaacgattcgaagtggaagaaaagggtacatttttgggggcatcttgttgagaaaatttcttaggcttcaatttcatattttagccacttggtcagaccggtctcatcaacttgggcaacacgtgctttatcaatgccattcttcagccgcttttccatacgcctggcttttctcaactgtttcggcaaaagagtgctcagcgattcgttaatgggtaagtcgagacaattaattaaaaattataatagaatcatttgggtttttcagaaactatggaacgaagggagtcattgccggatcattctccgctctgattgatcagattttgtctggcaatttcaatgcaattcgaccccaagttttcttggtgatttctctgttttgctattttattgtattaccaattttcttgaaggaattctttgctaatgtgaatgccgaattggccaacggacagcagcacgacgcccatgaattcctaatttatttgctgaacgcgcttcatgaagacaccaacagagtggggctttttagagaaaaagcgattttgtgccatttttttacccaactttcagttagaaaagcaacagccatttgatcaaaattacgataacaccgatttgagggccaacgctttcgatttctttgagaagtcaaaactgttcttttcttcgccggtcaacgatctgttcaatgtgaaccgatcactcactgatcactccgtaatgaccgtaattttacctctttcagctcactaccatttctgagaccaaatgcatcacttgcaatgcgtcgagtgttcgttttgagtccgtcaatcaattaaggtgggttttattcgcaanaa

SEQ ID NO: 6264 - DNA, 5309 bp, Heterodera glycines
  unsure (1)..(5309): unsure at all n locations
ttgtctaccaattttgactgtctgaggctcaaagactgtctcgaggcacatttctcatcaccagtatgcagcttacttttagagtgatccccgatttggtaaattatttttcctttntagaatctcaatgatccatgggattgcncaaagtgcaaaagcaaacagccggcgactcggagcacaaaaatttggaagatccccgaaattttgatcgtccatttgaagagattttcgcataatgatggcaactttgtcaaaaatgaggtcgctttccgtcgggcgtcgcattttgtgattttaattttattgtaaaataggctcaagtgactttcgatatgaatgagttggatttgtcgccatatattcacgaaaagtctctgcttcccaacacggcatttactctttatgccatgacggtgaccaaatggctaaaactgtcctaattacgctaattgctttaatgcctttaagaagcatatcggcagtttgcaccttggtcattacacatcgactgtggttaatctgacaagcactgatcagcaatggctaagctttaacgatgagtcatgcattccgtgtgccaccgccccatcgcccacagtgagaatttctccccattcattagggaatcattttgaagattttgtttatctttttcagagcaaagaggcatatcttctgtactacaaactgaccaactcaactaactcacaggccaagtgatattaatattattaatttattattattattatcattattattatttgtacctgtgttctgttcccgataccatccgattgtttctttaaaattaattacccatagttttttttaacctttttttagtcgccagtaatatttaaagacagcgccccctaatgatattaaaacaaaattttgttcaaataaccacttcttaaatgaaatgacaaaaatcttctttaaaatgtgatgaatttaattgagtgactcaaaaattgcattatttctttaaaattgcagaaacgaaggccagggcggcaaaaacgacgatgacgacgaagatcaatctgagatggaaatctttaacagacaaatcaccgatatttgccaaatgttgcttgctcatcatcacaatgaagttgagaaagttggccggctttgcgcacaaatgggcgaagcaattcgccaagtattggccatccaacaacaaatcccaaatcccgacgaagttgaacaacaacatggggaggacaatggcagggacaacagaaacaattgttctttcgacgaagatgaaagtgatggcgaaagtgatgaccccacggtggagcatccgttgccagccgctcgtcgtgtgcttcgtcgtctcaaattgcccacaattcttgacattagtgccgcaaccgaagcagatgtgcaagaatatggcacaaaattaagtgacaccattaaacaaatcaccaaattacgcgttcaaaacggcggagcactgacaagcgaattggaattgcggagcaaacagaaacaagcacaaaatctgctgcaacaaattggcaatttaatgccacaattggtcgttgaagaagaggaagtggcggaaatactcaatttggccgaacaaagcgccgatcgcttttccattggatttctgaacaaggaacagaaaaagcaattcgaagaagcaattcgacaagcaaaaaaggtgtgcaacacaggggaatcaacgtcgggagggagcagtttgacccccccccccccccctcttaaatttccttggctcccggacaatccatcaatggtaaatctctcagcgcaataattattttgtctggtaaatcttaagaaatatttaaataaaaaagtattgagtagctaaaaaagatgaaaaaatccttggaagatttttttaataaagtatttccttataatgtcattctaaaatatttttatcaattgtctgaaaaaaaatttttaccgacggattgaccactgagcgattgtccgaatacctttcttccttcaccatcagtcgagttaagcattttgaaaatgtagaaatccattgatcggctgagtcattaagtttaacaaataataatttgtcaaccaccacctgtaggctttcgagattctgttgaagcataatttggacagtttggtggacaaattttatgaggactgttacaaaaaactgcttcatgttggcaatgaaatattaaaacgagcaaaattgacgaaagagtttgaggccaatatgctaagtgcgcggatcattggactaaacatgcggatggagatggtgagttgagaagacatagatatagcttaacaaacaaaaaaatccaatgaatttttgccggtaatttatgaacatttcacttttttgggtgtgggaaattaacaaggcatgtgaaatggtaccttagacatatttaaacaataagccaaatgtgtggttttcaaagacccgggttttcttggaaaagtattaaaattagaagttcaacttttattaatattttttagttttcttttatttttttaaataatgaataaaaatattttttaaaattatttttgttcgctactgttatttttgggcctttaactttgagaaatgcaggacatgaacagctaaattgcctattcatttgacaggcgtcagaaactgcccacgctttgctgcagacactctcccacaaaacacgtgcggtccggcatttggtacatgaagcacagaaacagcttcacgacattatcactaatgaggcggcaaaagccaaagacgcggacgaaaagcccacgcaatcggcagacaccaccaacatggtgcttattatttagagaccggtgtaataaaaatttattttcgtggaaaaaattatactaaaatggcattattttttaaaaaatttaattttgcaatttacaggagaattccctggcaaaaattcaaccaccatatgcagaaaatgaggacttggcagcactttttgactttgattctcatgtcaaaaatgcatttttgggttttggattgtttaaatgtttggaattggataagtccgagttacgaaatgcctatgaatggctaacagaaaacagaaacaaaatcggaagtcgtcagcacattttgacgttgcaaaatgagtttgaagcaaaaatgttgaagtttcgtatgaacaaattgttgtggaaaatgaaaaggtgggtgatggaagaaagaattgttaaataatttgcaaaatttaaattcctttaaaaatttaaatgtaagaatttaaaatttcacatttttatggcttactttgccctacaatttttcttaacgaatttttcgtcggtttctatccacttttgattagtgattttcggattgtcatttttcgaaagtttgatttgaaaatttattaagatagaatttaaaaaatgataactaatttgaaaaatttaaaaaaaatgaattgaagtttgtctattcttttacgcttaaattgttgggaaaacattacaaaatactaaattaataatttgtacagggttgaaaatggtgaacatgacttttgcaagttggcagaaaaactggcgaatgatcggattcagacggaaaggaatttgaaagtcgaagcagaattgacaaagaaagcagcgatctctgcgcagaatttgggtctgccggttgttgaacacataaacggatatatcgacgcaattaatcgttcacaacaggtgaaaaaaagaaccgaaaaatgttgtgttcatgtactgtatgtattatgatgtacatacagtatgataacacaagagaactcaagaaaactcctgccttaacgatacaatttattagcgaacattagtggttttctttcatttgcgtttaaagaacctgaaaaattctggaaaaccctgtttctatttaaaaaacaggacagggctaaaaaactgctgattaattgaattgatcactaataaaactgtgcccccccccctctcctctctagagcttcgagcgtttgatgggaaaagaagtggtcagtgatgctgatcagttatcatttgaacaactcgtggacaaaatcatgaacgacggcggtttctatgccaccaccgaatgcatgggtaaaacaaatgatgatcaaaaagccaaattaattttaaaataattaatcgaattaaagggggatttttagcacataaaaaatattttttttttgaattttcgccataattttgtgtgttgccaaaattgttaagaaaaatgtataagcgtaaaaatgaaaaatttagtcggacataaaaaatcttttcttcgcgagatcacacaaatttttaatatttttacaattttttactttcaaaaatttatcgcaaaattatataaataattaaaaaaattttaaattttattctaaaaaatttacttttagaaatgtatgaaatttggctcttaaattaaacaaataccaaataattaattattttttaatcattctttatcgtttaaattattttaaatcccaacatttaatttaagaaagggaaaagctgaataaacacaatgcgaatttgcgcgaatggcttatgcaatcgcacaacgaatttctgaaagaaagcgtcgagttcgagcagttcgacgcggaagacataagcgactggtggaaagcatcagcaaacaaatcggaggaaacagccgttaacaaaaacttggcattggtcgcgaaaagtgtcgaagtgatcgcaggcaaattttattcaaattggcaaattaataattacaatttaaatcaattttcattataattgaaaattggccattttttactcaaaaactggtctttgttacaataggttataagccgcggaacacccaattgttggccatctttctgcggatgtttgtgaagatattttgtccggaaatgcgcggtttgatgttgcaagtgtcgaccggcgaaggcaaatcatggattgtcgcgatgttagcagtgattctgcatacgtttggcaagaaggagccactggctgatcagcaggaaggggctcagagtgatcaggaaaaggaaaagcatggtcatggtgaaacaagcactgatcagacggagaaggaacctgcccatggtgcatcagacattgataaaacgaaggcggaagagtcccctcatggtgaattccatgatgaatcaggcactgatcagacggaggaggaaagcattgatcaaacagaggaggaaaagcctgcccatgatgaatcaggcaccgatcagacgaaagaggaaagcattgatctgacggaggaggaaagcattgatcagacagaggaggaa

SEQ ID NO: 6265 - DNA, 1539 bp, Heterodera glycines
agcgtcatagtgtaggaaaaactatcgaggcttcgaatagcctgtgccatcatgccatcaaaaatcagcccgggatttggaacgggatcttcgaatccgtttggccggtggttaattgcggcattttggctgcagttttgtcgttggtgaatttggtggccactctgcatcagtgagtgggggtttggctgtgtccgcggaattagtggttgttggacctcattaaagattggccttccgttttctctatggccaatgtcctgttcgccgtgtctcgccaattctgcatttccgtcttgtcgcatcttgacttgaagcagaaggcgtctaatttcattttcatccatttcaattccgttgttttcgttggcgaattggacatttccttcatggacaatcgatgaatttgtccgactgcgaatctgctcgaaattgcgttcggtcatccctctaagcaacggcggtcgaacaatttgcataattcttgaagacgcgcacaaaagtcggcgattccaaattcaaagcgttcgcaacaatgcgttaaataccaatcctcacttctcgcagcaatgcgttagcagtgggacgaaatcggtgaaattcgcagcaatgcgttaaaaagcagaaccgcagcaatgcgtttgttctgtcagaagcaaaagacgaatgcagaaccgcagcaatgcgttttgttctggtcgcttctccaaatcagttttttagcagtccaaaatccactatgccggcacagctaactcttcgcctggagcgccacgtgctaaataatgctgttcggtcggggctaaatcactgcttctcctccacaaatatttccaagacggagacaaatcactttatttaaaaccgcaacaataaaatgggagaagagtcggaggaaaataagaacaaaatacaaatatgaaagtgcactgccaacagaatgaactgaagggcaaggtgggggaacatattctgctgggaagggagtggcaaatatcgatagatgagagataacaattacagacaattagacaaaattatgaagggacaacataattaaaaacaaattaaacgccaaatttcaaatactaacacagacggacgccgtgaaattttgacaattaaagtgcaatttggtactggatttcaccaaaaagtccaatttttgcaattttgagccaattggggacgggttttttcaccgcttttttgcggcacgatttttccaaaaaattttgtgaaaccgggggcgggggtccgacgagaaaaactttgtatttttaatgcgatctgttaacagattttggtaaaaatattgatcatatggcccagaacctaaaatggctaaaatatataccaatcgatagctctctgtctgtatggaagaatccggaagaattttttttgcggaaaccaatccctgaagagttacagacccgggactgaaatggccaaatggctttgggacggaaccgtccaaagccttaaactcatcgaattgcaacaaaatacatatcaatcggatcctctcggtttgta

SEQ ID NO: 6266 - DNA, 4659 bp, Heterodera glycines
  unsure (1)..(4659): unsure at all n locations
catttcagtcccgggtctgtaactcttcagggattggtttccgcaaaaaaaattctttcggattcttccattatagaccgagagctattaattggtatatattttggccattttgggttctgggccatatgatcaatattttcccagatttttcaaaaaatgaccaatttgcgagtttgtgcttattttttaataaaaattagagtttttggtcctggaccgccggcgaaaaatgtattatgaaaattcaaaatatcatttgaaaattgagtaggctcggcccacttcgatgggctcttccgtggcaagcggtggctcactgtcgccctcatcaaacccattcaaaagctccaatttgggcgccgcactgctcaaaacgaccattcaggcaaatgatgacaagcaaaaaagagaaagagagagagcattcccaagttttgagtttaaggcgagggcaaaactaaagcaaaaagcgaatcgaaaaagctcggcggcagccgccagaattcgtgccaattcccacaattcgaccacaacaacggcatccgccgccgcggtggtaatccaacaaaggcaccagcagcagcaacaagagtttctgacggccatttcccaggcacgccaatcggacgcatctatagacacatttttaaccgaaactggtgaacctttttttattgttttcattgtccattttaaattcaagcaaaattattttaaaatttaaaaattcgagacgaaatatttttaattttcaattatttatgagtttgaatttaaatttgtgtgccgcccctcatcacagagcctccgttgcctccccgactttccaaggcgcattccgaccaaacagtgacaaatctgatgaggataaagaaacagtgataagacaaagaatcagtgcctctgcctacgcattttgtataaattaaattgtaatataatctctgatatacaaagctatccaacagatacagtcaggtgcaaaagtatatgaacaaaaaaatttatttttaaacccggttttccatgagatgcgtgattggatgggaatcttttctatgccaaaacaaacccccaaaaaaagtcaaaaatttgaccaaaaggaatatgtatataccttttatctatatttatttttgggtttattttgctttaaaataaatcgattcgatcgaatgcagcagaagcagattaggcggtaggggtcagttgcgtcttagtacttaagggatcagttgcatctcaatgcaaattgttttcaatttttttattgaaatttttttttttgaaatttttaagattttttttttggaaaatttctgtttgaaaattttttgacgcgaactgtagagtctatcttgaatttattaaaaaaccaaagggggtttgcacttttgataataaatcgtgttgtttctttaggctttatctgacatccgtttcaatgaattgcatatccttaacccgaaaaaaaaattcgaaacttaatcttaagcaattatacgagttacatttcttacgagttgtcatgacatccgaatgtttgctgagaaaaaatccatttttttgttcgagttcgggtattttataggtcaaaacggatgccatatccattttcagccacctcgaaaacccctaaaaatatatcttcattgtaatttatgaatttctaaaaacaaaggtcatatttgtggtcagcgccacaaattaccctagaaatgactttatttgaaattcattcgtacctaaaaatgtattgttaccaaatgcttgagacgcaactggcccgttccgagattaggggctaatttaaaattaaatttgtttggctttctgtttatttgttaaaattttggcttacagttgtttatggcccttgctttattttttcagctttacagtgactaattatgcttttgttgtaaattacctaattgtttgccaattttaaatatcattggatataataaggatctgcccttctaattatttaaattggaattggctttgttccaaaagaactcaattttcgtctgtgagttttctcattttgcttctttctctttgtaaattgctcctcctctgtccgctttcatcgtcgataaattgattttcccaaaagagaggcaaattgagacacaaaggaagcacatcaaacagtgagggagcagagagaggcaaaaaggagaaagagtgtgggaaaataatctgactgagaacaagtcgcgtgacattccctcctctcagtcagttcatttgctccatccctcctcatttctcccatttattcgtcgcgtagcgaccgattcaagcaaaagacagagcagccattaaatgtgcatactatacatagcatttttcttttcaaagcatactttattgagtccatgtttttgagggcggaatttttgtttgtactctataatctgaaatattgccatttttagcagtttttgtttccttacctcattgacaattttttcttcattttgtgctgttttcatcatgagtgacgacaactgctgcggctctgttggtgcccgttctccgactggctccatctcatcaagcggttccgctgactatgacgttgccctttcgccaacccaattgcttgcaatggccatcaagaaacgtcgtcacttgctcgaggacaagcagcgcgactaccaacgggagctgctccactcgcacctcatccagaacttgtgtaagttcctcggtgaaggtcgagcgcgagtgaggcgacaccgccgcagttcatcgcggcgtaagttggtgagacgtcgtcgttgggacgacgacacgagtggaaacggtgacgagaggggccagcaagtggtccctgacgatagccgatcgccttcctcttcccccaatccatcggggattgtgtttgagtcgacggttcagagcgatgccaattttggtggtgatggtggaggccggggcccacggtggctcaacaaacgctcttctcactctgacgacgatggacctccgatgaaacgaaaccgggcggactcttccgaggatgggctcacgttcattgatctcaaccaaccttgtgaggttgggaagttcgatggtgagttaattcattttccttttgcatattttttctcattgttttcctttctttttaggagaatttgcagatggtggacggatattctgatcggaatggcatggtcgtcatgatatgattacagtttctttccttttttctacgtgtatttttttttaccgcagataaataatttatagatcacagcgagcaaaataatcactggaaggtcttttgtgtgtagagcatttatgcgttctctcatactggcaagttgaacgtataatttaaacgatcaatggtgatttgtcatttatccaacgttactttttctagttttaattgcagaaaatcgcaactttgcgcggagttttaagtaatgagtagtttctatcaaatctgtttatatcatttctttgaatagttttgtaaacgaattggtgtctcatcgttaagaaatgctcaaacattgcacccaaattcgttcatttgccacccaccaaagcattttctacgacgtggtcattgtcggtggtgggttggtcgggagtgcgatggcctgctccatcggtttgtgcttggcattgcaaaaagcattgggggcggcttttcaggcacaaattcggctttgggtccatccacgagggtgctcctgttggagagtggacgactgcacagcgtcaagcagtcaaaagaagccgaaaccaaacacacttatagcaaccgcgtttccgcggtcagcccatcctccgttgaaatgttcaaaagtaatcctgagtctctcaaccaagtgctttatccgagaatatccaaattcttacctatattgttgattctgccaatccaattccatcctcttcccttaaaattagccattccttttttattcagaattcggtgtttgggatgagatttgctcgaagcgagttcatccaatttctgcgctttacgttcgtattatttttctggttcaacccattaaaattagtgaagaaaagaaacgaaaaatcaggttgaggatggctgtgccaaatccaaaatccatttcaaacaattggataagcgttcaccgattgctcacatcgtcgagaatgagctcatcgtcgccgcactgcagcaatgcattcgggaccgatgtgccaatgtggaagtgcgccaaggcgcggttgttgaccaaaatttgaggtttgaccctcaacgaattgcggcatcaaagtttcattttatgtcttaaattggtttatggatgcatcaaaattatttttgactcggtggttattaagagcttttaaatcgaaacccaaagactgttgtgctttcgaacgttgaataacaatttgtgtcgggtcggatagtttcatttctcgcattttttcttctatgttcacttgcatttctgtgtttttaaggacattcattcatattttcagtgttcctgacaatctcggccaaaatgtcaccattcagttcgaagatggcacaattgaagcttcattgatggtaatttatgcgctatgcaacaaattttcacttttgtttcttcactttcacaacctcagattgccgccgatgggtccaannaacctgca

SEQ ID NO: 6267 - DNA, 5602 bp, Heterodera glycines
atttacccatatttcttcgacttttaagccatatttctttgaaattttccttagtttgaagattctggctttcgtttttgcaaaattttcttcagctgtttttccattgggacatatttgaaaaggttttaagcattttttacaccctaaaagataactaaaaaaggaaaatattcaaatttataaccgtgaaaaacgcatccctaaaaatataattcagaaatatttattttaattttttagtacctgaaattctataatcgttttgtatttcccacatataaaatcgacattaaatccttaaaaatataatgaataagtttttttaaaattaattaacctccgatatttacttctcccccgtttcccgcatgtctcgcgttaaccccatttttaaacataaaccactcgaaatattttatggcaataaaactttgattgttctttttttcaaacccccccctcagggactattgctatgtgtttcgcctttaaaaatttcgcccgataaatttttatggccgcccccgcaattgtggtcgaagtctaaattctattttaaaaatgaaatttgttttctaaccttaaacacgtcgaaaccattaggactaagttcatcccttgttatttctataaaaattttacgcattgctaagactgcctttagcaaaatttcggtatcctgaccacaataaattttcaattgctcctctgaaattgtttatttaaaaaataataaaacttttttacctaataaaaaaggcgtatcgttattttctttataccatttttgaaatttttcgaattcatcttttttcattgagtccgggtaataatcttccatggggggtagtgttgggtttattttacctttaaaacataaaaatatttaattaataattatttttttaccataatttttttctgagttatatttgtgtgggaaatataattttggagtgcagtccaatccaaatgtttttggcaattcggataatttattctgtgacatcagccaaaaatctctaaaaaacaaatttcccaactttatttgatacatttttaaatctgaaataattatttcaggtatatatcccaattctgttaatgcgcgcaaaataaagtgcgcatcgtaacgccctaaaaatgtttattataaaaaatttaattttttgattttaccggcgaaatgagcatagcaaatggtttcgaaatgtttaaacgatagcacccatgttaaaaactcgaagacggggtcaaagttgtcaaccgtacaccatgtgtggtgcttaatcccctttggcccgcaaatataaaaaactactttatgttcaaaaatcccctcattttttccattttctattaaattatccgtctaaaattgctaatattttttgtttattattttacatactgaacactcaatgtcgtagcttatgatacgataacgcggcagatttttcggaatgatgattttctttatgtagcaacctttcgattttgagtgcttgattttacacacattacaaaattttgagcctaaattatcgaaaaaatttctattggtaatttattttttaccacaaatatgtttttcccgtgtattatattcgctatcacactgtatgcagcgtttataaagtttgcaagccaatttaaaatggttctgataacaaaaaacattaaagaaaaatctattgcattttaggcattcttttagtacgttttcctcatttttacatggaaaatttaaccctaaacattttatatttttttttatttctgtacttgctttaccccatccgccgcaccgttgacattttattatgcagttaacagaatgttttattttttcacgaaatgtttgttcacaataaacgcagtaataatgttttatatcaaaaaactgtttaacactttttaaacctaaaaaatttttggaactgaaattatattgaagaaatttaccgtcccaatgtccgttttcgagaaaaatacaaattatatatttttttggtccctgacccttaaacatgggttttaaactccattcctaaatcatacatataaagttaagatttttcttttttaacctttgaaaacgccacaataagaaatttccctggaaattcttggtcgtaatactcttggacagtcaaaagatcatctatgccatagtttgttctatttggatcaattcttgtctcttggattagttgcaaaacatggtttttttgtcgttttttgtttttgtaaattctccgaaactgatcatatgagatctcgaaagactcattggctccgattatttgataaaatctgcttagtatgatcgcgtaaaagagacaataattatcgtcatttgcaactgaaattctcacattttcttttattttaaaataattcgttgaatttaattgattccctaaaaacataaataaaaaattaatttttttttaattacttgtgccactcgggattgcgtatgtggttattattattgatatttgctcatttaaaagatcgacctcactaaagctttgttgaatgaggtaaaatgattccagcaccacatccacattattctggaccaaatcccttggggggataattaatgggtcggttaatgcctcacagtaaaggtcgtaagaaatttttttatttgccatcctttttcgtttttttccagtgcattttttgttaaatattatattatctttttgaaattcttttttgagtttttttctgtatttttaaatataaatctcacaatattttcctttatgccaaatttgctattctcttttatcgtactcgagattcctataacaattaaatgcaaaatgaataaattaacagatgaaaaggagaaaaaaccaaatctattgctgaatctgatctgtaaacgaggagagaatgaacgaaaattgtttttgagaagatttagagaaaaaaactaaaatttctgtatgttcgaaaacataaattgcgttttctcaaaccgaaaaaaaacaattttagaaaaaaaatgtgcaaaaaagggttcgttctctccacatttccggattatgggtcaagttggtcttttaacgttggccttatgcaccaacacccggcgggggtggatcatcatgacgatcgtgccatcgtcgtaaaacgggtggcacaggtggcggaggcagtcgggcaactgagatttatttttttattataaatatgaaaaatgaattttgaccaaattcttcgggatcaatttccaaaagctgacgtcttcgtttttgtagcctagggtcacgtaaagcaattcaaataattatttttatttggccgatttcaaaaaattttatacctccgggtgtgggtggacggtaacgaccgccgttgcgtggcattcgatcgccattccctcttggcggcgggttcaaaggtggggccacttggggtccgatcaatgctggtggtggcggcggcaacggcggaggaccaaatggtccttgaaattgatgattgggctgaaatatgataactctttccctttagttctactgaaagtcgtttgacatcgccgctcagcattgacatcctagtgatgcagatgacgccttccctttagctctactgaaagcagttgtgaaaccgccgcgtagcattgacaccccagtgctgcggataaccccttcccgttggctctactcaaagtcattgtgataccgccgcgtatcgttgaagtctcagtgctgcagataatactgaaattcgttgtgatatggtggcgctgcattgacgtcccagtgctattgataacccttaccattggaactactgaaagtcgttgtgataacgccgtgatgtattgacatcccagtgctgcagataactccttccctttagctcaactgaaatcagttgtgaaaccgccgagtagctttgacagcccagtgctgcagataactccttctctttaactctactaaaagtcgttgtgaaaccgccgagtagcattgacaccccagtgctgctgaaaaccccttcacagtggctcgactgaacgtcattgtgataccgccggctctactgaaagtagttatgataacgccgagtagcattgatatcccagtgctgctgataactccttcacattggctctactgaaagtcgttgtgataacgccgagtagcattgacatcctactgctgctgataatcctttcccattggaactattgaaagttgttatgataacggcaagtatcactgacaccctagtggtgcagataactccttccctttagctctactgaaatcagttgtgaaacctccgagtagctttgacagcccagtgctgcggataacgccgaccctttagctctactaaaagttcgtgtgacatcgccgcgcagcattgacatcctaatgctgcagataactctcgcagtgactctattgaacgtcgttgtgataacgccgagtagcattgatatcctatgctgctgataactccttcacattgtctctactgaaagacattgtgatgacgcgagtagattgacatcccactgctgctgataatcctttcccattggaactactgaaatttattgtggcaccgccgcgctgctttggtatcccagtgctgctgataactccttcccattgactctactgggcgttgttgtgataacgtcgagtagcattgacatcccagtgctgctgaaaaccccttcatagtggctctactgaaagtcattgtgataacgccgagtatcatttacatcccatgctgctgctgataactccttcccagtggctctactgaaactctgtgaccctgtcgcgcagtattgtcattccattgcttccgctaaaaccagatgatcgaataatctttggtttatgctacacttgctcgtgagtttattttattataaagacattttaaaagaaaatattgtaagtagctgtgaatttcagactcgtagcgtacaccataagtaaagctgcagtcacggcgacacacacacacacacacacacgccccgcgcgcacgcgcgacatgctgtcatcacatttctttgatttatcaaaaaagggttgcattttggtcttcttttgcctaattttgcattttccctctataaaactataacttcgaaaagttaattctgcaaatctttgttattttagcatttttctacctaaaatttgcaacgttggaccattaattttgtgtttttgtatcttcaaagcactaattttgcattttccctctataaaactataacttcgaaaagttaattctgcaaatctttgttaatttagcatttttctacctaaaatttgcaacgttggaccattaattttgtgtttttgtatcttcaaagcactaattttgcattttccctctataaaactataacttcgaaaagttaattctgcaaatctttgttaatttagcatttttctacctaaaatttgcaacgttggaccattaaattttgtgtttttgtatcttcaaagcactaattttgcattttccctctataaactataactttcgaaagtaattctgcaaatctttgttaatttagcattttctacctaaa

SEQ ID NO: 6268 - DNA, 1843 bp, Heterodera glycines
  unsure (1)..(1843): unsure at all n locations
acattcatgcaaaagtgaaatgtttgcataacctagaaacattcgctgcgtaacattgataatttaataatttttcacgagtttattcaccattttcgtttcaaataaatcagaatcattctgtaggtgtgaatattcagaaaaaacttcaaacccatgatcaatgtgtaagaaatttgaaaaaaatacaatgatgcccacatgttcttgctaacgttggtataaatgatcattcttaatgaatcattttcctccttggaaaaaaattcctaacaagtgctgtaaagtgtattttcctactgtacacggacactgaaagtataattcacagacctgaagaactgtcataccctctttcttcacctcaagttattttcttctatttttcatatatttttcaattattttttcattgtcaattttctctctcaataccctttctcttaatctctctctcccttcattcaatctctctggatgttttactctgctcccaatagactccacatcactatgctcggcatactgcaacacgcttttacggaatactgcataaaagttaaccgcccaattcccactaagcttaggtgcgagggtgtggtatgaactcttaatcagattactgatcattggcgacgaacttaccacatctgttaacccaaaaaaagggcaatagctgttgcacaacatccttcaatgatggtgtctacaaaaggttagcagacaacagcagatgtttggcagcatttcaaagaaagttttctgaggtcaacatcaaaagactccctcacaattcttggctgtaaacatccatgcagagggaaatgcttgaataacctagaaacattcgttgtgtatccctctctctaacgtttttctctcctctctcgacccctctttctctcattttcctttctctctctctctctctcactgtcttagtttccctcccactccctcctttcacactctatctcaatcacttcctcactcccttattctcttatctctctccctttctttctcttttcgcacactattctcactctctctcctctccctctctctctttttcacttcctctctccctttcctttactcttaatctcaatctctcgcccataactcaatctctatttttccttccttcctcctcctctctcatttcctctcactctctcattctcttcctttatttctcttttcgtaacacattttcattttttttctctcccctctctcgctctctctcagtcacttcctctctcgcacgaaaaatagttcttgacaaaaaatggctatctctgaaagtcactattaaatcactaccgtgaattggacatcaacttttgtcttttgttgtagcgctgaataaagcactaatagtgtgtttgaaaacgcacgaaaaatagttattgacaaaaaatggctatctctgaaagtcactattaaatccctaccgtgaattggacatcaacttttgtcttttgttgtagcgctgaataaagcactaatagtgtgtttgaaaacgcacgaaaaatagttattgacaaaaaatggctatctctgaaagtcactattaaatccctaccgggaattggacaccaacttttgtcttctgttgtagcgctgaataaagcactaatagtgtgtttgaaaacgcacgaaaaatagttattgacaaaaaatggctatctctgaaagtcactattaaatccctaccgggaattggacaccaacttttgtcttctattgtagcggtgaataaagcactaatagtgtgtttgaaaacgcacganaaatagttctagacaaaaaatggctatctctgaaagtcactatt

SEQ ID NO: 6269 - DNA, 5569 bp, Heterodera glycines
caacttatataattaatttttctgaatcttgagtagcattttttatttattcactatgattggtcaaattcttcgatggaaatcacaaaggataatgatatgtaagcatttaaaggctttaacttgaaaatcccaaatttagtggaacatataatccgggacaactttcatgattacgacgttccgtccctgccgaccaatgcagttcgcccacatgtttgtgtgaattgataaattacttttagaaattaagaacttcaccctcatttagcaaaggaaacagttcacagatttgccatttgatcagcaggagaaggctttgttcgaagattttctgtccgtttgtcgcgtgggtccatttgccattggcaaaacaatcgtttaatttttgtttctttttagggcatcaatgggccattcattcaatgcgaacaattagacaataacgaaatcatttgggtatggacggcggagaattggaaacagaggacggataatcagaacattgagcggtggatgaacgtctgtttcagcaaggcaccactctttttgacttgcttttgtgcatcggacgtacgcctttttccggggggggggacgtttatttgggtacttttttgggcttacacctcaaaatttaaaaaaagtttcacattcaataatttaaacgcaaaactcctttatcgctactttaatttatgctatgttaatggtacgcaattgtcccttaagcgtgccctttttgacattttttaaaattttgaggtgtaggcccaaaacggaaaaataccattaattatttgttgggtgttcttgaaaattataaatgtttcgcttgacactttgtccttgtctaaatttggttttaattcattttaattgcctcctcttcttgccttttcccctttcgttttagaacttcgtgccgactccacccgtggccccacagtttacgctttttgttcgcttgtgctgaagcatttggagcggaaagtgtacgctgaactgcacgagttggacaaattggaggtgccaacttttggaattttgagggaaaaccgcccatttaaggtaaaaaatctgatgacattgcgaaatgtgtccaacgaactgagacatcgccatttgctccctttgctgacaattgcccgggaaattttgctggtgggaaaacgaatttttaattggccattttgatcggttgcttcccatacaatcaatccgactgttcccccaaaaattttaaaccaattctaaaaggcggatggtttgtcttgaaaatgggcctctttttagttaatttttcattttgtttctcctcaaatttcggttgtcttttcccttctcatttcgctgtttctttaggctgacaaagttggcggtgaactgatcaattttctgttcgaccaaaaggagcggacggaatgttatcacatcgtttcccttttggacgagatcatttccgtcactttgctccgctacaatcagaccgttttcgaatggatttcgcagtgttcgctgagcctggacatgggccatgaggtgggacagacaaagccatttcggtgccaaatgatttcattttgtggcacacgatgactaattaattgacttttcgtcattttcctttcttttaatgcccccccccccccaattctcagttttttatttgggacttgcgcaaacaaagcgtagtcaaacgatccgatttcaattcgccggccctggacaatttcggctttgaccacacttacgtgtccattcctgaactgcttcccaaagtgtatgagtcggtggccgacgaactgctcaatttgggccgctttttgttcacaatgaaaaatcaaaatgccggtgagtgcgctttttggtgagacaatcaaatttttattctttttcagacattgagcatctgtccactcattacgaattggaccaaaaccttttcaaaaacaaaacattgcgcgagttttgtgccgcgattcacagtttctacggaaaatgctccaccaacattctcgatctcttcaaaaagcgattcaacattttgcaatttgcgaggttcgctgtgcccattagtcagaatcggctgggcgaccaaatattatctatttttaaaaattaaattttgctttttattttggcaggcatttgccccatttctttgtcggcctcaattcagcatggatttacgaattcgttgtgctgctcgaaactaccggattaaatggccctattttggacaacgatttcgaaatggacgacaacgatcgattcattgtgaacacgcaactgcaacttttgttgcaggaggcgttccgcgtcagttggcttcagaacagcccattccatgacaaaattgggtaagttttggccataaaaatgctgtttttttcaattttggctttttcagcgtctcactgatgcgtctttctcccacgagtgacgaccgactggcggaacacgagaaaagacttgaacaccgacttaagaacccaccgaagctggagctgaacatcgtcgtccccaaggataatgcgtcgaacaagaacaaggatttggcactgagtttggcatttcccccagtcgtcgtttggtcgtaccgccaaatgttttaccatttgttgttgctgaaccgggccaaacattggatgtaccggtgagagaagcaaaggatttaataagcaaaatgggaatatatttggtcctaaacgacttttgaattatttgagtaaaagcaaacttttcggggtttggatttgctaaatttgtctctgcaaatttcagaaaatattttgcgctgaaagggacgaattgccgccgcgaagaatttgccactgtccatcagtttctgcgcgtgctcaacgtgtacattgagtacctttgcggcatcgcatcggccgcttatcccaatttctccaagcaattggattccgtaacatttttatgttttaatctcataaataacgaattgtttgtttgttttgggtttgcactttggaccaactcgtcgatgctcagatgaaatacactcaccaactgatgggacagatgatgttggaccaaggctttaagcagctcaaggaattgctggtccaattggccaccaaattctgcgaatacgcccgggattcaattgtgagtcattttgtcagtttttaaatttaaaaagtaaaacaattgttgttgttgtttttcaggatttccacactttgaacagagaggcgtctcccctcgtcggagaaatcaaaaaaattctgctccaaaatcgggacggaggccccaccggcctcagagacatgtgagttgaagctgttcacaatcagttttccgtttttaagccttttcggctgctatttcactgccatcggagggacagcggcggacgaagagccaatttggcgattgttgtgccacgttgacgacgaggcgagcattaattgccatcaccgaccaattttaccataatttgcaaattccgtcacttttttcagattgcttttgcggctgcgtttaatggctgagttttcttcacttatttattttttaaacgaaaagagaacgcggcgggttaaatcacttccatttgactttgatctccaaccaatttttttatctgtgcctttcaacttcattgattaaattatttcttttctttctcatttttgattttttaaatcattttttcattccgtttccaaatcggccgataaaatgcggaatgaatgaatttaatgggttgcccgaatggactgctgggttatgatgccttgatcaatgggaaaatgtttgaagcggagggggggggctgccaattttcgcatttgtttcaatgccttcccatcccagcggaagacagacaaaacatcgattgatcaaaaaagtgctgctggcaataaaataatatttaattttggaaaggacatttaaaaaacattttttgaacatttctccgttttttcgctattttcaaccattttctgttccaaaatacgacattattcttctcaacaacgaattggccataattgggactgttttgaccacggcggcctttgcccccccccccgaaatgtttcccacttttggtcaaaaacggcttaaatacacggaaacaaactgaaagccatcattcctgcaataaaaaatcatataagcatttttaggacaaaaaattcggaagttaaaatgtgaactttcgattttttgttcgaattcgggtttaggaattggggtacttatacagtttgacccacatacaaatttttttttaatgataaaaaggtgtttccatgggttttcggggccgctgatcatgaatatgaactctatttgacgaattttcgaacccctaacccgaaattcgaacacttgaaatttttttttccaaaaatggttttaaatgtaccaaaatcccttaactatatactaagtcagccgaagccccgcccctatttttgaattggcggttaaatgctgttttgttgtaataggaaaaagaaacagaaaattaaaaaatataattggagattaatagagaaaggatgggtagaagagagagtgcagtgtatgtttctctgtcggcgcggatgggaggggtagagtgggtaacgcgtgcggttgtcacgcaggattgaatgcgtgcgagtttgtttatgtgtgtgatgagtgtgtaggagtgcttgggaataaggaggtagagaagaagaggaaaacaatagagagagatgaaaaaggaagcgagagagtgtacagaatgaagagattctaaaggaaggggagagagagaggactgagagagaaagagaagaagagatagggataaagagaagataaaggagaaaaagcaagaggacaattaaagagaaagcggaagataaatagcgattgagaatggggaaatggtaacgatagaaaaagagtgggaagactgagagatgacagagagagagagagaaagagagagagagatgagaggatgggagagagacagagagagagcagggagagagaaaaagagagaagggagagagaatgagaaagcaaagagagagatagagaagagaaagagctaagagagaggtgagaggatgggagagaagagagagaaaaagagagaaggaaaagataaagaaaaaaagagaaagaaagaaagagaagagagaagcagtgagaggtagagcgaagagagagagagagaaaaagtgagagggtggaagagagagcagagaaagagagaagggagagaaagaaatagagagagagagaaagagagagcgacgggatagagagagagaaagaaagcgggctaagggagagagagaaaatgaaatatagagagaagagagagagagagagagagagctaaggggagagagaaatagtgagagaaagagaaagaaaatcgagcagtgagagagagagcaaagagagagggagagagagaaaagtggagagagagagagagcgcagagagagagagaaagagggagaaagaaagaaagagagaaagatggatagagagaaagagagagagagagcaaatggagagagaaagagggagaaagag

SEQ ID NO: 6270 - DNA, 888 bp, Heterodera glycines
aaaaatggattggatttgaatgaaaagtgtcggcggtggcatatccgccgaaagtccctcaatgaatattcaattcatttttgctgtttttgtttcttttggcggaaattattattattatttttttgccccggtgaaatattttaatggcatttgccaaaataattattttaatttttgtgggattttttttttgctaatttaccaaaaaaaaaaaactttattttattgctatgcttctaaaccattattttaataataattactattatttttggaatttttaaatgtctttcccatttttgttcatattccgtggtgttaaattatttgttttttctatttttaatttctttctatttttatgctgattattttggtatatttataccgttttcttaatgcaaatttaattattttcggcaaaattgaatttattccaatttatttttgaataatttttccaaaaatgccaatttctcatttatttctttgtttaaaattgtcttttgcatcataaaaatggaaatgcttcctaataatgtgtgtttttggatgagtgtcaaccaaatttattcgtccgccccaaatttgtcccccggggcacagacaaaactcaatttttggaagtgcccaactctctctgaaacaaatggaccttaaaatccgggggggggggggcaccggcggttgaaattccctcggccactcaaaagcgaatgaaataaattcgccgaactttttgaacaatttaatttttcaaaataaaaataaaaaaagtgttcggcctctctttttccaattttagcatttctttttcatttcgaaagtgctttctctttcactagtgctattgaaattgattaattaattaaattcaaaatttaa

SEQ ID NO: 6271 - DNA, 1408 bp, Heterodera glycines
cattccaattacttggactcaacccaccaccattctaatcactgggactcaattcatcagcattgcaatgaacgggactcaacccactaccattctaatcactgggactcaattcatcagcattgcaatgaacgggactcaacccactaccattctaatcactgggactcaattcattagcattgaaatgaacgggactcaacccactaccattctaatcactgggactcaattcatcagcattgcaatgaacgggactcaacccactaccattctaatcactgggactcaattcatcagcattgcaatgaacgggactcaacccactaccattctaatcactgggactcaattcatcagcattgcattgaacgggactcaaccctccggtgtgccgatcaccgggacttaacctcaacaatttttcggcatcccaatcactggaactcagtcctcaagcattcgaatcaccgacactcaatttcaccaattcttgggcatcccaatcactgggactaatttagcaaatactcaacattttctttttgggtgtcaggattttcaccgggcgggggaaggctcggccgcttcgcggcctcacacccggcacaacatttattagcattttactcttctttttggcattttcttatggccaaccagcggcactcattctccatttttagcatttccatctttgtaggcttaatcacaataatcttcggcataccaatcactgggactcgattctccggcattccaaaacaaaatcaaaaacacaccactctttaactaactaattcttttctctttaacaataacaaatcttagtaaaataacaaattttttttctaaaacaaaaattattaaaaaaagaaagtttttttgtaacaaaaaatgaatacgaattagtaaaaaaaaaattcacgaaaatgaaaaacgcgtataaaaaatcaaatctaaaaaagataaatttcaaagtgcactaaatgattcaaaacaatcatttcctttcttttaaaaatttttaaacaaataaaagatgggaaataaaaaagggaaggatgagagacaaatttactattgtctctccctttcctttatttttactcttgtttcttttctattgccatttactctccctttttcccctctcccacacacacgcacgcttccaacagactgctgctgctgcacagcagcacgcgtctgcctttccctctctctacttttttcaaatacatttttatcgcaaaattcaaacaaaacgccacacaaattcaaatcactgacacatgatacacacactcaactttaatatataggaaagcgtaaaatattgtcatttttggactaaataagttaatagattgcactaaaaattcaaaactttccccggcgacgccta

SEQ ID NO: 6272 - DNA, 4432 bp, Heterodera glycines
tggctctgtgaggttctccccccccccccccccgcttcttccaggccataggaggctaggcttttcagtccaattttttctatctgcgtctctctttgctgctgctgtttcctttgctttacatcgcgcattcattagcttaatgttctgaattttgttttttaattatcatttttctttataacctttgctcaaaattgaatgctatgaaatcggactttttgaatatagtagggatggtattccaagaccccacaaaaatttagaactcaaaatgtttcatcaattataaatcggaatttcgtgcctttcctggtagaacacagtcattttttaggttgattcacatatattaattaatttgttataattttgcaaaattttgccatttttatgattacagaaattaatttggcctttttggcaaatttataggtactcgtttatgtttatgatgtattgtcacatctattatcgaaagttttaatttgataaatcaattttcatgtagaaaaataagaaataattcttctaacataacttatatggtgaaaaaggtccattacaccaacttgatcaaataactccttcatggtgattatgatcgggacatttcaatttaaaattcgcgacacaatttccttttaaatggtgggtctgcgaataatatccgctgagatagtgatgtaatcaaaattggttgaataaaaaaaatgaattttgaatcattttccctttaaatacggttccggtacctttatcacctctttcctcatttaattattatacttgtagtcaaattaaatgctgttatatactgaatttttggtcttttgtcatttaaccttgaaatctggttgaaatagggatcgtattccgattcttgacgtttcttatctcatcggatattcgacgtggacataagaatataaattcaccaatttaattttattatgttggcattctgaattgctttgaacggctacccaccttgtttattataaaatgggaaaacattgcagaacattgaatttaagcaataagatgagagaaaatgagaatgaatttggtgcagtggaggagggtgtggggtggggctgatcaaaaaaaattctgtgggccaagtgaaggtgcgggggctctgctcggccttcttcactgccacctctatttactttgcacagacagcagggtagggcttttccattcaaaaattttttatacctgcatttctctttgctgctgctgctgctttcctttggcttaggtcctccattcatatttctgttttttaagcaaacagctaagccccatttcgatttttgtgttactttgcacagaagtgtaggcttttccattcaaaatttttttgtacctgcatttctctttgctgctgctgctgctttcctttgctgttttttaagcaaacatatacatttgctatttttgtgctcatttcgtgcttaaatatttgaattttgatacatatttctcattctagtgcttaaaatttcggttcttttatcatctcttttcctcatttaattattatacttgtaatcaaaaatgaatgctattaaatcctgaatttttggtcttttccccttgaaatatggttgaggccacaaattagtcgtggacataagaatataaattcaccaatttaattttattatgttggcattctgaattgctttgcacggctatccaccttttgagtacatatttttctttctctggctcttttttctttaacaccccctaccatttcgtctttttatcattaactctctcttttctttatatttttcaatttatccatatcccatccatctaatcatgctaaacaaacagtactaaaatctgtcccaattgtttagaaatgctgctatggtgggcctttttacttttcttccatcgtgttatctttcgcccagtcgattgtgggagtgagttgaagatttcggtttgtagttcatgtaaaaatttttagagtttgaagacgccaaggatattctgagcagctttaagtcggttgtggatgtgcccttatcaaatgacttcaaaaaaagccaccaattcattgcattaagcatgagcttaatgaaaagaaccgttccatttgcagagctgtttgcaacggctttgaaagttggtcttgaggtaattttattcaggtcatgccaagtcttctaaacatcatacaaaaccgaatcatacatacttaactcataaatatcaactcatacacatactcaattcctccgtgttcaactcatccactgcacgatgcagatcgtattcgtggcatttctagcgttgtggtgtttcccgcaccaggggcactctagcatttattgcatttgcaatctgcattttgacctctcttatgcgtggatgaatttgattacgggtatggatgctggatgagctgggtatagatgagtttggcatttatgagttggtttataccccggttattattttttaccacggtttgaaaaatggtacaggaagatgaattgggcgcccttttaactcttacaaaaggcatcgatgccaaagtccgtgacatcgccagtcaacaaaaatacatagcgtcatctaatgtttatcgtgaccttttgcttgagtacgaagaggtaggttcttaatcaacatcatcattgtggtacgattattgaggctttgatatttgataattcccacttggagaccgacatccgaggattaccaaaaacgtgggtccgaaatttgtggacccaatctttcataacatgcagaacccacaaaaaatgaactacttttttcatcagaataaagaaagaatgcctttcccaatggcaaaagtcaggatggcattcggaggcccgaaaaattttcgaaaatcggaattccgactccaaaaaggtcgaataatcgggtcggaaatttttgaaaaaatagaaaagtactaaaattttttaaaatattttaataggatacattttaaaattcgtaaacaaaaaaatgtgaattcaaaaatattttgtatatttatctatctgcttgaaaaattattcaatgatttaatcaaagtctttttatatcattttacaatttagaacatttttggaaagggactgacaatttacaccttttttgcgacgctcttttccaaaaaaatgccttctctggtgtgactgattatcgaaaatttttatttggaatctaagtctcccatttttcaaaattattgtgcatgacgcggtatagcaaagtttgagacgaacaagaattccataatcataatttgggttctcaatctcgtaaaaaccttcaactacatttcgtatagacaaatatttatctgaatatttttcgttatcgaattcttttcatttctttgggtccaactcccattttcccagaagaattggacctttatgaatgtctttaattgccaagctctttttatttggagagaaaacttagtttcacttgtttaggaattgttttatcctaaaggtcgggtccacaaatgttggtcaatcctcaaacctcggtcataaaggtcgggtttaaattgccgagtccttaaaagtaaaaatcctcaaaagtaaagatagatagatatattaatacctaatttagaaggtggatgaaaaaatcacttctttgatccgacaaattcggatcatgtcaagaatgcgatttaaagttgagaaatcggtaatagatgcgtttgtttatgattgcaacggcggagcaaattctcccggaagtgttgcagatgtgagtatataaaatctcttaagaataaataaattacgtaattcctaagtcctgccttaacacccaccggcactttatttggcacttttttattaattacatgtcattatttttttagaaatttttagatcctggaattttaaattaccgagatcagagccatgactggaaaatggacctgggcggaacccctggatcggaactctcattttaccgggtcccaattattgggctaaggtcatgcaacgaactttttccccaccaactttttccgcgatttcctttagaaattaataaaccgaaattttatttattgatcaacagttatcttaacatataagtattgttcgaattttataaaccagattttttgggttttcataaaaattaattttatgcagtgcctgaaatcccgggaaattttcgttttcgtatttttagacctaaaatgaatatttagaaatttaataaaactaaaatattatttattgatcaatgaaaagtcaaatatcttaacacataaggagattgttacatttttataacccatagattttttgggttttcataaaaattaattttacgcggatcctgaaaacccgtggaattttccttttcataattttagacataaaatgaatatttagaaatttaataa

SEQ ID NO: 6273 - DNA, 1176 bp, Heterodera glycines
ttttttcaaaaatttgaagaggtacgcaaaaattaaggaataccggaaaaaaatttaaaatcacaccaaaatgggaaaggaaatttaaaccttattttccttttcattctcagctggtcccctgcgaaaatttggtgtatttccgatcagaaccgcgaaaagctatgagtgcttgaattttcactaaaatagctaagcataaagtttttcgctcgtttaaaaagcaagtaaaactttctagaatttttattcatcgcccttcttgatagtaaaagcatcagagggctttgttaacttgaaaatataatttggtgcgtttcagatctctctctgaaaaaatattaatgaatttattttttcaaaaattcgaaatgtacgcaaaataagaataccgaaaaaatttcaaattccacaaaatgggaaggaaatttaaacctaatttcctcttcttctcagctgttaccctgcaaaatttggtgcatttctgatcagaacgcgaaaaactatgagtgcttgaattttcactaaaaaagctaagcctaaagtttttcgctcgtttaaaaagcaagtaaaaatttttagaatttttattcatcgccctttttgatagtaaaagcatcagagggctttgttaacttgaaaataaaatttggtgcgtttcagatcactctctgaaaaaatattaatgaatttattttttcaaaaattcgaaatgtacgcaaaataagaataccgaaaaaatttcaaattccacaaaatgggaaggaaatttaaacctaattacctcttcttctcagctgttaccctgcaaaatttggtgcatttctgatcagaacgcgaaaaactatgagtgtttgaattttcactaaaaaagctaagcctaaagtttttcgctcgtttaaaaagcaattaaaaatttttagaatttttattcatcgccctttttgatagtaaaagcatcagagtgccttaattaacctgtaagataaagtactcactcggccgcttcgcggcctcgtgggggggccttcgggaatttattttttcgagaatatgaaatgtacgcaaaagaagaataccgaaaaaatttcaaattcaacaaaatgagaaggaaatttaatcctaattacctcttcttctcagatgatagactgcaagatttggtgcatttctgat

SEQ ID NO: 6274 - DNA, 1543 bp, Heterodera glycines
atttaaacctaattacctcttcttctcagctgttaccctgcaaaatttggtgcatttctgatcagaacgcgaaaaactatgagtgcttgaattttcactaaaaaagctaagcctaaagtttttcgctcgtttaaaaagcaagtaaaaatttttagaatttttattcatcgccctttttgatagtaaaagcatcagagggctttgttaacttgtaaataaaatttggtgcgtttcagatcactctctgaaaaaatattaatgaatttatttttttcaaaaatttgaaatgtacgcaaaataagaataccgaaaaaatttcaaattccacaaaatgggaaggaaatttaaacctaattacctcttcttctcagctgttaccctgcaaaatttggtgcatttctgatcagaacgcgaaaaactatgagtgcttgaattttcactaaaaaagctaagcctaaagtttttcgctcgtttaaaaagcaagtaaaaatttttagaatttttattcatcgccctttttgatagtaaaagcatcagagggctttgttaacttgaaaataaaatttggtgcgtttcagatcactctctgaaaaaatattaatgaatttattttttcaaaaattcgaaatgtacgcaaaataagaataccgaaaaaatttcaaattccacaaaatgggaaggaaatttaaacctaattacctcttcttctcagctgttaccctgcaaaatttggtgcatttctgatcagaacgcgaaaaactatgagtgattgaattttcactaaaaagctaagcctaaagttttcgcatatttaaaaccaattaaaaatttttaagaattttattcatatccctttttggtattaaaagcatcagagtgccttaattaacctgtaaataaagtttggtgtgtttcagagcactctctgaaaaaatattaatgaatttatttttttcaaaaatttgaaacgtacgcaaaataagaataccgaaaaaatttcaaattccacaaaatgggaaggaaattcaaacctaattacctcttcttctcagctgttaccctgcaaaatttggtgcatttctgatcagaacgcgaaaaactatgagtgattgaattttcactaaaaaagctaagcctaaagttttcgctcgtttaaaaagcaagtaaaaatttttagaatttttattcatcgccctttttgatagtaaaagcatcagagggctttgttaacttgaaaataaaatttggtgcgtttcagatcactctctgaaaaaatattaatgaatttattttttcaaaaatttgaaatgtacgcaaaataagaataccgaaaaaatttcaaattccacaaaatgggaaggaaatttaacctaattacctcttcttctcagctgttagcctgcaaaatttggtgcatttctgatcagaacgcgaaaaactatgagtgcttgaattttcactaaaaaagctaaagctaaagttttcgctcgtttaaaagcagtaaaaattttagaatttttatcatcgcccttttgatagtaaa

SEQ ID NO: 6275 - DNA, 2295 bp, Heterodera glycines
  unsure (1)..(2295): unsure at all n locations
ctcaacgattttattgcttattgaaagagctagagccgaatatatttttttaatttaagcctaaactttttggcatgtttaaaaagcaattaaaaattttattcatctccctttttgatagtaaaagcatcagagagccttatttaacttgtacataaaatttgatgcgtttcagagcactttctgaaaaaatatttatgaattaatttttcaaaaaataaataaacagttaaaaactcagaatttctaaaaaaatttaaaaccaattacaattgtcattttttcaggttaagttagtcctgtaccggggagtatgcctataaaatttggtacgattttattgcttattgaaagagctagagccgaagaaatttttttaatttaagcctaaactttttggcatgtttaaaaagcaattaaaattttattcatctccctttttgatagtaaaagcatcagagagccttatttaacttgtacataaaatttgatgcgtttcagagcactttctgaaaaaatatttatgaattaatttttcaaaaaataaataaacagttaaaaactcagaatttctaaaaaaatttaaaatcaattacaattgtcattttttcaggttaagttagtcctgtaccggggagtatgcctataaaatttggtacgattttattgcttattgaaagagctagagccgaagaaatttttttaatttaagcctaaactttttggcatgtttaaaaagcaattaaaaattttattcatctccctttttgatagtaaaagcatcagagagacctaatggaaaaaaatccccgaaggagagaatttaattaaatccattccttcgggggtccgtgccgggtgccgcggggtaagcagtgctggtttcgtttcatcacggcccccatccttttgactagtaagccagcgttgcttaacttgtcagatcggacgggtacgcatgattccacttttccaagcaccccaccgaaagtagaacgaaataaccaaaatataaggaaaaaactttaaaaattttttattcttcacccttattcaaatataagcctaagaggactttgttaacatgtaaataaaatttggtgcacttttgatcagaacgcgaaaaactatgagtgattgaattttcactaaaaagctaagcctaaagttttcgcatatttaaaaccaattaaaaatttttaagaattttattcatatccctttttggtattaaaagcatcagagtgccttaattaacctgtaaataaagtttggtgtgtttcagagcactctctgaaaaaatattaatgaatttattttttcaaaaattcgaaatgtacgcaaaataagaataccgaaaaaatttcaaattccacaaaatgggaaggaaatttaaacctaattacctcttcttctcagctgttaccctgcaaaatttggtgcatttctgatcagaacgcgaaaaactatgagtgattgaattttcactaaaaaagctaagcctaaagtttttcgctcgtttaaaaagcaattaaaaatttgtagaatttttattcatcgccctttttgatagtaaaagcatcagagtgccttaattaacctgtaaataaagtttggcgtgtttcagagcactctgaaaaaatattaatgaatttattttttcgaaaatttgaaatgtacgcaaaataagaataccgaaaaaatttcaaattccacaaaatgggaaggaaatttaaacctaattacctcttcttctcaacgattttattgcttattgaaagagctagagccgaagaaatttttttaatttaagcttaaactttttggcatgtttaaaaagcaattaaaaattttatcatctccctttttgatagtaaaagcatcagagagccttatttaacttgtacataaaatttgatgcgtttcagagcactttctgaaaaaatatttatgaattaatttttcaaaaaataaataaacagttaaaaactcagaatttctaaaaaaatttaaaaccaattacaattgtcattttttcaggttaagttagtcctgtaccggggagtatgcctataaaatttggtacgattttattgcttattgaaagagctagagccgaagaaattttttttatttaagcctanactttttggcatgtttaaaaagcaattaaaattttattcatctccctttttgatagtaaaagcatcagagagccttatttaacttgtacataaaatttgatgcgtttcagagcactttctgaaaaaatatttatgaattaatttttcaaaa

SEQ ID NO: 6276 - DNA, 3849 bp, Heterodera glycines
  unsure (1)..(3849): unsure at all n locations
tatcaacagtctctctgttgnaccatttttgtaacatcagtaattttttccacagtctgtaatgttacgtactcgatttcaccgtttagtgttttgattccaattttgactagtctcgatgaaatgaatttgggtttattttggttaaaggtggatattgccaataatttttcgtcaattgttggtaattgaagggaatcagcacattcgtccgttatataacttttttgtgacccattgtcaaagaaaattacttcgttttgtgttctgttttggtcgggatttaatactggtgcttccgtggtcataagcaattcttcttcgtcattttgtataatgttatgattttgatcggaatcgattgacataaatgtttgggtttcttcgaattcttcgggattttgcgtgacgtttacttttgtaaattgttctctttgattagattgatttgattttcgggtacataggagggtattgtgcttgcttttgcaattgaaacatgaaaaaggtgatttgcattccttcaaatgatgtccttttttcagacagtttagacaaagttttaattcgcgcgctcgattacttcttttttccgtggttgaataaattttgcattctttgctcaagtgattgtctctttcacagaatcgacaaaatattatttttgtttgtggtttgggttgcgatggttttggtttaaattctgccaaacggacgggttttgatttggttgttaatgcagaagtgatgggatagggcgagagaggcagattttgatggtttcggtggtttgcttttagctggggttgggaatagtttgggtatgattgcctttgtggtctgttttgaggtggccggtgaggggggaaatttcttatttgtctgtttgaatcttccattcgttctatgtcttcacgagcttgagtgtgtgaattgagaaaactcattaattcttttgtcgagtaaagtttgaatttttctctcagttttagtcggatattgaaggggagtttagtctcaatggattgcttgatttggggatggtttatttcttcgccttgggattgtaattgtaggataattcggtcaatgaataggataaatcgtctcagttcgcttgtggattcatttggttttcttaaatttcttaattcgctgtgcagattttctctgatcaattgtggattaccgtatcgggatttaagtaatttgatgattatgggataatttttgtttgtgagggggtaaggggacacaattcggtatggttcgtcatgtaagagtcctcgcaagtatttcagtttttgtatgttctctaagttttggtcattgtggactgatgatttgaaatcgtcccaaaagctgggccattgggagaattttccggagaagtgtgtcagagtttggggtggaagttttattctcgatcgataattgacaaaaggtgtttgtttacggtttatttggtcatttgaggtcaattctggtgaatcgtcttcctggtcactgtcgtattctttttcttcttcatcttcttcttccatttcttcatcttcctcttcttgttcatcagcatttgagtcagattcctggtcagtgtccgaaagagactttgctctaattgttttgagtcttcttttcacacccaaatttatgtctttcagagtgtcgaggatttcgtctgtttccttaattgtatttaaataatcatgtttttcgcgaaaaattttctggattttccattcggttttccactgttctttgtccatttttctcatcaaattttgccattttttatgcaaagtttttaatttttcaaagtttggctcaattttttgtatgatttcttttgttttattgaacacccgtgtgcattcgtccagattattttggtcaaattcaaatttgttttcctcgatttttgttttgatcgactgaatttcttttcttagcactcgattgaggagagggattttgctcctgataaaatcagacattttttcctttaaaaatgatttgtgttgtttcttaattttggttggccaatttattcctttctgcgattgtaatcagttaatattttattgaggtaaacaattatcacaaaattaaattgggtttgatcacagtttagaaatttttgatcacagtggtcatttttatcactgttgttcgtctgaggatttgcttggcttcgtctccgtttcttttgtgttggttggcccgaaaagtttgttgtggtggggttggctccttcctttctttagttttttcactccttttcgggtttggaggtgcgcgggatgccgttgggtggtcttttttcactgaatggggatttgtttgtgtgttgtgtgtgtgtgttttttgaactgtggggatattatcccttaatttcgagtgttgggcttggtgacccttttttgtgagttttttgggtttgtgaccgtgtttactttcaaatggagtccggtggtgaatggttgggcggccggtgttcttcagaaaagtggcgacgtgctttcgaagggtcggttgttgtggtccggtagaggcgggcgtgcaattgttcccgggtcgtggcaccacttgtacgctttcgatggcgcacaaatgggaggggtaggaatttggcgagatgtgggggtgctgatgagttcagtggttggtagagggccggcgctgcttggtggtgctgggctttgagttgtggacgagtagtgcgagtcggcggggtgggggcggctggcgcaatggtgaccaggagagggactggttgtggcgaaattttggggtggacgcttagcggtcaatcggggatggtggaattgctgggggtcaagtgaggcgggaaagcgattcaaaatacactttattggagtcctcaaacttgggtaattaaaccgaagggggaaatgggggaacggcacaaaatgggggacggcagacggcacagaaatggggacggcacaatggagggaaaatgggggacggcacaaaatgggggacggcacaaatgggggacggcacagaaatggggacggcacaaaatgggggaaatttggagaaaatgaaacggtattgaaatggggaaaacggcacaaatcggaggacggcacaaatcggaggacggcacaatttggggacggaacgggagtggtcggctcggcacacgtcaacggcacgggacgggcggcattgagtgggcggtgtgtcaaggcggtagtcgggcacggcagggcacggatcggcatggcacagaagtcggcgcacgaacggacagggccaagagtcgacggcacgaacgggcgggcggcgcagttgtcggcggctgttgtcggcacggggggaaggggagggaggaaaaggaggacgaggcaatgcctctcagaaaccgttggtgtactgattggtggggggtttgtggcctccttttataccggcagtttctgcttgaacaattgtttgccaacttggcatgtccaaatttctgtccctaacatttgccaattttactaaccttttctcattttccagtttgtgccactttagccttttccaattttcttaacattttacaatttctttaatatcattcacattttgtctcattttaacatttgtttaaaatctgttatttcttttaacgttccaattattcataattaaattttaacatttgataatttttcggatagaaaaaattgtgactaatatgactaatgttttttcccttctctcattccttcattttgttcacatttaattaattaatatttatctgtctaatttaaaattaatttaaatgttttttgtttttaatgtttttattttttaaattaaaaatcc

SEQ ID NO: 6277 - DNA, 1613 bp, Heterodera glycines
tgaggcgggaaaagcgatgaaaatgcactttattagagtcctctaacttgggtaattaaaccgaagggagaagaaatgggggaacggcacaaaatgggggacggcacagaaatggggacggcacaatggggggaaaatgggggacggcacaaaatgggggacggcacaaaatgggggacggcacagaaatgggggacggcacaatggggggaaaatgggggacggcacagaaatggggacggcacaatggggggaaaatgggggacggcacaaaatgggggacggcacaaaatgggggacggcacagaaatgggggacggcacaatggggggaaaatgggggacggcacagaaatggggacggcacaatggggggaaaatgggggacggcacaaaacgtcggcgacacggcacggcatcagtggtgcggggcggcggcacggaatgggcatggcacagaacggtcggcgaacgggtcggcttggcagtgaacgggcggcgcacggatcgggcatggcactgaacgggtggcgcacggatcggcttggcactgaacgggcggcgcacggttctgcacaacagtcggcggcacgaacgggcaggcggagcagttgtcggcacggggggaaagggaagggagggaaaggaggacgaggcaatgcctctcaggaaaccgttggtgtactgatttgtggggggtttgggccctccttttataccggcagttcctgcttgaacgattgtttgccaacttggcatgtccaaatttctgtccctaacatttgccaatttttctaaccttttctcattttccagtttgtgccactttagcctttaccaattttctaacattttacaatttctttaatatcattcacaatttgtcccattttaacatttgtttaaaatctgttatttcttttaacgttccaattattcataattaaagtttaacatttgacaatttttctaatggaaaaattgtgactaaaaatgactaataattttccttcatttattccttcattccattcacatttaattaattaatttttatctgtttaatttaaaattaatttaaatgttttttgtttttaatgattttattttttaaataaaattttctatttcgcgtggtcgcgacaaatacgaggaaagatatgcttggtcacaataaaataaaaaatggctagtatgtaaaaatttgcggtcacaaataaaataaaaaatggctaatatgtaaaattggcgtccagaaatttttagactaatccgaagcaaagcacgaatgaattaaagaggcgaaagaattcacagtatcgtttctaatagggaaatattgacaggatattcggctaaaaacgggtttgatcatttttagcgcatttttaggtatacatttgagacaattgggcaggacaagaaaagaatgaagttgatgcctcatgaaactcggaattggttatgtttagtcgaaaatatccttacataatactcataaaaaatacaaataattcaacccacctattctatgaccacattctgaaaaaaatcccagaaatacgaggaaagatatgcttggtcacaataaaataaaaaatggctagtatgtaa

SEQ ID NO: 6278 - DNA, 1607 bp, Heterodera glycines
tgccaaccaacgcaaccaaatacagcgcaacggccggcacaattaaatcggcagacggaccagcgaaacgataggccaaataaagctgagaattaaataattataacccaataattttaattcggaaatagcgaaattaaatttaattaattttcaacggatcttctaagctggcattaattggtattaatcccatttttgtatttttgaatgattgacaaataagtcgaagtttatttgcttctaataatttgagccgaacttaatcgacacttaattaagcataaaaaggcaaaaaatcattaaaagatgaaaagaggattaaaaattataaaattccgagaatatcaaattaagcaaaattttattttcctatcgtctgccatttttgtgttaatttggccaaatttttgttgaattttcgttggattggaaattatttaaatttttatttgccaaaatgtcatacaacattaacctttaatgaccatgacaaagcctttcgttgaattggctgacaaactaatgaggtcgtctgtcttgtgatttaatgtatcttttcatttttgtttgatttgtatttggaaaatttaatgagaaaataaaagtgggtaagcttttgttgtcacgacaaagttacaaatttcatacaatattatcactagggaaacgatttacaaattttaaattggcaaaatgttcagcctaccagtagagaagggtgttaaaattggtcaactcaaaaaatgacggattcctactgtattttaaggaaaatgacgacgatcacttttttgttatttgatggcttttggggaattgatggaggttccaattaggaattgacaatttgtagggcccggaggttgaaaaagtctgtgttgggaatcgggatggcagggccgggatccagggaaaatctcagcgggatcccgacccagtacggcctctacatcttatctttttggccatccttttcaaattttacaatatcgcggatcgtcgcgttttgaaattttatccactaaacggctatatcgatgggtggctgataagtgatcagcgcaatgtcgaggcccagctgaaaaggccgaccaaatcgaacacccgaagccatcgtcccactgataacgacaacggacataaaaaactaatagaatttttgagaaatttatgattcacaaataatattgcttctaccattttttctgcttttcaaatgaatgagaaatgaattttgtatcaaaatttttcatttttctatttaaaattgtaattagaaaatttcatgagaaaataaaattgggcaagcatttattgtcacgacaaagttacaaattgcatgccaaattatcactaggcaatgatttttaaaaatatttaaaagaggcaaaatgttatgcttcggggtgacttttgactggtgggaccggtaaattggacaccagaaagttgggtaccaagcggacacatggattttctctcgagaggggggcgggggcaaaggcaaagccaaaggacggcaaatgatgcgcaaacacagcaaaaagaaatcatcaaaatgaacattcgagaatggtgtctagctaggtcggtcaaacaaaaaa

SEQ ID NO: 6279 - DNA, 1945 bp, Heterodera glycines
agaatgccaaagtttttttgtttgtttttagctgttctaactatgtcatttttcactgttctttgaaatgccgtttaataaatatggcccttccaagatatcattaggaaatttaaataattagaagcaattagcaaggattcattcgaataaacttattcgaattcattaaaaatgacattgtaaaaacataggtgctaagtgaaccgaaaaaaagtatcattgcttaaatggattaaccagggaacattaactgatggaagtttccgagaagcgctttatgctcgtcaattcgcggattggatgtaattagagcaaaggggccaagtgggagagggaggccaattaagggcaatttgaggacagcagaacttaattagcctgtattaagaagacgaagacatatcggcatttaaagcctcaggcgcaaaagcgcggataaaattaatttttcttttaatttatccatttttttttttgatcatctgcctttttgaaatttatatgcaattttttttataaatgcaaataaattttgtctcaataataaaagcaaaaaattttggggacaaactacagaattacccaaaattcattaaaaagcctaaaaaattgtttattattttttaaatcaaaaaattatttcgctaaattatttatttccctttctccgaatcacaataagtcacccattttaatcagataatgtgaagcaaaaaatcattggtgcatttttacattaacattctttcatattagtagtcagcttgggagtgaatattaattcatttggctctacggaaaaataaaaattctgaccttttgcgttttcccgagttgaagctttttataatttttttttcacttcgtaaaagcttatcaatagcttttcgacatgtgtagctttcgaataacttcaaatttataaatttggacaaccaagaaaaaagttatgatgctttaaatttggctcagacggaatgacctcctactgattccctaatgacctcattaaagcagattatatataatgacacccattggagcattgggaataattctttttgcctacgggcttactatcctgctcggacattgctcaggtaatcaacaaaacattatcttatttaataagcataaatttaattttaaattgaaaggattgaagtgcaaatccggcgaggatatggacgagacggactattcaccatacataaatgccacaactaaagagtgcatatttgatcagcgatattgtttgactgtctactgttttactggtgaatgaatgactcgggatatgcacagtagagatcggataaagggccggagacccatccatttatacgggttttcatgggcttgtaacccgtcgtttttagccaataggctttttaggaggtatggcttttttcgcccgtaacccttggtgtcaaacgaaaaaccctcttatccgtggcattttttatgcggtcttggtcgtggcatttttgcattgagcggtctgcttcgtgccattttttgtgcatggatgagtatggtatatggataagttgggtataaatgagttgggtttacgtccacttaccccttactcatccataaaaattccgatctctattgcacagtgtgtttatattggaataaggaccccccaccttccattttttgtgtgacttttatcagagtttgccatgagccgacctagctaaaattttggctcccggaaaatgtttcagtaatacagtatttctaaaataagtactgtaacattaagtattgaattacaaaaggtcgttctgaattttttttttcttttttttttgtattaacattttaaagaggttttaaaataattttatccaaatacccaaaaataaatatatgtattaataaatgaatcacataagttggcccgtttttaaattaattacataaatgtttt

SEQ ID NO: 6280 - DNA, 1902 bp, Heterodera glycines
  unsure (1)..(1902): unsure at all n locations
tctatagaattaatatttatnaggagataaacaaaaagatattcacccggtgggactcgaacccacgaccttcctttccgtggaatgctctgaccaactgagcttcgggcacccatcagcagtagggggcctgggtcagttcggcacataaattacacaacttcaaaattacccacagctttttaaaaattaagaaattagtattctcaacaaacaatatttattattttataggactttgttaaaaattaaaaattttgcaacaaattgtttctttattttaaaattttataatacatttttcaaacacatttttgttacaataagcaaatatatgtgaaaatttataaaaaaaaaactcaaaatatgttgatatgagtttattttattaatctccacttggcaacctgggtttttcctaaacctggattttcctgaatttttgcccagtaaatccaggtccaggcttttttcaaaatgccgacctctaattaaaacaatcaaagttatgaattgcaaaaaattaattaaagttatggattgcttgattggccactacgaccacaatggatatggcttggttaagaatggcacatgcaataaggaggacagttttgctttgtcgcacgttgtgcatcggtctccaactgtacaggtaaaacaatggtttacggtaaaatgccgaacatactactgtatgtgtattcaattgtatcttgtaagcaattttatttccctgtcacggcattcggtaccaccgctaatttcatcagtcggcaatcttaaactaattacaaaaatttctttatataattactttttccctcctaaaaatactttcaacagacatttcgttctttcaacattctaattacctaactagctaaataacaactccatattcttctagcaagaaaagtatgatggtttggagttgcgcgagaagcattcccggcgataaatacttgtgccaatgccaatttggtgagcagggcgtcaactttggcaacgaaaagcggcgcctgcccttagcgatgtataatatgtacaaataattaaaataactttataattaataaatattaattacataaaattataattgaggaatgtgtgtaggcatgaaaaacaacgcaatgaattattttgaggggcggcagctttttttaagccttaataatttttggttgttggcgatcggctttaaaatgggatcttcccccggggggataacgaaaaatgaactcggcttctgggcctattcccaatcttatattaattaaaaattttaactgtttctcctaacaattttctatcattttaagtagagaaaaaaaagtttattattattattatttttgttaattctattttttataaagcatttcgaatttttgtgatggcgggccaataaatgccatcgggaattgaaaattggccaaattttttaaaggatatttactcacaccgaaaacgccggagagtaaaagcaggaattttggggtccatttttcaaaaaaaaacgtatggaaaaatgggaatccagtggcggtaggggtcagttgcgtctgagccaagcataaaacatcataacttttttcattgttggtaaaattttataaatttggcatcattcgaaagctctacatgtttagaagcttttgataagatattgctaagcgattgaacaaattataaaaaagttacaacatgaacactaccaaaaagtcagaatttttgcatattttaatttataacttttttatatgtcggtatgtctttgtgatttttggatagccgatagagcttgttaagctctttcgaatgataccaacattgttggatttggtcaacaaagaaaaaagttatggtggtctaaacttggctcagacgcaactggcc

SEQ ID NO: 6281 - DNA, 1334 bp, Heterodera glycines
tttcccggttttggcagccaaaaattcccggtttttcaacccgaaaaggtcccggtcccggttgaaccttaaaattcccggtcccgctgcactctaactattattattaattactaggcatttattaaatatttttatatacttttgacaaaatatttttgtatttttttggtaatttatttttgtcgactatttatttcgggcttttctaaataaaaataaattttcatttttatattcgtaatttaggttatttgaacacgcaaataatgccaaggccggacgccgtttcaaacccaaggaaaattgccagaaagtgaaggaacgtatcgaaaatatggcgaagcgccaaatggaattgcttagcaacgactatttcaattacggcaaagaaatgtttttggaagattttgtgccgtaaaagaccgatggagatgacatgccatcggaatctgatcggccagaaatatatgtaaaaagtgtcaaaaatgcgctaataaagttaatacgatcaaaattctttagaatttatgtatatatccgtttttttctgaaatagaatcgaaaaatagaactatgggctttattgtatatccaggaacacggtggttttgtcaccccccccctgaaattttttaaaaataattttttaggcaaatttttgattgatctcaaatttggcgtttatttgggcctatttcgaaaaccggacccgaattcgaacaaaaagtctaaaattacattttaaaaattcggtttttcttctaagatagattaaaacaatcaaaaaataatcacgaaccattacaacatcaaaaaattatcattatgcacagcagaaagattcaaacataaatatgaatttctgaaaaatccgaattttcgactttttgttttaattcgggttcgggattcaaaataagccaaaatggatgcaatattcgagatcgcaacgccaaaaaacccttacaaatattttttcacgactttttaaaacaaaagtttttctgccgaaataggggggaaccacctaactaatactttttcgtcttcatgtcatgtgaatttttacgaactcactgtaaacacgttgtagctaaaaaaaatttcagatttgagatcactacattaaatcagcctagaaaaaaaaatttcaagggggggggcgtgacaaaactctgaaataccagtagttaccctccaggtttcgctgtagggtgtgaaaatgattaatgggttttttttccctttgatctttgccgccggcccggaggggggggggggtgattaataattaatgaggtgagggggggctaattatgaggggggggggg

SEQ ID NO: 6282 - DNA, 1501 bp, Heterodera glycines
aaaataaattttccctttcccattttagacaaatgttcgacgaggacgaaaccgacaggtatttttgcgaaccccggacccgaattcgaactattaccgtaataatttcccgctcacatttaaggtgttcaagctgaaaggcaatgttgaaatgaatgaagctgatcgaacagccaacgaagtgggttttattgaaatttttaaaaattcaaaattaaaatttttttttaaggaattggacaatgagatcaacaacagtgtcaatgccaatgccaacaatgggacaaatgccgaaacggtaagcaattgtaattaaattttcaaattttaatcatttccccattttgatttaaggtggcggcagcggggatgagcgacagcggtgccaatgccaacaatgggacaaatgccgaaacggtaagcaattgtaaataaaattttaaaatttaatcattttcccattttgatctaaggcggcgacgatgaccgagcccggcggaacaaacggtgccaatgccaacaatgcccatcagcagctgagaaagagggtcagttttggacaaatgatgttgaagtgtgggcccatgttggcccaccattggtttttggggtcctgattgggctcacccctgaggtgtgggcccagattgggctcacccttggggtgggggcccatgttgggcccaccattggtttttggggtcctgattgggctcacccctcaagagtgagcccaaactgggctcactcttggagtgtgggcccatgttaggtcaccattggtttttgggaccagattgggctcacccttggggtgtgggcccatgttgggcccaactttttgttttttctttggggctctgattgggcccacccctgaggtgtgggcacagattgggctcacccttggggtgtgggcccatgttgggcccaacttttgttttttgggatgtaggctctattgtgcattaatgttttaataaaataatttttttcataaaccgcgttcgggggcagccaagcgaagagcgaaggagcgatctgttgctcaaccaagagcacctgctgctacttgctaccaacatcccgcacatgccgtttccaatgatgatgccgatgatgatgccaatgatgatgcctttcaatttccccttcccgcctcctccccctccaccatcacaacaacaataatttttttttgcattttcacatttatttttatgcattttcatttatttatttttttgcttaccttcaataaatcaaattacaaaattcacgatcgaaattttgagttttgcttaaagtttactaataattcaatcaatgacagtgatcaaataaagatggcaaattttattggtttatgaaaaatgaaaatattaacgattaccgtaggcaatgaaaaaaaagtgatgatgatcaggtattactgttggagtacaattacacaaatattgtaaatacttaggatccaaagcaaataaatgtggcaaatttt

SEQ ID NO: 6283 - DNA, 1167 bp, Heterodera glycines
taagtaggacctctcttgtcagacaattagttataaatgagcattttttggcaggatcagcagcagatgcacggcatgaggctatcgcggattgacccgtcaaaagtcgcgctcacacacggaaatagcggaaaatgccggggaacgcggcgccagccacgtaggcgccgccggcagtggtcacgggtcagtgccgggctcgacgacattctcccgacgcaatcttcgcttcattataccgcaggtaaacgccgaaggaatgctaaccgccctccttagccaaacttttcctttgaatttgacttttttttgtgccaaaaaccattccaaatggttaacgtggcaacacttggcatttgccaattcagcagataaattaaccggaaaaagttggtttgtcatgtgtgaaaatttaaaacggaaataactttgccagtctttagcctttgctctttcatctctctccctctctctctctctcttcctctctcttcctttctctctttctctctcttcctttctctctttctctctctccctctctcctctctcttcctctctctctctctctttctctctctctctcttcctccctctctctcttcctctctctttctctctctctctcttcctccctctctctcttcctctctctctcctccctctctctcttcctctctctctctttctctctctccctctctctctttctctctccctctctctcttcctttctctctttctctctctctctcttcctctcttcctctctctctctttctctctctccctctctcctctctcttcctctctctctctctttctctccctctctcttcctctctctctctcttcctttctctctctccctctctctcttcctttctctctttctctctctctccctctctctctttctctctccctctctcttcctctctcttcctttctctctctctctctctctcttcctctctctctctttcatctctctccctctctctctctctcttcctctctcttcctttctctctttctctctcttcctttctctctttctctctctccctctctcctctctcttcctttctctctttctctctctctctctccctctctcttcctctctctctctttctctctcactctctctctcttcctctctct

SEQ ID NO: 6284 - DNA, 5978 bp, Heterodera glycines
gggccaaaatgaaaaaataaaaaagggaaatggggaaaaagcggaaatttgcgaaactgaaaaatgcgaaatgaaaaaaaagcgaaatgggaaaacgcaaaatatgggaaaagcgaaatgcgaaatttttttttaaaaattctaccaatgcttttgaggttgtgatgcaaaaaaaaatcttccggttcgatctttttctcagataaaaaatgacaaattctacccattttgtggttaaaatttcaaaaattaaggtaaaatgaaggtccggcgttgccgataagcgccgccggaaaattttttggaattgtaataaaatatggtaggaaaagttgcaaaattttcaaaaaaattactgtttttttaaaaaaataaatcgcaaaaaaggcaaaaaaatgcaccaaaaagttcaagataaaagcttcaaactaagttaaaaactcgttttcgtgcatattaggctatagcaagttagcaaaaaggtaattattagagttgcacgggaccgggaattttgacaaaaaccgggaccgggacttaccgggaccagaaaagtcgggaccgggacctcgattttcgtccgggactgggaccaaccgggataatttttgaaaaaaaatttgaaaatttgagtgcactttgttacgaaaaattgcctatattcaaaaatgtacccataaaattttttaattctcgtttgtggggagaaattcgaagaatttttccattatgcaattttgagtgtaatatgttaacagaaaataataaactgaagcattcgttttaaaaattaaattttcaaatatattcatttcttaggggtggaaatttcgcatttcgcgccaaaaagcgaaatgcgaaaagcgaaacctcggccatccctggtatttaccatttctttttaatcttttgtaaaactttctgctccgttttttatctttgtcttttctcttctgacttttttatttcaatgcgttttcattttgctttcatttatctctgaagaaatttgagccgttccgtcggtggccggcgggcgacaaatacaaattggaccggcaaaatggaaaatggggggggggcaattaaaatttaatcaacaaatatatttttgtaaaaagcaaattgaccattttgtttgaatttggcaggtgtcaatctgtgatgccgaaggtgtcccgaaagcagcgaacaaaaacagaaataaaaataacaacaacgacagggaggaggaggaggaggaacagaagttggaggaggacggaaatgagaagttgggcagcgaactgttcaacgatgaggacattgtgaacaacaacaacaacagccaaaagaacacggcaaatttagggggtatttgaaaaaggaaaattggtaaaatttgggggaaaataattaaatttaagtcaccgaagcggaggacgacggaatgctgacggagcaggacaaacagttgcgcaaggtgttgtccgacatggaccgaaagcaactgacgttggcacaacgccgtcaaagcaacatggacgtaaggggaaagcgaaattgtgtaattaggcattagcggcatttttagtgctattgtgaaatgttttgcattaattaatttatcacggagcgaaagagtcattaaaatgtttaaatttgcattaatttaaataccgttaattgccctcacgtcatcgtcattctctgtgcttatgccctcttttcacaggttgtccatcaggcgagcggtcgtcgcacttcgacaacgctaattccgttgaccagcgcccaaatccatctgatcagatcactgtggagacaagtaaaaaatggggaaaataattaaatgctaattaattagttttaatgatttcaaaattgaaaaatgctttccgtttgtttttgtcaggtgtatctgagcaaaggcccaacggtgatcggctcacagatcagtcatcggctgttcttcaaggaacccgagatgcgcgagatgttccgacgctgcgcattgccacaacagttcgccaaccatgacagtttttccaaggtacaaacagcaaaaataagttaattatgccgtgaattgactatttagtgctctaattaaactttttcatcattttttccttttaaggcgcactgtaagcaaatttcggaactgattgaccaggtgggcattgtgcaattgcccttaattaggcattagcgttgcctttatttgcccatttgtccaaaggttgtcgagagtctggacgatctcgagcaagttgggccattgttggagcaggtcggacgatgccatgcgcacatctccggaggacaactgtcaagtgaaacggaaccaaaataccaaattaattttgaaattgctgaaaatcttttcctacctgaggcaaaagaaagattttctataaaaaattatttaggcaaactttggaactccgtggccgaaacattcatcgactgcactttggagtggggcgaccgcagggcacgcagtgaaacggtgcgcaaggcgtgggcactgatcatcgcttacatggtaaaatggcacgaaaaatgaacaaatttggagaactattaattaactaattgattgacaattgaaaagaatttattttaatatcattttaattaagtgggaactatttattaattacattggccaaattgacaaattaaatcaattaattaataataattcactcattaattacaattaggtaaatagagaagaatttttatattatttacaggtggaacggatcaaacatggccatttggaggaggtatttattttattaattcaatgcttttaggtttagtcattgacaagccaagcaaaaaacatttaatttcgaataattttatttttttttgatttcattttatgaccgctcttttcgtttttgaattatccgccgatttatttcgctttttggcacttttcactctcttccgtttgtttcagcgtcgtcaaatcagtgccatccgctcgaccattgcgtcgttggagcgcgtggcgttggcgtccaccaccgtgcagcagccctactatgaagtgcagcagccgaccacctcgagcagcactcagctgcctgtgcccgtgtccagcttctgccacccgatccgccgcgtgtccgccttcgccaccaccggcaatttttcagacagtgccgccgcagcagcgcgagctgagcagcacggacgagcggccgggggagcagcggtgacgaccgtcggcacaatgccaaagtatccgatggaaattgcctcatctgaggcgtgctcactcgcaacatatgccaacgcttcgccctatgcaaaccgacgacgccacgcgcaaccgccgccgtcgaaggcgtccgcggagaagggaggtgggcaccaatggcacaatgccaaactcaaataggaagcaaatgccaatgccaaattagagagagagattgtttttaaagagaagaagcatcaccaccaccaccatcaccaccggcgcagttcgtcttcatcgagtcagcagtcgccaatgatcggatcggttggaaccgttcggcgcacggacggcggtgcacttgcgcaacggacaaagcgcacagacgcggctcggaagtcaacatcaaacgtaagggttatttacgcaacaattaaccctcattattaatttggatgggaattgaaaacggagcaaccgcatcatttggagtttgggagatgtcgtgtcatatttgggagggcattaaccaattttaaaccaaaatactattagcatgtttggcccttcccttctgttcggcttcatctctctccacccattctcgtcaattaattctcaacctcccccccccccccaattcccttttaggcggctcttcccctttcattgggcagtttgcggaagaaaatgtcggtgtcaaatgcgtcatcaatgcggaaacaaaacgccaaagaatcggccgatggttcgcggcgccaatggacggacatttgaaaaaaaaaacgaaaaagaaaaaacaaaaccacggtgaacacaagcggaaattgtgatttgattggtgaaaagcagcaataacagcccgttaaattaaaagtcgatagaatccgaattattaccattttgagagtattatcaaaccgcctattatcagtatcaattcaaatcgaactttattcttttcttttttattctgcctcattttccaccaaataaaggacgaccaaaatttaccgatgattttacgacttttattctgcaatttgcttattaaatattaaactcaaaaaacattacaatgaataattttatttttattttcattatttaaaaaaataaaggcataaatgagaagagaaatgtttgagttgatcggaatgatcaaatactatcagcagatatcaatcactataatcagagatagcagaagtgagagtttcttattgccatgcctttcagcgggaataattgaattttggcgatgccatggcatttatccatttcctaattcatgcaatcgaatttggccattttctatgtccactgatcagcaaaagtactcgcgtttagttgtctcatcatcaggcacgtgccgataatgccgtttctcctgctgttgttgttgttgttgctgatcaccacctgctgcagcactaagcagtcgcgtgtgcattagcgttggtacgcccgcgaaacggacattgccgcgggcggtgccgaattcgtcgccgttaccgtactgctgctgcttgtggtggtcgtcaccgtcgcttaccgtaccgcttccaaccggcacaaaagcgttgtgctcatgcgttttgtagacaccgtccggacgacgctgaatgtacagcaggaagacgcacaacgacaacaaaatgcaaagggcggaggcgaagccaatagccgctgaaaattaattaaaaagcaattaattggctattacgagtgattaaataaatgaaaaaacattaattaaatgggtggctattacgggtgatgaacaacagttggcgttgacttttcatcaaattggacgaggtcgcgtagatgtccgcgtgttcctccgccccattttcgcgcggcgaatcgcccgccattaatgaggacggcattttgcgatgttctctgaaaatgtgagtggattataaataggtaattgaaattcaatttaaattaacaggttgtcgtagggacagcttccgaagcgaattttgccggagtattggagacgcgacccccgcgggtctttcagcggaaatgcgtcgccgaccatcaaacgggcactaaatgagcaaaaaattggggggggggggtaattaggagcagagaaataattcaaataaatgggaaagcggttaattgggctatggcaattcacattttgatttccgcagctttgtgcttaataagcctaagccagtcaaattggatgactcattttgtgcagagtttggcacattaaatttgaaatttaccaataattgttttgattttttaggatgttaaaggaatacttgaattgtcaattaaattctgcttttatataataatctcttataaaactgacatgcatccggcaaagttttggtcgataaattgccacgaattgaaggcagagaaaaaagtgaaattgccctccaaaaacagtgcttgttcaccattaatctaaatgaaaagccaaatttaaagtgtgccattaaataaataattagcaattattattttattattattattacgctcatttcaaggccagtcaaattggcacagaagtgaatgtccttggatttgttgtccgcaaccaaaaagcgatcagacaaagtgacattatgcgagaaggaaaacccgtcaaaaatttgcacatttaattggcctaaaacaaacatttcgcagtttgatcagtagactgaaatggcacaacaatcactcaatcagttggcacgcccttccggcgccatgcgattaaaaaacaacaaaaaatgatgaaaaatgtgca

SEQ ID NO: 6285 - DNA, 1080 bp, Heterodera glycines
cattttgcgatgttctctgaaaatgtgagtggattataaataggtaattgaaattcaatttaaattaacaggttgtcgtagggacagcttccgaagcgaattttgccggagtattggagacgcgacccccgcgggtctttcagcggaaatgcgtcgccgaccatcaaacgggcactaaatgagcaaaaaattgggggggggggtaattaggagcagagaaataattcaaataaatgggaaagcggttaattgggctatggcaattcacattttgatttccgcagctttgtgcttaataagcctaagccagtcaaattggatgactcattttgtgcagagtttggcacattaaatttgaaatttactgacatgcatccggcaaagttttggtcgataaattgccacgaattgaaggcagagaaaaaagtgaaattgccctccaaaaacagtgcttgttcaccattaatctaaatgaaaagccaaatttaaagtgtgccattaaataaataattagcaattattattttattattattattacgctcatttcaaggccagtcaaattggcacagaagtgaatgtccttggatttgttgtccgcaaccaaaaagcgatcagacaaagtgacattatgcgagaaggaaaacccgtcaaaaatttgcacatttaattggcctaaaacaaacatttcgcagtttgatcagtagactgtaatggcacaacaatcactcaatcagttggcacgcccttccggcgccattcgattaaaaaacaacaaaaaatgatgaaaaatgtgcagctgttttttttgcaatggaagtacaattaaaaaaaaaattcaattttctaaattattaataatttaaaaagccgccttttcgctgttaaacccaaaaaatgtgttaattgagataaaattgtggctgaccaattgtgtcgattgtcatgttgaaattggactcggcgaacagtgcccgggcgcggattctgacaaaataaaatatttaaataaacggcgtttaattaaatttaattgattttagaaggaattttcttacagtgttatttcggggacgccga

SEQ ID NO: 6286 - DNA, 6261 bp, Heterodera glycines
aatatccaaaattgaaaatcgtaagttagcgttgataattaagacattgtttctagtttaaaaccattaacagaatataaagtaattcacttattgtgcggattagacaattccaacttttttttttaattttttaatttttgtgtctttttgtttttttattttccaaaaatagggtcaagaggtgtcgttttcaagaactgtccttgaaaaatgtacaatgtgagcaaaatatcgaataatgtcaaaaaatctcttaattagtttcaagcttcaaaccaaattcatgaaaaataataaaaagtacgtttgcttttttctttgtcaattataatacttaaattctttttaaaaataaaaaacattttcatttttggatggagggaatcctaaaatttttttttagtaatttaaataattttgggaaaatttctaaataaattattaataaaaattcaagtggcggataaattgagacatcgtttgaccagtgtcttctttttatacagcaatctttgccggtgattgtcgcgtcaatgttgccctgctattggctctaccgcgaagtggccaaatggatgttggcagaacgccaaaaagccggcggcacaaacaccgtaacacagtaccacgaatggattgacatgtactgtagtgaagagtatgccgaggcggtggacgaaatgttggcacttgcggatgaattagcgcaagaagcggatcagcggacacgcgcgaaaatggccaccgtttttgagcgcggcttccaactggaatggatgttctggaagtccgcctatcaaatgtgccaatgggaaatttgattttcactaatagctggcaaaaatggctaatgcctaattactgttgggtttaatttgtgtgattagagcatggaaaaacaaaataaaattgtgaattttaatcacttttttaccttactcaagcttagtagtttacgataaattatagattactgtttaattaaattgattcactaaatgataaaaaaagtggaaatttatatttttagtcaaattttggttaaaaattaaaagatattggaaaattttttaataatacttgagatatgtattttttgtaaatatttttttgttttcgttaatttatcacatggtaaatggaaattgaaaatacaatcgaatcaaaagacagagaaatatgtagatagaagagtgaatgtgataaaagggataggaagaaagagaggtagagaaaaaaagacaactttgtagtgatcacgatcatgacataacatgaccattgagcataaaaagcatcagtgatagagatggggtgggagtgtgtgtgtgtgtgtgagagagagagaagagcgagaaagagagagcgagagagagagagagagagcgcgagagagaaagagagaagagtgagagagcgcgatatggagtacggaaaattaggcggtggacagaacgatagatgtactatagatataacttgtttagtttttccaaaaatttcagaatcttcacatttgaacataaaaaattaatttttaataaattttttcctgaaatttaattgtacatttgttatatccatcatattgtccctgcctacggtttgtatttgttagtaaaaatgtatagtcgaggtggtggcatgtcataaacaaaatggaaaaatagaaattcgctcaaaaattatcatatattaaatttttcgactcccattatcgatttaataattctggggaggaaataagcaaatcgtatattcagcgaaatcgggaccagggacggcgaagctcggctcatcactcgaagccgaagccgaagagcgaagcccaatttttattcgaaggcgaagtccgaagttcgaagctcaaaaaacccgaagttttcgaagccgaagccgaagtttcgcccgtccctgatcgggacaaaaaaaccagatttttaacaaattttttgcggcggatttttccaaaaagacttttgggatggggggggggcggggtaaaaactatctatattttacgattctgagacaatttttttaaagaaatttaaggatttttagggtacggtggtgcagataggcgccgcccggaaaatttaaaaatttctagataaaatactgatattatgtcataaaattccaaaatttatgaatatttttaagaagtcagaacaaattgtgccactaccccaaaatcagaacatttcttagaaatgagaacagatcacacccctgctttaaacagacacggaaaaaagggtgagggaggggtcaacgaaatttttgcgaaggggatatgtttataaaattttggaaaataagggagtcataaaatatttatataaattttcaaatgtaacatttatttagcaaggactatttacgaaaatttgcaaaaattaataataaaaattgaaataccgatcaaaaccgaaaaaataacttgcacaaatactaaattgaatttatcgttttttaaatttttgtatatattttttgattgaaaaaaactcatttaataatttccattcttaataacaattaagggcaatttttattaattattttggaaaatttcgcttcttcatatccttgtcctgtatttaatgcattttcttataaatttttctattcattcatttattttattgatgattttggcattttctatttttgttttataattcctccacacctaattattattgcattgaaattcataggctcatcattttgtccattccatttcgaaaacgaggccattaaatcgatgcttatggcctatcctttccccaccccaaagtccaattcattctgcttttccttctttacgaggttattcatcggcggcttcacatagaaaaaaagaaaaatgatgatgcattaaaatgcaattaaaaccaataaatgtacggcccaacgaaaagcctttaaagaaaagccaatttcaaaatttcaaaaaattcccttgaaaaatttttattttctcaaaaattcttttctctaatgattgaaaaattaaagagtgaattttcatcattcgcatctcaatcacaattcacatgaaatgtttttgtataatttcaaattgaatttttatttgttagcaattttattttaattttaattatttctgaatttggggttttaactgagaatttctatggtccgccgttccaattcgattaaaatggaaaacaaattaattctccactgcaccgacccaatccagcagcccaaagcatgagttcttgttccttttttttcaagaatctgggctcctaatgcaaccaacaccataaacttttttgactaaataatggcattttggattcaaaattggtatttaatataaaattcttaaaaattaaatcgaaattgttttagcttctaaattcctacccatttttgctaatgaactctcctgcaacatcaaattcattgattttggaggcccaggccgatttttcactaaatttgttgcgcgaagtgtccaaggacggccgttcgtgcattgtttcaccgctttctgttgccatcgctctgtccatggtgtacgcgggtgccaaagaaagaactggccaagaaattggacaactgttggcagggggtgaaaatttcatgaaaattttaaattaaaattatttttatgtgcataattacagtgttccaatgattaggctagcccaggagtatatgataggaatattttcagtaatcattttaaaatataaaataaattattatcggcagggaagtagggtaattaggggggcgggggcggggtagtttaatcgaatttatacaatatcaacaataaaatattttgcattaagttgcgcttgagtcggaagtgcacaaatatttcggcgatttactcacatcaatcaaaagtgggcacaacaattacagcttggagctggccaacaaagtgtacatcaaggacggctttaaagtgttggatgcgttcaaagcgcaaattatggaacattacgggggacagtttgaggcggtggactttggggacaaagaagggactgcgaaggtcggaaaatatttgaagaattcttgagcaattcttgacagattctgtacaatttaccaacgaattttcagcaatatttcgatgggcaaaagttttgtcaaaattaaatttgaagagtttaaatttcttgtaaaccatcaacctccattaatttactcaaaatgtgaaaaaacaagagataaaatgtaaaaataaaacacaaaatttcggagttaaagattttttggtttattagcagctgcattttttttatgaaacgtgtaaaaatccttcagaaaatgatttagcagaaaaacccccaataattgataccccccattatttaattgcagaaaatcaacgactttgtggaagaagctacacacgggaagatctatgatctgatcgagccgaaccttcttggcgaaatgactcggtgtgctctttttttcttgataatctattgattattttccgattttccataaaaataaaattgaaaatttgtatttattgacactatcaataagttaattaatgttttaatttcagtttggtgttgatcaacgcagtttactttaagggcaactgggcgaacaagttcaacccgaaccttaccaaaaagaaaacatttcatgtggacgaaataaacaccaaagaggtggggaggaaaaaaataatttttttttatagtaattaaaaaatattttaaatttattttttataccattgagaaggtattttcgtatctaaatttattggccaaataatctatttttaaacattatgaaaattgtagtaaaattcaggcttatagagaatataatttaaatgtacaaatttagtaattttggcaactttctgtatgaataagtagggccacaaaattatacttttttcgttacagcatgtttgtgttttatgaatttaatgttatgtcaaaattttatttaaattcaaaaagttttcaaaaaaaatcgaatatcaatgactaattttccattgatttattttcatgccgggctcttaaaaattgtctctttattagctggacatgatgcacaagaaagccgatttcatttatttcgaagatgaacaggtgccatatttttaataattttttacttaaaattaaaaaaaaatgtttttcttattttttttatttgaatttgtgcatagctccaactgctcggcatgccttaccaaggtggtgaagtattcatgtttgtgctgttgccgaaggaccgctttgggttggccaaattgttggccgatttggacggcaaaaagttgctggaattaaccaaagaacggcgcaaaagcgaagtgcaagtaaatacaataaaacattttgccaagtgagcattttgcattgtgttaatgccagaaaatggtattttcagaaaggccatcagtaaaatcccggaatatatatccgtttgttcaatctaaatctggatttcatgtttgggtctgtattttgtggaaaaaacccagtaaaatccagatccagaaataaacagatctggacccagatacaggtggagcttaaacaaaatgatcattgacatttcatgcatattttatgtgcatatttgggcattttttcaaaaaatcctctattaaaagggcctcttctattaaagcggcccttttgatctctaatgaccgaaaattattcaaaaaatttcatttttttgctgttgttttctcgaaaatatttataaaaaatgtaacataaaaaagcgaaatttatgccaaaaataagtccaaaattcggaaattttcgattttttacttaattttcttcaatattaataaattttagctttattttgtatttttttctttaaaatgatttttctaccatatttagctattttcgagatttttagcataactttaacgaatgtgaagaaagcttagaaagctgttgtttttggtcccgaaaggatcggtacaataaaacaaaacgggaaatttaaattcgaaataaaattaaattgagagtccaattttcgaaagcttcggcaagacaaaccggcaaattatagaccatctcttactgtactttggcttcaggtggtgttgcccaagttcaagttggagtccgcacatgagctgaaccaaccgttggccaacatgggaatggccaccgccttctccgacagtgccaattttgatggcattgtgacggactcgttgaagattagcgaagtggtgcagaaggc

SEQ ID NO: 6287 - DNA, 3052 bp, Heterodera glycines
  unsure (1)..(3052): unsure at all n locations
taaaaaatttaatttatattagttttatctttaccagttgaaacaaaaatcttttcggaaacctttttaatgaataattttagaaaattaatttttagcggcttttaaaaaatttcaaaaatttggagcaaactcattcagtctgcttgtatttcattcatacgtaattatgagaaaaatctaaacaatttaaaaatggcatatagttagtccgaatcaaagaataaaatgaaacttttttttggaacctttttggaaattttcaacactagtaccaaaaaaatcaatttataacgggcgccaaatagccgcgccagaaaagcaaaggccaaaaaaaccgcgccaaactgatccagacccactttggcttgatttggtattaccagtgaagaaagcaccttaatgtggataaaagctgtcccattgttcgccaaaagtgcgcctttaattgcgcaacacattgtttagcctttagatgcaaagtgatatgggaaatttttgagttccggtcccggtttaataaaatacaaaacacaaaaaaaaatatacaaaactctacttaataaattaatgaatattatgatattctatcgatgttaattaagattataataattcttttctgcatatacatatatttcttttttacaaaaatatttctcttaatgaaatgaatttatggaatttaaatatatattatatatttttttttataattgaatccgacaaaatacgaccaaattttgataaaatatttggagatggatatgacaaaatgtaattgaagtaaaagtgataaacacggaacaaaatgacgaaaatgaaaatgcactgatagatcaaatagatggagaaaatgaatcggtccaaatgatcaccaaaaaaagagaaaggattttaaaatttagagcaattcaagaaaaattaaaaaaaaatatccatggcaattcagttccaaaattgatacaaaaattgcaaaattcttaggcgcaactcggaaattaataccaaaatggaaaaatcaattaaatttaaattaaaacaaaattaaaaagcgattttatgagcacaaaaagcgcaaatttattgaacgatttgatgaattaaaacattttttagcaaacagaaagaatttgtgaaagaattgggcatttctgaagcaacattttggaaatggaaaaaagaattggttcaaaagcaccaaaaaagtgagttgatatttttttaataaaaactaattttaaacacaataataccaatgaagatatttagaaaaggtgaagcaatattttgaaattaaggaaaaaacgcaaaaattagcgacaaaaaaattgcagagaaattgggaattggattggcaactctgaaaaggtgaaaaaggatttttcttcaatttcaattttgaaaaatgaaatgcataaaatcaattcaagttatgtgatttatataggttaatgtattattcccattgtgattaagcctgaaaaatcattgcgtacataaagtaaaattcatatgaacattctgaatgctgaagttcggacccgaattcgaggaaaaatcaaaattccaaattttcgaaattaatgtttttgattaaaaatcggtttaaatacacggaaacaaactgaaatccatcaatccttcaataagagatcattcacgccgttttaattccaatcaatcaatcattgaaacgcaaaagcgtgacgccgaaaataaagaaacaatatcaaataaaaattacgtcactttttgagatggggtggcaaggaaatcaacaaatttaaatcagattttacaagaaacttgacgaattcatttgaatttaataattacgtctctttaggaaaatggctacatgtatagatgagaggttcgaataaagaacgaattttggaaaaacaaaaaggattcgttgtttgtttttgtaaatatattttaatttaaaataatttcggggaaaagttttaagtctattttaacctacaactcacaagcgattcttgattataaattattaacaattcagcataattagattgtgacaaatgaatgattgttaattttttaattgaataaaatttgaaacataaatttttttcagcagatcacacgggacaattaaatccagtaatttcgtcaatccattctttgtccagcggagtgtataaggatacaatgcctgttgagaaaaaaataaattaaatttttaaaatgaaaaacgaaaattgtctaatttgtaacaaactttggtttgaattggtgttgcatatcccagaagaaagcaccccaatttggacaaaagctgtgccattggaagccaaaagtgcgctgccactgtcaccctattaaatttgaaaaaacatcataattattggaaaaaaatttttataaattgaaaacaaaatttaaaaagtggcaatttttagttatttgttttttttgcaaataaaaactatacaaaatcaatgttaaatgtacaaaaataatttgttaagaatagaatatttaaattcattaaatttaaaatatccatttacatgctgaagaatgtttggctcgacgcaaatttgtccttttgcttcggattctttttgacaattaattagtttagcatagcgacccattagcatttttgaggtcgtagtaaacgttgcacagtcgtcttaaagaagaaaaaattataatagcataaatgaaaacaattcgttaattaaccaattaaaataatataaattcatttatttaaatttattccttgaaattaccctctaattatccccatcccgcaacaaatacagttccatttaggaatttgttagctgcaccgcaatggatgcaaattggttgaaatagcggagctatcaaaggacggctcaactttaaaaaaataaaaattaaaaaattaaattttattanaaaacaaaccttaattanagccaaatcggattcaaatgttttgtaattataatttggatgaatgaatacatttngtctgtcttgtcgatgttcagtgattctctgctttgcatccgntgcattcaaattc

SEQ ID NO: 6288 - DNA, 3210 bp, Heterodera glycines
  unsure (1)..(3210): unsure at all n locations
tccctaagtanatcccttgaatgataaaaaaacctttgaccattggtgccattatgcttcaaattgataattggatcaattaatttggatattttcaaaaacaatttactaaaattaaaaaaaaataaaagttgagtttaaatttaaattacaatattaagttttaataatctcaatatttttcttcttttatattttaaataaattattctcattaagaaattccataatttactaaatttatttttttttattttgaaaaatacctcttttcttcccatccattaacaatttttgctccggtaatgagaataacaaataatgaaaaataatatttggacttcattttattgaaaagtattgggaatttgacaaaatgaatgaatttgtttagcacttttcatttttcagaatgaataatttgttatcgaacgaatgaatcaccctgagaaatttataatttttcaatgtgtgctgaatgcgaataagtataaattttcattttatcattaaaaaaggataaatttatttttgcggagccgacacttgaggaccctccaaattacttagcagaactaaatgccggaaactgttgtcaccgataatggcacacagtttagctccaacggtttcaaataattcgttaaagaaaatggaataaaccacctcttctcagcgccatacaatctcgagtcaaaaggacaagcggagcgctttgtcgacacctttaagtgaacatgtcggaaacagaagaaggagggtgcacaaaatgtagtgaatacatttttgacatcgtgtcgaacgtcgccggatgattccttgcacgacggaaaaaatcctaccgaactttttattcttcgaaaatctcgaacaacattggatttgctgcgagcaaaaactcagccctttgatcagaaacgagccgatggaaaagcaatttaatcgcgttttttacgatctaatctaataaattcaatatttagtttttaatacacgaaaatgcggtcagggtcgttttcgtacgggccgttttcgtacgagcccaagtttttggctataacttttttctttattaaccaaatccaacacttttggtatcattcgatagctctatgtgtcctctattagcctgcaaaattgcgaaaaatagttcaaaaaagttatggccagaaaaattcaaaaaaccaaattttccaacttttttggctcaaacttttttttaaaccgaacgaaattttttggaattctgcaggctaatagagtatcagaagggctatcaaacaataccaacaatgttgggtttggtttacaaataaaaaaattaaagtccaaaaacatatattcgtacgaaaacggcctggcccgacgaaaatgaaagtaatatatttaattttgataatcacaactttaaatgggaaaatttttgcagccgaaaatgaaggattgaaaagaatcacattatttttcaagaaatattgggaatgtgccggaccgaaaggaaaagaccgaaattcctaaatttattcccgaatttacccattttatttaccttttattgccaaatgccatttacatcattagattagttaatagagatgcataattttatttgcttccaatcaattatagattttctatgcatacgtaacatttcccatgtaaatattatttcatttttattttattataaaatttttgttttactatttatgataataatttaaatatttagcttttttttaatactcgaatatgaaagtaatatatttgattttgataatcaactttaaatgggaaaagttttgcgggcgaaagtgacgaaaatgaaaagaaccgacaggcctttaacatcttttcaaacgctgatggtcaagctaaataataaaaataaattaaaattaaactttttttcatgactttttgattggctgacacttgcggcgcccagtcaaggcgaaacttacggcgccgacacttgcggcggagacattttggcgctgacacttgcggcgtttagtcatagcaacatttgcggcgccagagtgacctaattgttttcataaatcctcattctgcacatagccattaggtagaccaatttttctacaaaactaattggtagaaatgaaaaagacgatgtttgaaaggtattaattatattgctaatggcatggcgataatcattttttgcaaaagggaaaatatatattttttattatgaaatgatattgtcaattagttgtcaatgatattgtcaattagttgtcaaagtgattttttaaaaatttgtaaatgcacacccataagtgcttgcaggattagcctcaaaagatatggggtggggatcgcaacgaacttcattaatgtatttacgggtataaatgaaaggaaattgggaggcntaactcaaaaattaatttcactaattgaacagttattttgtaacttaaggaattaatgagtcataaaagaatcaaaataaggtcagtacttgaaaatgtttatttaacgaaaaccgggccatgagaatgaaccttgaaaagtctcatcagctgatcattgaattaatgttaaattaagcacgcttaaattggaataattattcaaataagcattttgttttagtaaattgttgcaataattttggcgtcgtttaattatgcaatgcaaatatcgttttgagccgcaagtgtcagctttgcaagtgtcgacggcgcaattatcggcatcactgactttttttttactttttcgtaattttgggtttttgtgattttttggaattttgtcattttttaagtgaattcactccgggattaccagaaaattttgcttaacactgtggaatgtatccctaaatgagattttttcaaaattcattcgtcacatttattcaattttggtgactttttagttatttttgaatattcaaagtttttttttttgttaaagatgactttaatgaacttgttgacaaagtgtttgtcgataagccaaaccaatcagacgctaatgagaagccaaatgaacagattgtcaatgccgaaatgtctgatgaagacaattcgacggatttaagtaattaacaaaagggattaaaatatgttttttttttgctctttcttttactaaaaaacatcatgttaggcaatttttaggggtaatttattaaaaattgtaacgttagaatgtgactctagaggtccccgg

SEQ ID NO: 6289 - DNA, 1601 bp, Heterodera glycines
aaatttggcattgacatttcaaaatacatcttgttttacgtgatgctcagtcggcgatgaagcttggcacaaacatccttggatgtgattcccaggattgttttttacataaaatgcaacttgtaagtctgtgttttcttctagttaaaaatgaaaaattaagtcaatcggtgatggtattaaaatttactcggattttttaccgctttctgaaaaaatcaaaaaagtcattaggaaaataaggaaatcatcagttcaaagagaatattttcaaaaactgcaacaggaaatggatttaccaaatcatgttttaattaaatcaactgaagtgaggtcagttaaatgtctttgataaaaattcttaaattcattttaaagatggaactctgtttatcaaatgtgtgagagattttatgaaaacaagacggctattggactgtttattggaaattctaatattaatattgagccgttttcgggttgtttgtcattttattttttcacacatttttttaagaaactgattgggaattgattcgtacacttgttgaccaactcaaacctatttatcacataacaaaagaactggaaaagcgggactcaacaattgcgtcgattattccaatttttcggtctctcttgaacaaattgagaaaatttaatagcgcattttctaatcgtgttgctgatggtttggagtcgcgaatgacaggatgggagatgaaaaggtgaataaagttagcaataaattcaaaattatctataccagaaaacttatgattgcaactgtgttggatcccaattacaaaatggatttttttgaccgggaaatgcgcgatatgtataaacggtggattattgatgagctatcacaggacctcgatctcagccaaaattttgacaattctcagcttgtgaacgaaattgctgaatgttcaagccaagactcgaacccagtaaaaagtctattggatgaatttgttcaggtccaaaaaaaaaataaaatcacaatcttttacatatttaggaaaattctttcgggaataatgaaaatttgtatttggatgtaaacgagacagaattgatcaaacacgaagtgaatgcgtatctgaacaagcctcgcatcaactcaaatattttcaattattggtcgataaattccgaaaaatggccaagactgacaaacttatttaggttacaaataaagtaaacccatataaaattcattaattaaggcgcttcaactcggctcctgttggttctcaggaatctgaacgacttttttcaattgccggaataacacttactgatttaagaaatcggttaactgcagaaaatttggagaagcttctttttttgcatcggaatttaccaatttataatttttcttattgatttttaaacaaattaaaaatttgtcaattgacccgaaacccgatacccgaaacccggcctttttctcgacccgaaacccgacccgatgatttttcggccgacccgacccgaaacccgacccgatatttttctcgacccggaacaaccctgttatggatgagttgggtatggatgagttgtgtctatggatgagttgggtatggatg

SEQ ID NO: 6290 - DNA, 990 bp, Heterodera glycines
aaataaatgatttgaattaagattcgaaattgaaaattggcaaactctgatcattgtggcccaaaggattccgattttgtttccaaaattttttggggcctcggaattttaatttccgtaattttttgataccgcggaattcctgttttcgaattttgtggtctcatttaataaaccaaagaaaatcgcgtgcttttaaaccttaggctaatatgtattttcatgtgctatgaagaatgaattcaaaactcgtatttctgcgttaatgatgatgtttttttttgttcatttgaattcatattctgaaattttcgaaaataaaccaaaaacatatttcccattttgagtttttttttcatattttggcctgctttggaaatttttatttaaaaaaatcaaatataaacaaaaattacagccctaaaaattgttttttttttgaatttaaattacaatatttaatctttttttttcccatatcagatttattgcagaaaaacatattaattttagttaaaaatttgttttgttcctttttaaacatttttgcgtaagtatctttttgatattgtattaagcaatgattggcatttctctgtaagtcctagtcaagcaattaattatttattacaattttttaaaattaaaattgtaaactttcaatttgtatatatatttttcttcattttatgcacaattttctcgacaataattaaatggaaaattattgtttttcatgattgacagcttttagtgcgcgccgcgtaagattaataatataagcaaatgctgagcgtgcgtgtgtcattaattctttaattgaataaaattcaaaaaaattaattatcatttatcgcctgaagcaaataatttgtcaccccccccccattttttaaatttaatttaatttttgttttcatttctattttgatccatctggtacgcaaattattcttaattaaatttttgcctttttttgcttaaatattt

SEQ ID NO: 6291 - DNA, 3361 bp, Heterodera glycines
  unsure (1)..(3361): unsure at all n locations
ccccccccccccattttaattaaatntaattttgttttcattttctattttgatccatctggtacgcaaatattcttaattaatttttgcctttttttgcttaaatattttgctttttcatcattaagatagaattttatgcgatttatttaaaaacctttgtaaaaggatattatttttttaagatttttttgtgtaaaaattcattnttatattataaataatttgaattccgctttttntaatcgattggatttttttgattattattaaaatttctttttatttaggtattaattcacctaaatttttttgctattcatcacaaatataaaattttatgcgtttattaaaagattttggtaaaaggagattaatcgttttggagtttttttgagtaaaataaattttatattgtaaataattagaaattcgcattttttaatatttttttttggaattttttttattgggtaaaaaatcaagtttatattataaataattaaaatgaattttttcttttgccacttcctattaaatttctttttgagaattttttgcgatttattaaaatatttggtaaaatgagattaatcttcagtttgggtaaaatttaagttatatagtagtaaatcaatagaatattcgcattttttaataattttttttttttggaattttttttattgggtaaaaatgaagttttatattataaaaaattagaattttctcatttttttaataatcttttaatttttttattttttgccacttattatgaaaattttctcagtttaaatctaaatttattgcaaataattacaattttaatacagaagaaaacatcgccatagcaactagcattggaagtggagcaaagaggcaattataagccggctaatgaactaattaaaatcttccgaattattagacaatagattcacaattgtttcctattttttttattaaaggatttttattcaaataaaattttgtgtcggaattcttaaattaaatttccattttaataattgttttttatttcctattaattaaatgggcttcttaattaattttcaaacaaaatatcatttgcaaatttttttattaaaattttttttgaacaaaattttcaaataaaatttccatttttagtattaaatatattattttttttacaattttaatgaaattccaaaaaaaaaataattcacaatttgtttctattaaaagatttttatccgttcaaatgaaatttccattttttagcattaaacattttaattttttgtttattaaaatgggcgtttgtcagtcgcaggaggaaattaaggcacgagaaatttccaagaaaattgatcgtgatctgcaggtggaaaagcagttcagacaaaaattgctatttttgggtaattttttcaaaatttaaatttaataattaaaattaataaaaaaaattaccaaatgataaatttaggaccagctgaaagtggaaaaagcacatgtgtgaagcaaatgcagtaagaaaagttgaagataactgtgttaattgcttaagtaattttaaaaaatgaaaaattttttgactctattgcactttaggcgtacaacaagcgccttttttcgttaagtgtctcatggatttttagaaatttctcatgtccaattttagtatatgtccattaggggtgtaaaatatcaaaatttattcaaaaagtaaaaaaaaaataggccaagagttataatcaaaccgaaagaaacccattttactgaagattgccattgattgaacgcctaaggtacaacaaagcccaatatttttaggtataaaattttttaaaataattaattatttaattaattaattttcagaattttacacaataatggcttcagcaaaattgagttggaagaacgaaaaagcatcgttttttcaaatacaggttaaaaataataattttatgtaaaaaaaaagtaattattcattcattttgctcatttgtcagttcgaagtatgtacgagcttatacaaataatgaatgaattgagcatacgatttaatgactcagcgctggaggtaattattattattatatccaattaatttattattcttatttttaattgttaaattattttatgatatttatttatttggatttaataatttttaaacatcgaactttaatccaattaaatatttttttttcattgtgaatagtcaaattatactatgacattttcaactattaatttattttatttttaaacattcttaatataacaaccaactattattgaattaatatttatttattcattttaatttaatatttttaaaccatttataatttagcgattattaaaagattcaaatatattttattgatagattaaagctatcacatttagatgttaaaaaaatctatttatcttctattaattgttatattaaaattaaaaaaatccttgagtttgtaaaataaaaggctggggatgcatcacattaaaattaattagttaattaattaattatttttaaatataatttttaattaaataaagaatgaagtcaatatcatacggttacatgtcgagaatggtcttgaatacactgagatcacgtcatcagtgaaattggcaatccaaaggctatggaaagattcggcaatcattgcggcagcgactcacaaaacaaattatcatgtcattgatagcgcatcatagtaattaatttgctaattaccgacagataaataaatattaattttttaattggggtcaattaatatatttttatattacagctttttcgaaaacattgaaagattaacagaaaagaactatttgccaacaaatcaggacattttgatgaccagaatgccaacaaccggagttgtaaagcttgtatttacgctcaaaaacatcgaatttaagtaataaaaaattgcgtaaaaattcaatacgaatttttgaaataaattttacgattaaatataaaataatttaaaaatcttttgaccttttcaaactcgctatcctttgaattaaatatataaaacagttaattttttataaattattttcactttttctttacatataaaatttttaaatttttttttttttcattttttttaaataattaaattttaaaaattattaacgtttattttgacataattcattattaataaaaatcaaaaatgaattttattttaataccttttctgaaacatttcagataaaaaaaatagaataaaaaataaagcaaataaattttatttctattaatttttttaatggtttttgacgttggaggccaaaagtcagaacggcgaaaatggattcacttttttga

SEQ ID NO: 6292 - DNA, 1855 bp, Heterodera glycines
  unsure (1)..(1855): unsure at all n locations
aaaaaatttccaatctgaaattgacaagaaaaaagaaaacanttgggctttaaaattattgtagaacgagaaaaaaaatgtcaacaaaaaccacacattgacgagcaattcagtgctgccggtccaattgctgtgcttgcaattatggatatgacaaatgtaagggtggatggagtgcccgaatctgacaatttcgtcctgtttacaactcaatcaaaaaaagtgagcttgatcaccccaaaaagtggagagcaaaagccagaacatggtgaataccaagtggaaattgggattaaaaaagcaacaaaaattagattgcttgtcaattttaatgttgacacatttggcaacgcaatgacattgattcttgagaaaatcaacaaacaacgccaagaggcgaaaaggaatttggtgataattacggacatgggggtggatgatcaagttgcactggcgatgatcagcgcaacagaattggccggtaatgtgttggccattgggacgacggagcaaggaaaagaagcagcattggcacaatcactgggatttgagaaagtgccagtgtatgtgagaagaagtaatgaagaactagagaaaatgttttttatgaatcccaatcatagtaggttcagtttgcaagttgaaacgtatgtcggcattttaccctgaaaatttttaattttagagaatcaaaaaagagaggaaaacgaatttcaacattttttgaaaaatttgttggatgaaagattgaaatttatgggcgtaaaggttaattttttggtactggcacctccgactgatttaactgcagtactattgaggaataaaaaattggcagaagcggttggggaaatactcatcacgggcgaatgtaaaaattgccaagatttacaaccaccgacaccgcttagcctgaacaaatttttgtgggaattaccaagggaacacaccaagccaacaacctacaatgttagaatggacgcattggcagctctgtatcttttcgaaatggcctcaaatggtgaagtgaatgtcctactagtttcttcacgtttacttgctgaaaagttcggtgctggggataattttgacaaaagatttccaaaactgaaattgataagcaaaaagacaatgggtgctaaaattattgtaaatcgagaagaagaatttgaacaaaagccacacattgaccagcaattcagtgctgccggtccaatagctgtgcttgcaattatggatataacaaatgtaagggtggatggagttcccgaatctgacaatttcgtcctgtttacaactcgatcaaaaaaagtgagcttgatcaccccaaaaagtggagaggaaaagccaaagcatggtggataccaagtggaaatagggattaaacaagcaacaaaaattagattgcttgtcaattttaatgttgatacatttggaaacgcaatgacatttattcttgataaaagcaacaaacaatggaattacaaaatttcgtccgaaaaacaaaaggtataggacaaattagaaaaaaattgttctcagatatgactcatattattcaataaccaatttaattatcctaattaggggaaagagaaaaaccaagatccaaatgatgagaaaaatactgcctccagctcaagtgtgccaagcgaaaaggaaaatcccaaaaacgaagaggcgaaaaagaatttggtgataattacggacatgggggtggatgatcaagttgcactggcgatgatcagcgcaacagaattggccggtaatgtgaggccattgggacgacggagcaaggaaangaagcacctttaacgcaatcactgggatttgagaaagtgccagtgtatgtgag

SEQ ID NO: 6293 - DNA, 1827 bp, Heterodera glycines
ttacaggcaattctttttttgcatacaaatgaagcttttccaacatattcttcgcttttggttctaatttttcagtgatattgattttcatctttactaattggctcagcattattttgtatgcttcaacaatttcagacattgcttcactgatttttaactctttttcattggcatccagaaactttggttttagtgccaaaagttttactgatctaaaattaaattagtgggatagagaagaaaaagaagcttattccaagtagaagattaataagtacgggctcgttactcaaaaaccaccaaaatggaaaatttttgacagaaaattattcacaatttcgctcaaaaaaagcaagttttcttgaacatttttggtattaactttcttgaaactaatgaaactttttgaaatttagcaggataatagtaaaaacttagggctatcgaatggtttaaagaattaaaaaatttggttactttgagcaaagttatatcaaaaattttttattttgctcatttttgagtaaattcatagcaccgattaatagagcatgaggcgacaattgatcctatataaacgagcaaatttagggttataaattataagagggcataattttgcataaatttttatagtaaaataaataaaaaacaatcgactttttgatatttccaaaaaaatttactccaaaaatcgaaagatttcagtttaaataaattccaaaaatcttgttgcaataaaaacaatcgattttttgatatttccaaaaaatatactccaataacaaccgaaagatttgagtttaaataaattccaaaaatcttgcaacggctaatggcttgaaataaattataatttgaggtcaaatttgtacttgttaatccgctctctccaagctaatgtgtttttgtttttctaaatttctataaatgtttaaaaatataaaatttaatgccctatattccccgctcatcttagccaaggtgcaacagtttgccaattttactgtatatgaataattaccgttttcttggacgggtttttcgtttttctgaagatagttgcaatattttataaactttttaatgcttttgtagctgtctttccatttggggaattccacattatactcatccggcacttctcgatggttatactttttcaataattgccaaccattaggtttatctagatctttgcataaatcgtttacctaaaaaaataataaattgtaaattatagcaggggaatttagatatattttttcctgtaaaacttcaacccatgttcagttcccttccagaattttatgattttttgggttttttgtatattattttgggtaaaagccccaacgccgagccccctaccccgacccacgacattccccggcccgaccccgacatcagggatgggcacggaattccggtttcctaaaatttttggggcctcggaatgccatccctgcacgacatgtcgccacccgacggtacccggcccccgacattttgcccaccggcccccccgacattagtcggggaatcggggacccgaacgttgtaaaaatttaaaaagtaattcaaccacgggtgggcaaagattgaaaatttttgaaattttgacaaatttctttaataaaattccgaaaaatttccggcggcgcgccggtcccccaagacataattcttcctaagattgtcccaaaatctcaaaaattgataatttttggttagaggtcaacttggactcatttgaaataaattattaaagtgaaaaaaagaaaatctacgagcatttttttggtttttatagattaatttttc

SEQ ID NO: 6294 - DNA, 4964 bp, Heterodera glycines
acaattatttgtaggagagagagagaataagaccatagagtgaaagaagcaaaaataccaaaaaaaagtcctggtagcaaacgaataaggaccaatttataaaaatatctgaacgattgagaagcaaaaaaaaaagagagagagagagagaagaagtgagacagaaaaaatagaacaattttttttgagcagagcaaaaaggcccgggctgataaccaatcaaaggggcactattttagctaattaaaaagagggaccaataaaaaaaagaaaattaggccctatcattttgcttacagtatgagatacagtttttacaaattccaaagttcattttatctctttgttttctctcagttttcacgccataagaatattcacgtaatcacgtgccgccgcatttttcattgggcgagatcattcactttaaacatttttgcggcgcctgagaattgttaattgttcttgttaggcgaagtttaaacggagatggagcagataagcccattcctggaaggcgttcgcatccattcgattacccgctatcattcattaatttttttttctctctcaattaatgcataatgggattaccaaataatttttttttttttagcaaaataaaacaaaatcttattacgaactgaacgacttcgaatgtctacatcagggggctcgtcaaatgagttcccatttggtacatcccaagccttcgggcaggaaacaaagatgtttttgagtggaaaggatgatgagtcctcgatttcggctattgataggaaactttggcaaggaaagaccacgataaaaatctctgatttagaaaaagctcaaaatgatatggggaaattagaagatggagtgaacagagcttttcgctacctgaatcgttccttgaaccaaaaagtcaattgggtgaaagatgtcgtggccaatacaaatgccaactttgagactctgaaagtccaattcgagaccttaaccgaaagagttgatatgttggaacaagacagtgatgggacgaattcaggtgggactgttagtattactaatctgaatagagcgtcgcgggcgccgtttgtgacgccaatgggcaatgcacagcccaaccaagttgtaccgaaccaagtgccaattcatcaattatcaagcgaagacgaagatgacgggccgactctttttggcctgaacatgctctcgagcggacccacagtggggtcaggtttggaaatgttttgtgaggagtctgtttttgcatttgacgattgggctgaacgtttcaaggattacctgtccgtgtcaggcaaggcttacactgaacaagaaaaagtcaccagactcaaattggctctgagggacactcctcgggcactgtttaaggaattattgccagcacaaaccgacactcttgactcagcattgagtgaacttcgacagaaattggactcccctcagcgtcgggaaattgcgaaacgaactttatcgctgtgcaaacaaagggaggatgagacagtggcgcaatttctgagacgcctaactcctttggtggatgcgacaaattcgtcattaaccggtgacattcgtatagagaaaatttgcgaggaattcttggacagattaaagccaaacataagctttcttattcgtctggtgggactgtcacgggcaaaagatttggacttggtaagagcacaggcagaggagctggaagctttactgctgatgaacaaaggtgatgaagcatcacgcctctctcaggcagtccatgcgctgagcaatcagtcaccacagtcgaattggtctacagaagcaaacccgaacaatgaccgtgctggacgatggtcgtcaggcaacaatgtacgtgggtttagacctttttctggatcaaatgcgacgagacaacaacaaagaggaagaggaggacgagaccgctctcgcaattggggaggaggccgccaggagcaatttagccaaagaaactggtcaagcaaccctcgatgccattattgtgaccgtgctggacattttgcgtacaattgccatcaacgccgtgccaatttcagaggaaattccaaccaatcgttccgtcaaggaagatggtcaaatcagcaacctcgccaatctcagggacaatggcaaaatcggcagaatcctgtcaacatgatggatgtgccaaactcttccaacacttcaccaggatttttcgagaacttggcccagtcgttactagacctcaaaattcaggacaatcgcaattacaaaaatgaggaaccaagatctggggcaatgaatgcgctcacacacatcaaacccaaaacaacaacaatggattgtcaggtcgaaaatgaattagcaaaaggatcctctagtgaatccccagcctgtgggcaggaaacaaagacaaacattcccaaaacgtcaaattgggaacggccaagcgtacgatcgaaagtcgcttctttaatgttcattacattaatgcttgttggaatgattttaccctttactactgctaatatgccccatctgccaatgcatccccttgtctgtcaaacccaaaacggaggaaaaatttggcaattgccggcagttactggctgttcaaagctgtcaattgatcattcaaaagcacctgttgttcgaactttcgatgtcttttcgccaaatttatttgagcactcggctgatgcttgggcttgccgaaaagtgagaaaatccgtgcgcaagtacacttcaatcactaatgttccgatccaagagactcttgaaccacttatgttgcaaatgactccgagtgaatgcaatcaaatggccgaaaatggaaagtgcagcttaggcttgctaattaatgactcgggactcttgcatatagacaataaattggatttctcaccccatatgtggctaattggctcttttagttggtcgactgtctcaactgaaaattgttatcattttaaaactaaaattatgtcaaaatacggaagctcggttatgcaaagtcccctcgggtcagtgaacaattgctaattcaaggcaggccaatgtgagatggaagacaagacactgcttatgtgggataccaacactacccatgcttgtgaattttcgaaaattggcacattgaaaggactacaacttgctaatatttgcagttcggatgaggtcagttttcgtttaacatttttaaacaacacaaagaaagtcaactcatgtggtctcaaaaaaatagggagcttgtgctttgcctcaaatctatcttgaaagaatgggttttatttttgcacttaaaatccttcaaaaggggggcaggtcctttgcctccaaaatccattcatatgtccttaaaccttggacccgtcgtgccctttattgtccttattatttttggcttcacttgtcttaaccaaacacgcagacggaccgcgttcatgccgtatgacttcatcaacgcaaacagatcagttttttgccattattgtcgagaaaggatagcccactcttttcttgctgtgtgacaaaactgatgtcggcacctttgtacacggcacaaacaaagccaaccagcaacaaacataaatggcacaaaagtgccaacttcaaagtggccattgtaactataaatttttatttgctggggaataatttgaagtaatttaaatgtcttttttttaatatacgccaaaaaattttcagacaaaagcttagttgaaatttttatatttgttcagttgcatttgaacaaaaaattgaaccaaacgatcaaagcaattgttacaatattcaatatttcataataaatcaactagacctttggcctacaaataattttctgttatttaatgtctgaaaactcgcaccttttgtttccccacctgatcaagggcgtagccagacccttggctttgggggggggggctgaagtcaaaaattcgatttttaggggtgtatctttctttttaagtcgatttttagggggtgtatttttggtttttttgaaatcccgaattatggggtgtattttacaaaatttttcgccaaaaaattaatattttttgtcattttgcctccatttttcaaaaatatgctaaaatggggtccggcggtgccgataggcgccgccgggaaaatttttgagtattttaatgctattttgttaagaaaattgcttaaaatttcaaaaaaatttactgaaaattttttattttttgggtttctgggaggggctttagccccctcagccccccctgcctacgcccttgctgtagtgtctgatagctggtcagactactttcaaccttttgtttctctgatcactgatttgtgagtagactgcaattaaaaactttcgtatctaatcactcaataaacgatggtatccaatcactgataaaattgcgatcgcctaaaatttgttctaaacattcaccgttttcatctccatcagccccagcaacagtccgcattcccacaggtgccgtgtctccgttttggcgtcgttgaacagatgcaacagctcgagcatcccgcgccaaacactgaagcgcaggtcgcacttggccgcgctgaagtgcagatgagggcatagcacatttttgaagctaacacggaagaggggcgaggaaaagccacctgctgtcgaaatgggagggggggggggggttaaacgatgtaagccaattaggactaattaatattcctttgaaagatatgcaaaaatggtcgagattagtggggtgggttagctgaaccggaggagccaattaattcttgaaatttttcaaaaatcttgagcaaagattagtaaccttacgatcagattacaacctttataaaccaaccaattgatcagaagagtcataagggatgaaatttgaaaaatatcgaaaaaattcgaaatttcaaaaaaaattttttttaaacagaatagattaggaataattttgagggtaaattagtcctgt

SEQ ID NO: 6295 - DNA, 2254 bp, Heterodera glycines
  unsure (1)..(2254): unsure at all n locations
tcctcagcaagctcctgcaacacaacacgaattcttctcgggggtttccagntgnccttcccactttttcattgtcctctgtattcgtgtctcctcctcccatttcattagcttcttctgcgcggttttgtggctgtctccgtctcttcgattgctccgaaacattcatatggttaaggaagtacccaacgacgaaaatgaaaaatagtgttccaagcacacttccgaatggcaacaacttaaaaagtgaggtttaaactgcatccaaaccaaaaatgggtgacagatcattcaaattaagcgaaccgaaaaatgtggtccgctgatatttaaattacctaatttgtttttctctaataacaaaacatacaaattgagaaatatccgtttgttttttccttggaggttggggccatctgacaaactgaaactgatgctgctgttgttcgcgaaagaattcctttcgcatgccttcaaattgctcatctgtgaagccgaaagtatcataagcctttcttctctgagggttcgacaaaatctgcttatgcaagatgtgaagcgtatttgcactaattgtaagacaaacacaaactttataagcttgattgacatccataaaccgctgattggactcgggattcttgtttttgtctggatgccttttaacatttttaaattaaatttttaaaattttttaatttattaccattgcaaggctaatttcttataagcatctttaatgtctttttgactggctgtccgacgaattcccaaagtattgtacggattgagctcataagcaattatattgacgagaagcagtagaaaaacgaagaaaatttttgagtttgagatgtatggatttcggctcggaataaatgagaccatttgcaagaaacagcttaatcttaaggagaaacagcttaatcttaaattaaatataggtaggtacatttgttagttcatcagatacatatactaaaaaaattgcctccggcaattctcgagcttctacgtagttttctgaaggaaaaaataagggcgagagcggaaacaatgtacatatcgatttcattaagatggagaaaaaatgagagaagcgatacatacaaatttgttattgaagtgaatagggagagagaaagagagggagaaaaggaagaaaattataaaatacctaaaaaagaaaagaatgaaaaaaggaggtcgaagaaaggcattatccataaaaattcagccacgtcttcttatgacatggaaaaggtgcccaaatgccttcataaaaatgtaatcatccgtcaaaatgcctttaaattttattcatttttaatcgaccattctctacagctgcagcgatgataatctttctatctgtatttgtacaacttctcatatttgcagtaagcgacaaagaagaattgcaccacgaaagggaaacttttgagcagaaacatatgaatatgggcaaacacaacatggaaatggaccacaaagccattttaggtaagttattttattagtaagaaatattttttttattattaattaattaggatcagaaaagaacacccacgaatttgatgaactccctacggaagaatctaagaaaaggctgagagtcttggcaaagagaatggacacggataaggtgaaaaaaggagagaatacaataatagtgattgatgtttgtcacccccatttttcgaaaatatttttggtttacaaaagtcgtgaaaacctatttacgaggctaaacaattcttactgttagaccaaaacgcgaaattcgaaaattgaaatttacattgttctaatttgggctccgggttcagaatctttttcgaaagatgagtacaaatagcagtatcgaaaatactatggctaattattataggacggctttatcacattggaggagctgactgattgggtcaaaaactcgctgatgacattggaccaagaagagacaaaggaacgatttgacgaaatagatgaaggttggatgctgaaggaatagcaaatgaaccacgtgaatttttaagacaaagatggggtcatcacctgggccgagtacactcaagaagcatttggcgttagcgactcggagggcgacccgcaaaaactgttgacggacccggacgatatgaaagtctgaaagaatatcncattnntcattaacttattcacaatcagcttttcgaagaggatagacgatattttgtggcagccgatctcaacatgactcgctcttgac

SEQ ID NO: 6296 - DNA, 1573 bp, Heterodera glycines
agcttttcgaagaggatagacggatattttgtggcagccgatctcaccaatgactcgctcttgaccctggagagttcggagcttttcagatccggaacatgctgaacacatgcgccaaactttgatcgaggcacgaatattttagtccatccttttagttcctgactgggtttacacctaactcattgtcagaatactttggcggaaaaggacctaaacaaggacgggaagatcgacctcggagagtttatgggagacatggctcatgagcagtcgcagtccgagtggtatcagacagaaaagacgcgcttcggggaggagtacgacaaggacggggacggctttttggatggcgacgaactgagggcgtggttggtccccgacttgagtcagacggcaaaacaggaggccgaacacctaaccgaaaatgctgacaccgacaaggtgaattcactacattcaactttagtttaagccgttgttcaaccgctagttaaaaaagacattttaatttctcatgaataaattgtttctttggacataaattttgtcccttgggattgacctacattttcatattattattttaggatgggaagttgagcatagatgaggtggtagaagcgtacaaaatcttcgttggatcagaagccaccaactacggagagcatttgaccagcattcgccatgacgaactctgattcttattcaatcgatggggaaaatccgattatgtaaagcgtagaagagacttcggattaagggtaaaggtaaagcatttgtgcagctcttccattccttcacttggaacaaatttttgagttacaaaaaaaaaatagtcataattaaattcaacagtttctgatttaaagaccaaattattttttcttcgaatatccattcagttccgtcttcaaattccttgtattgctaccccttttgtttccttgattaattttatcgctggcattgaatatattttcgtggaattttcttaagaagagatttttctattttttgaatctcgcgtttacgggtaagcgttaaatcattattctttacagtaatgccatattcatgattaaggaccctgtaaaccattggggacatgttttcgtgaccttttaaaaccgacaaaaaataagcgaattattccaataatgaaaaagtatcgaaaattccatatggcggcgatatgacacacatttctcagctttttctttgtttatttattccctattccatcaatttttaaaatgatttttaatggtattattcccacttcgatagctttatttatttggattaaaaaataaatattactttctattctggcagaaaattatagaattgggcccgcaaaagaacaaaaccggttccacaatcgcaacctctaatcatcctaaaaaatatcccagagtcgaaaaattaaaatttaaatcgtgagttggcaagtcgtctgttgctctctctgtctgtgagagcattgcgcttctttcgcttttcttttcgtgtcttcttcgccctttccttggcactgcctcaatttctctttgtatttcccttttcaaca

SEQ ID NO: 6297 - DNA, 2761 bp, Heterodera glycines
gcaaaaagaaacgaatcattttttgctcaaatggaggaaattgttaattttgcacaggaaaaaagtcaactttcatgctcattttatttttcaatttaaatattttagctcaaatttcgtctcaaagcgacattaactccgaatttaacgaattccttacttttgagagagcaccaatcagttctgacccgtttgaatggtggaagaaacacggaccaaaatttccaatgttatcaaaatttgcgattaagtacttgtcagcccctgcgacaagcgtaccgagcgagcagactttcaaagtggcgagggatgtttatgattatcggcgttcgagtctgaagccgaaaaccgcagaaatgttgattttttgaacaaggcaatcccaatgttgaactacaaatattaattgattttgttcggtgataaaaatttaccaataaattatgctaacttttacattaaatatgttttaaccaatacagaagatgacgcaattttttcgattttttactcaaaaattttgaaaaagtcccgggtcccggcgggatcccggcccaaaaattgggaccgggaccgggagtcccggaaaaacgggagtcccggtgccgggatcccgcccgggtccattttccaagtcccggtcccgatcccggtcccggcaatttcaaaattccgggctctaataacaacaaataaaaaattcaacgtttcctttgattttcataccgaccaaatggaaacgtcggcatggaaatgggtcgatcccatttttcggggttagttaaaaagtcgtatattttgaattttattaaaaaccaaagcgtgttcccgtggtccctccccccccccccttagatttaataaaatttttctttgaattttgttaaggaattatgaacattaaaaataatcatttttgatgaacgaaaatagaaaacaagcagcgccacttcactggaccctaagagattatcaacaaccacaaatgaaaagaaaaggaagtcccatttaaacattctcttccggcaaaatgttggtgaaggaatatcgagttttgatgccattgtccgtggaggaatatcgtctggctcaattgtacatgattcaggcaaacaaaataaaaacacaaaataaacaagtgaaaacgatttaagaaaaagtcaagattggagagttctggggcaggcagtggagtggaaatcatcagaaacgagccctatcagaatggacccggtggcagcggacagtacactttcaaaatctatcacatcggcaacagaataccgcgtatgtcttggaccaatgggaaaaatgctagcacaccaacaaattgtcagtttggatccgaaatgtgttgccatcgtctgccttggaagcgcatgaagaggcgtggaatgcttacccggcaagtcgggctattactaattgtaaggatgactgtcgatgagtcagtcctattgaaaatttaaagttaatgtttaaagtgagtgattcctgcggttggttttggaactagcaataagccaaatgagtctccaaataccgtagctttaatgtttgaattctcgtttttaatagggaacaaaaacaaaatcgttaaaatgttctgaagtaaatgagttgaaatatgttccccgcaatccaaaaactgccataataccataaatgatttttcaacttaataaattggaagatgaagggcacgctgaattttacaaatactttctcatttatccattcatttgcctaatttaattttcaacaaaaattttcagtacacacgaactcgctattcatgtccgttgatttcacacttcaatgttgaggttttaatgtacattattaaatatttccgaacacttttttctgttattcaggtggacacgaaatatttggacgatgccggaacatcggaaaatgtattcgaattgtctaatagcgaattgaaaaataggacagttggtaagccgttcgaatgaattccatcggaaattggagaaaatttcgcagatgtgctcgattttgttagtgatccaataccatcgcatgactatcttccggaggaggacccgaaattgttcagaagcacaaaaacacagcgggggcccttaagcgacaattgggtggccaattttgtgcgcgaagggaaaccgattatgtgtgagttcaaatgggggggggggataaagggaaattgggggcgggaagtgcaagcatagccaagggaactggtaacccatgtgtccaaataaataccaaattattaataatttgtgaaaatcggaattcccttgcggcgctttgctcccatttctccatggattttgccaaaaaaaaagtgcgccaccattttgtgtttgtttttaaattaaggcgcctacaaactgtgcaaggtcgaatttcgctattggggtcttcagactcgcgctgagcgatggatccacgagttggcactccgcgggactatgctcagggcacacagacaagcctggtaaattgagggatttgattaaaaagcaaatgcaaattaaaacttggtactttcctgttttgaaggcacacccattttttaaaaaatgcaacaaagaacgttcaatattaatagatttattttggaggcataaaagcaacaatttctgccaaaatttcctcaaatgcgtcgacgttacgtcgcagtcctcgcgccaaagaaactcgcataaataatagtccaacatttttttaaaattggggtgtgccttcaaaacagtaaagtaccaaa

SEQ ID NO: 6298 - DNA, 2744 bp, Heterodera glycines
  unsure (1)..(2744): unsure at all n locations
aaaatgggggggtgccttcaaaacagtaaagtaccaaacttttaagggcttggcaagacgaatgggtcggggtggaaattgaggacattcgccagttggagaaggagacgcagcaatatctgaccacactgatgttcccctcagcaacgccaatgaccaacaaaagatccgtcagcggaaacattgccaccgatgggtcggttgaggaggagagggaaggcaacggaatgcgacgagggacggacgatgaggaagagcagagacaggcggaggaggagggccaggaaaacgacgaggacggggacgccctccttcttcttcccactcggcctatttcgactgttgtgacaagatggcctacgttgagcctcaacaacggaccactttgatcagatggagttccgaattgctgatcggcatggataccgttgagttggacaagtcaccgcccatcacacccaaagtgtcatcctcccgctccctgctcatcctcgtgttccatggcgatcttttccccaaagtattcgcctcttttcatcagttaatcatcggttgactcatttcagacttcggccgactccaaaattacggacataaacaccttccgttccactctcgacactttgatagccatgcattgtccccaacttcgaggccaaatacacgtccaggtgtttttatgagccgtccatttggtccttatgcgttcctcttggaaatcctaaataatggggggggggttctaatttatttggttattaagccaaaactggtatcttgaggtttccattgtttcgatttatgagcacgaattttgaaaatcatttttttcaaattttaaaatttgtgattggagataaacgacaaacgacctattttacgacaaattgtctgtcgttatcgttcgtaattgtgattggccctgataccaatttaagtcaagttggaactaacattgtcttcctttttaagtgtgtgacctgtggggctgaactgctccaaacttcgcaagttctcagcggcgttttccccagcggattgggcacatttcacccaagttttgtgcctctgatggcagccgatgcgttgctcttcaatgatgttcgttccctttcctttggtccgtcgctaatcgattggctattttgaggctgtccaaaatgccactctgaatgctaatcgagtggtcaacagtttcatcgcttctcaagttgggaaatctgatgcctccgacttggaaatatttgtcgttggcgactttattggcggcattttgatgtacgaatcactggcaagaacggcactgacaatggccgaccagcagcagagagacggggacggctgtgccagtttgacttcaccggttgcggtcgaccagcaaaagtcgcccattccatcgctttccaaatcgcctgcatccacactttcttctccgttcatcactcagcgaccaaacaaagacaaagtaatgtcagtggagaaaactcattggggctgagttggccgagggcaatgcccccttaaataatgaaaaattgggtagttttgaaattgcgtgtaggctgtgtccggaaaataattaaaattctgtctttaaacttattacttttcaaaaatttataaaattcgaaagacttccgacaatgtagtgccgatttgtccccttttatccacttaataatttgttcgcttctcagaatccctcgcgctctctccagtcgctccctgccggcgttgaagttcccaaattcttcagcttcgatgaccagaaaaattcatttgctcattcggagtcgccctctccaatgccatcgtccgacttcaccaaaaacaagtgaatttctttttttctcgctcgtctttgggttgcttttcatttgccacattttcctctttccccctctcttccacacacttttccctttctcttgccaggtccgctcctccatgcgcatgtcgccaattgtccaattcttcggtacaatgagtgtttcccaatacatctaattttctgacttccaggattcctccctttctgccatcagaacaaatcgttctgcaaccgctgaatcgctttcattcaaaccgtccgctgcttttttgctcggatgtccactcgcgttgttgctaatgcaacgcaaattgaacgaaggtttattaaacattttagcaacaatctttttaattactcgctttgcttgcttgcttttcacacacttttctccccccccccttcagttgagcaacaactgtcgctgttctgtgggcagttgttcaatctgttctaccccctcgacctctgtgctgcccgtttggagcctgttctgaatccctctctaagtgctctccccgccctcaaagttccccggtgattattttattttccactttttgaccctctaaaattggcttttctcctcgacttcagttaccaactttacccgttgtgtgatgagaatgaccttcactttggcgactccgtcggcgttccgacggtgtggggtcagagcagagttgaccacgagttgtactgtccccctgagatgaactccttgccgaccacggcgttgcccagcattttgcacgcttcctactgggagagcaaagatctgtccgccttcattctccgccaattccttcgctccgacgagctttcctcttcggcagtgctttgtctgaattccctcaatgaacagccgnccgtttgagttccaagtgccactgacagtgtggaacaggaaaag

SEQ ID NO: 6299 - DNA, 1425 bp, Heterodera glycines
  unsure (1)..(1425): unsure at all n locations
caaaagcctcaaaaatcctcaaaatttctcaaaaaaccacaaaaatcctcattttccaaaaaaatcctcattgatctatcaaaaagccacaaaataaggataaatcctcagatctggcaaccctgattatttgcaacttttctccattgggattttgtcactttttcttttcttaattcacattttaaggtataaacggcaaaaagaaaaaactccgttggtcggattgatggaaagcgctttgccactgctccaagaacgactttcaactttgttacccaaccaaagccaaccgtcctgcatcctccaaaaacaaattttaaaaattttttactgcctaaaccaagtaaaaggctttatatatgttaattttttacacggttttttgtttagttcacgataaaccttcaaatcctatcaatggaccagttcagcaaatggctccatttgtttttggccattttggagagggaagtgcctaacgaatgcaacactttgccagaagatgaacgggccgagacgttgtggtggaagtgcaagaaatgggcgataaaaataatacaaaggatttttgaaaggttcggctgggatggcgagagaggacattcatctctcatttcattcttataggtatggcaacaaaggcaatgtggacttatcctactccgatttcgcaactcaatattccaaggacttggtccttccggtgatcacctcgttgatggtgcatgttttgaacaatttcatcaacgggcattttgtgtccgacgaagtgctttatttcacactcagccatttgtcggatgcgatgaatcaggcgcaagtttggcaggcgttaaagccgcattttgaggtaatcattttgttaaaactaatatttttgttgcgacaaaaaaacagattacaatgaaatgttacctttcagcctttgctcaaaagtgtcattttccctctcctccaatactcaaaggaagacgagcaaatgtgggcggatgatgttgaggagtttttgcgctttaaatatgatgtttacgaggtcactttccattatatcaaaatatgttgttaaaagggactaattgcaaaagcatttcttaatgctttttgtcttcattttataggatttgcatcatccatcttccgctgcctcaactcttcttcaaatgctttgcaaacgccaaggaatcatggactctctgttggtatttatcattgagaatttgtcttcaacttccgacgttcgtcaagccgacggtgcccttcatatggtcgcgattgtttcctctcagttgcttaaactcaaagtcagctttaaattcgggtcgactttttcatccttcctttagagaaatacagaaaagncgtcgaaaaattgttggacgctaaggagattgcgcgcactgcacatgaagtgggtcttcttat

SEQ ID NO: 6300 - DNA, 3703 bp, Heterodera glycines
  unsure (1)..(3703): unsure at all n locations
tttttgataacaaataaaggaaaattaaacgatatttttgtttagtggtccaaattgtttcgccctcatatctccgatttgctcataaatgtgttgaaattggtcaaggagactcgcgtggaagatttgcctgctgttgttgacacactcattgaaaactttgaggaggacgtcattccaattgcctacgacgttaccgttcaattggtaattgaagaaaggaggggtgaaaatcgccatatgaagcgaaatttttacccaattaagcactgacaagacagcataatgtagaggagtccatttatttatgtttttgtataaattcaggccatttacctaacaaataatggcaattcactgttttaaaacccaattcccggtcaagtaaaactcataatctctaaacaacttttattatatcaaaggtacaaacattccatgcaatggttgttggtcaagaagatggaaatgaagaggaccgaattgctgaggattacagcgttggggtggccgggattctatcgacgcttgagacaattctcggcctattggaggagcacccggacattgtgaagcgagtggagcccgttgtgcgaagttgcatcacaacaatattcgatgcttattgcgaaagtagggattttttgggaatgattgtctacttttacatctttattttcatttagcttattttgaggaggcgctttctctcacccattccctcgttttggtgcacatttcgcctgagatgtggacggtttttgaccatatttacaaggcttttctggaggaaggcacttcatttttctcaggtaaaattgtatagtctttagattattcttccctactcgatgtttgacagtttttcgccaaaaaatgtccaattttgtgcatttttgattttagtggtttggggttttcctcatccacctttgttacggcctttgctgttctaaaattcttattgttactaattgattgaccgttccgtgtttaattaggtcttttcttacatttcttattggcttcttcattcactaagattgtgcaccagtgctccacgcttttttgaccaatgacactgacaattttctgtctgtttttgaccgagtgcaacattttctggcgatgtgtgaaaaaacattgaacgatgagggtgaggacggctgtgatgagagcacaaaggcacatgcggcaaaaatgctggaggtatttaaaaaactatttaaataattaaaagtatacagaaatgcacctaagtgagtaacataattcgtaatttagataacgagaaaaaaaattcatgtacttattttttaggtttttgtgctccaatgtcaaggacgtgcaagtcatttcatcccggacatattgcgtttggttttcaatcaattgcagaaagagtcggccgatttaaaattgggccaactgaagccacaactattaattgtaatatatatataattacttattattgtaattgcttttgtccctttatcagattttgatcgctgctttgtattccgattttcaattatgctccaatttgtttggtcagctgcaattcaaaacggagattggcactttcgaatggcttattcgtgagctctattcaaatcggaaggactttgagggtgtgcacgaccgcaaaatgctcatttggttgctctgtcgcattttggctgatggaaatttgcccgctttgttcattaatcagcctgaaaaggtggttttattctaaatgctgaagagataccaaattaatttggtttagtttatggaatggcttctgactctttttgaggaactccaacggtgcatcaaagaaatagccgaacggagggaggacgactcggactcagaggacgaggagtccagcgaggaggacgacgatcggatgaacggagagttgaaagactcagacgacgatgtggacgaaggtgagcacattgaggaaacccttagcaaaagaggaaacgtcaaatttcaagagaactcgcaatatctgatggcattggagcacgaacgaaatgagcgaaaagaacggaggacgcgaaggaagtcgagcaccaacaaaagcatggacgatcagacagagggcgcaccgggcgacatcctttcccttgcatcggaaaccaccgactcggaagagcaccaccattttngaggtgtgtttattcaacgcaaaaaaagcacagaaatatccttttcaattaattcggcattttaggaagagactgaccttgaggcattttctacaccactggacgaccaaggcgacaataagccatgtctgaatgtgtttgttttgttcaaacacacattggaaggtcctttgtcattctttgactgattgaaaactttaattaacaatttcagaaatgaatacccgcaattcgcctcttttggtcagcatttctgatcagcaacgaattggcgaggcacgagttgcaaagcttaaccatttgatggaaatttgcactagagaggaaaatttggagaggtcaaagcgcttggcgcaggccggcggctattcttttgacgccaatgcgccggtgccgacaacattcagcttcagctgatcgaagagagagaaagaattctaatccattcattcgtttgtctttgatcactttgggtgtaaaataattccattatgccttttacaccgcaccacttttgaataccgctcaatgttccaattatttttatttttcgatgaatggttcgactgttgaaatttgattatattgttgacaatgagtggggttttttccatcaattcgagtatcgtattaataccttaatgacaattaagccatgttaatttgtaataagcaaatcacccgagaatgaattatgctaacttcagatgcttttcctcgcctatagggcaacattatgtaggaatttacgcagaagtgtcgtttcgaaagcagcaaataatgttgcggaacaggggacttcttcagtttcgggaaataaggagaatctgttaaatgcctatttacaggtcagtgagaaacaattggggggggggggaggaagaagccgttgggagcagttcaatattttttcaacttctgcggatatttgacccggaatttttaatgtacgattttttatttaataaaatctgtttttcagctctccaaatgccgtctcaccgcattgatcgcttgcacttccgtcagtgggttagttgaaacacaacgctttagctggaaaataacttttgggttgggcttcttccctcaaaattatcttttccttgggacggggtttcagtctcaggacgggttgatcagtcagctaacaataagtcctctcagtatgatcagttcttttctgtaactcacgatacaaatgccctgtccgttcagttttctgatgtcccccgccctctcttccgccccctcctcccttttcttctcttgcgtcgttggcactgcgcttctttcggcttctgccagtacatgcaacaacgtaatcgaacgtcagcacgataaacagatgaaaagtatgttcagaaagaccggaaaagtggcggaatgagttgctcactttctcgacagggacgcgttcgagagtgctgcccgtagggaggttgacgcccattcacgctttgctcttcgcgcggtgccacgggaactgccggaggaggcatcctttgcctctagtgtgttttctgttggttttttcg

SEQ ID NO: 6301 - DNA, 1389 bp, Heterodera glycines
tttaacttttttttaattttaaggttgtaatcacctcacctccgcccttggcttcgtaaatctcgcgctttacgccggtgcctatacgccgatgaaacgaatccatcccaggtggtcgtcttcttcctctacacctaaataattcccaacgaatgtgttttccgactttcagctgcacttggatcggtgccattgtgggtgccatcccgccactcatgggttattcagctgccaccggtcagtgtttattgttagtagggttagcgggtttaaaacatcgacctttggtgtttaactgtttacatggtcggaccccttcgcaaaaatttctgtttactcccacttcatcctatgccaggtcatctcgattcggccgcttttgtgctcggcgcactgcttttctcctggcaatttccccatttcaatgcccttagttggaatttacgtgccgattattcggcagcgggatacaaaatgatgtgcgtgacgaacgaaggattgtgcaaacggacaacattgaggtgagaggaacttcactcactccctgccctccctttccaaccaaaacaacgaaattgggtctatttcagttttacccgacaataatggataatccttaagcttgggtttttacttctctgactatatgttagggttttcttctgttaattaaggcactctgtggcgctgctttgtctctgctcttttgctgctcctttcacacatttgaccacttggaccttcgctttcacttcactccctctaaacctttcaatgctttacttggcgattcgattctatttaaatacagataaaaagtgataatattctcaattttcaatgacatttatttcttcgcaggaatgccaccaatctgttccgcttcacacttctctacctccctattttaatggccttgctgtacgcatcgaaagatggatgccaaggcattgtcgttacaaagaaatcgcaaaaactattagagtttgtagagaatatgatgttaggcttaggcttatagaaaactttgtttttgtatttgttgttaatacatattacgtaccattgctttagttttgtttttgctcatatcccatcttgggcttttatctgaataaataaattaggtaaattcgatatattaagaaaattcggcaatcctgaagaatgggtgtcccctaattttttttttattttgagttcaaaatctgttttcgagggtgtgattacgaatcagaacttggatttgcccaattccgaacctcggacccgaattcgaacaaaaagttgaaaaaaaaaattaccaaaataaacgttataaccggccgaactttggcgtaaattgtgtctttttatctaattaacaattgaagcatatttttacatcaa

SEQ ID NO: 6302 - DNA, 1292 bp, Heterodera glycines
gtacaaacaatgttagaactttcattctgctggtcgttaattttgtaagtagtacatagtatttctttaggtgagttttcaatcagttcgatccatgacgcgcccgtggcgaattcttcggcgaggaaagacgctaaatcttgttaattacatcggcctcggaaaaatgaaaaggaaggagagagagagcgaggggtgagagatagaaatggagaggaagagagggggagagacgcaacaaaagggtgtggcgacagaggaataattgatggacgaagggcgtgagaaaacgggggatgagtttgaaagaagtcacctcacctcgtaaaccgcggggatggccttagtgagttgttggtaacgcagcagaggacgcttctgcgtctcagcaattgaagcttgcttgttgaattcccgaacgtgagatgacttgaaacgatcgtcttaaaaggaaaaggcaaataaaaaacagaaaatgtatgttttctaacacgccgaaatgttcggtcgcgcgggagtggtgggtttattcggcgaacggcccacggacttcgctctttcgtgtcggacgacgatcggatgcttttccgccgacttgacgcatcgcattttgacaatggcctttagcttattttttggcctgttcggagtgagcgccgcaaccttttcaccacaattctctccgtttgtactttgcaatgtttcctccataaaaattaatgcaaatgttttgctaaattatttcctaaataggtaaaagacggagattatgatttatggtgaatttttaatgcaaaaaataaatatagctatcattaaggtcaggattttgaagcatatgcttagaatttttactaacttggcgaggtaaaaagcatgaaaacgtttttgaaacttaaaataggcatatgtataaaaaaaaattaaattctatttttacgccttttaaattaattttaaaaacgaacaaattgatacataatttgtagggctaggatttttatgtgctaaaaatcctgaaatatgtaataaaatatgtgctaaaaaatgctgaaatatgtgctaaaaacccccaaaaatgccaaaatatgtgctaaaatatgtgttaaaaattgaaaaaataagtgtgtttttgcataaaaattcccaaaaatctcattctttatcatttttagcccatacaacgcaaatcaaatacatttcgaagtgtttggggtaaaattgtctttttttgataaatcatttctataaattgaaagttccagcagagaacttcgaaatccaatgacgaa

SEQ ID NO: 6303 - DNA, 821 bp, Heterodera glycines
tcttttgatgatggcactgttttagaagcagtgttccgcttctgacacacactttgtcctattacgattcccgaaccaaaagcctaattaattgtttaaatatttcgttttttgcgttacttatgacaaattttatttctatacgataacctatccaaaaattaagagacaacataaacttatgcaccaaatggaaatcacttcaactttaaattttaataatttcattatttttcagggctctcaaaccgttgtgtcacttccgtctacttggaagaaaccaagaaagaaaaccaaaaaagccatcaaatttgcgcctgaagatgtgatggacaaagggttaggctacgatttggaggacgatttcattgacgacgaacaagcggtgagttgtgggttattttatgttttttttttaaagttaaaccgaaggaaagtgtgatttttatgattattaacaaatttaaaaagattatttttatcctccacattaaatgttcttgatttccctttaaatttagtacgatgaatgggtgcctacgacaatggacacggccaagcgaggtcattacgtgaacaaaggaccgttggagttccgacaaatcgactttgaccagacgacctcggaggaagacgaagagaaggacggggaggaggagagcaatgggacgagacgagagacgagcattttggaagcagacgaagaggaagcgatgaatatggaatgatcaaatttctataatttacattaatttattctgtattttcatctttgtgattatttaattgctaaatattacattaaaaatcacatgcattct

SEQ ID NO: 6304 - DNA, 1437 bp, Heterodera glycines
aatttgaattttcgagtttttgttcgaattcgggtccgggatttcgaattggtcgaaatggatgcctgcttcgtgatcaacgatgccgaaaacctatggaaacatgttttcatgactttagaaaacaaaaaaaaattttgaaaaatgagttagacaaactccttttttgtggaccaatgatctaggcgattgccaaaaaaaaattgtcattgatcctactttggtcgcagtttatttacatttcaccaatagtttgcttccccgtccctgttcctccccgaaaaaaaaattctattttttgaaaatttgcagggcgattttgcggttgtgtgcagcgtggacaattccggagacggcaacgtgtcagcattgggcagtgaagtgatcccgttggaccaatgccgtcatccggcaatgtgtatgctaattgatgccagctcagtgaaacagtgcgccatttcggtgccggacgatttggtcaactattttgtgcatggcgaagacacatttaaaatgttgttggaggctgtgtccaaggtttacatattttttccatttgcgatgtaaaaatggacgggggcttttacgtttttatgcgccaaaaaaattaaaaaatatgtcaacaaagacctaaatggatagaaaattattgaaatttcaatgaaaccaaaaaaaattgtaatactattttttgtgaaattttttttattaaactatatttcttaaaaaaatattttgtaatgctgctgacttaaggttctcatcaaattcgaccaggaaaacaagcagattgttgtcaaggttactatatatatatatattttttacgtaaatttgccaaaattgttttgggttttccagtgctaaaatagcctagtatgcttttttacacaaccaaatgggtattgggcgcaggtgtttttatggaaaaaccaaacacgtgcctacttttagggtccgtgacggtttttgagttttggccatgacattcatgctcacttgccatatttttaacttatttttagtcatccaattgtaatacattttaaatgcttccggtccctgtattttttggcggtgtgtgtaaaatttgcacttttttcatgggtcaaacattttaaaaaatggattctccattcagagttttttcgccggtgcgctcaagaaagtgcagattctgaaggacactttcctgctgcacagcagacagaagatgctgttgctgaaccgtcatgaggagaccatgaaaatgttggccgcccaggagccgcccgacgagttcttcgaggagtttgaagtgcagaccgcgatgatgggacttggttggtagaacttgcgtttttgttttctgtcggaatcaaattttatggatattgggcaagggctttgtagtaaatttccttaaaaaaaatttttttttttttgtctaacaagtac

SEQ ID NO: 6305 - DNA, 6133 bp, Heterodera glycines
cacccagcggcgcaatttccaaaaccaatttctgatcacactttttgggaaaaaaatcattaattaaattagaaacaatgttcgcggaaaaaaagtgaactgtccttgaaaaacatttcgaaatttggattattttgctaaaagacttgttttataaaattttgtaatataatttttttataaacttagaatttgaatcaaattgatacaatttaaattaaatttttgtcctcccaaattaaagacctaattaaataaattatttatccaaacagaaaaaattatggaatttgcaaaatgcaaaatgaatctgtgttttgcgttctctgacataaccgttgtttgatcaatttattcacttttttcggaaaagaaataaatccgaccaccccccccccccctcgggcgacagacctttttttcctttttaatgcgatttgttaacgaattttgcgattttgagtcatttttaggagattttcataaaaatgtcgcttttttgaaactagtgaaattttttggaaaatttgggtaggtctgggggtgggggggtaccaccaaggaaaatataaaattttttactcgtttaattccacaggcctcaaaaaaaaatcaacaatattagatctatgccatcaatccggagattgctgaacaggcgcgcaacatgcttgagtttttgcaaaagcatgtcaaagtgccgcatgacaaagttgggcagatgatcggcaagcaaggcaaatcgattcaggtgagttggaccaggtggttggggtgtaaagtgacgattaaaaattttttttaaattgatttgtaaaaattccaggacattgtggacaaatcgggtgtcgtacgcgttcagattggcgaagaaaatccggaagtaaataaataatttggacacacaatggctgacttttccgggtgtactacgtccccccaccccacccacgaaattataaaatttttaatagaaaaaattacgacaaaaaaattggttgaatttttttaaaccattttgtgagttttttgaaaaaaaaaacaacagcataaaatgtatgctctgccttttcagcatggccttgtcgacttcaccttcaccggcacgcgcgaatctattggcaacgctgaactgatggtcgagtttctgctgaagcacatcaaagaaatggacgaaattcgagagtaagaaaaacacaaaaaagccatgcccccccattcattgcatgttcaaaaataaaaaaatgacgacgactattactttttctcgattatggttcggaattggtcaagcaaaaacaaaaaagctgtttttaaagggctcactcggtttatttttaaaaaatggtcccacattaaaagtctaaggaattttgcttcaaaaaaaataaatgtgtgtttttccacatgttcagggaggaggaggagtgcaagcgaaaattgttcaactctcggcactcgcccttcacttacccgaacaatgggtggcagtcccatcagcagttgaacgccagtcagagagcatccatcaatggtggtggtggtggtggtggtggtggtggtaatacaaatacaaaatgctcagaatttcagcaaatcaatacgcattaataatgaacggctttttggggtgctcggaaaaaaattcattcaagttttctcctcggattgatttttaagctgttgtgacagttttcagttatactgtcggttgaagactcccttcaaaaaaaaaaaaaaatttttttttgagataggttacggattaccgggctttaagaaatcgatttgacgccccattcattctaaatcaaacccgtttttcgaacaacattcatatttccaccaaataatattaattctttcatgaaattttctgaaatttcgaaactaccccactaaatgtaaatgttttaaatttcaagtgacgaatcgccgggttcaaggctccaaatgggtcgaaagagttcagccgatgtcgggccagcccgtgccgtacaatggcggcggcaaaggcgggggcggtgggcagaagcatcgtgctggtggaggcggtggtcgaaggtctcaggcgccgcagcgcaaccgacgggacaaggcgagtggtagtggtgcaactggtttaaatgtggggacgccccgcccagcagggcacgcggcagcatatttaagtgaatggttgacggactcggtatgttttttgtttttttgctgattgtgagattattatttctcgttgatttttttaaaactaggggtggaatcttttttcggtatttttttgtcgccggatttccacgcaccctagcaatttttatgccaaagtttctagcaaaagatttgcaatttttattttgtttttcaaaaattaatttcccggctgcgcgtatgctaccggaagtcagcattccgacactttttctgacttgaggaaccacccttgtcatacaaccactctccctggtcatacacataaatgccaattttgaaacttaaaatttatttaaaaaaacaatttcattcaaaatttttaggctgatgacgaatgaaaagagcaaaggatgatgatgcggaggaaggaagagtaggggaagagagcaatgtgtgggcgcacaatgtgtgaacaatgaggggaatttgactgatttttggcgccgaatttggacaccttttgttttatttctataatggtttcgtccctttctttctcttcttttgtgcgtaaattatgatgcaaaaaaaaaaattgttttgtttcctttgcttttcaaatttttaattaatgcattgttctatatatgttctctaattttttttctctctttttttgtgtttgtgttgccatttttgacattaaaaaaccgagaaaaatttttttatgttttactttttgtgatggaaccgcgccatcgacgaagcatccgtgaagcgaacaacattggctggacaatcaggttctgttcttgctttttttcttagcattcaatgttggctggattatggccgtcgttataggcatcgtttggaattcccatatgtcagttgcattcagtttttatcggaaaattggcaaatagtcttttttattaagcgaaaaacgcatacaaatccctataaaacgcctaattcgggatttttgatgaggagaaaaatatccctgcaaattgaatgtttgaattcagccgcccaccccaaatccaggggtcggattttgaaatttgttacaattctattctctgaccctgaaaacctataacataaaaattatttccggatatctcgactcagttcgaacaaaattacattcggaatttgtttaattctcactaaatgattcacatttttcaattgtcagtgaccacccagaagatcatgatgccaccgctgctgattgtgagcagcagcatttgctgctgaccagcaatgggaccttgtcagcagcgtcttcgtcatttggtgttgtcgatggttgcggcggaggtggtggtcgtatttatcctggactgtttgctgaggacgatgctgctgaacacaagggcaacaccagacggagtgcccaaaatggggctggtggtccagcagggcgcagcaataacattggcccaaaaggcagtggttggcctccaattaaaaggtttgtgcgtatggttgagtagtgcttgctaattagaggggattcggcacggccaagaaaaatcggggaaaattgatgccatgatcaattagtggttatgcgccggattctaaattggttgttgtcaaacgatcaaaatagcaacctttttgcgcgccggttttgaagtgtttgaaatgggacacggaaaataccacaagaatttaaaaattttcagtgtaacaatggaagaacaggccgaagatgatgatgatgtcaacggtgaccataagactgacgatgatgaggaggaggaggaaaatgaagtcgctgaagaagagccgctgtatccaacccgtggtggtaccatgaggaataataatgccaattccgtgcctgctgttgcgcaaaaaattgtcagccgtcgctctttgccaggtgaaaaagcattctaatacttacttactgtttttgtgggccaagttaaatttggtatatacatttatttttagtatattggggtgtgctaatattgaaacgaaattttgaattaaaaatcgtattttttttatacttttttttcatctggacatgtaagacaccaaattctaaacaaacatagcaaatctggacattggctagtagaaattgggtagcttgggccctgttttttttttttttgctcgtttggccaattttttggtcctagaaccggggtttcgttcttgaattttcccaaattctcatcccaactaaatatttacacgaaaataccaaggaccttgttgtctcgctcctaatacacttgtaatgtaattttttttagcttcatttcaacatcaaccacagctgcaaaagcgatggtctccccaacaacagcagcaagccgtacagcaaccatggcaacgccgtcgacaccaagccgttgttgatgatgacgaggaggacgatcaaggtggaaaaagtgccaccgatggtggaactagtgccggtttctggcagttcttcgactcaaattttgagcaatttgttgctcgaggtcacggtcaccggcggcccaccaatggtggtaaatgggaaattatttaattagaaaaattcaatttaaatttgaaaattttatttatttatttttttttgaaatcctatccgtatctgtttttaatttttggaaatttgttcagcgatgttaaaaaagaaattttttgggctaaaataataatatttctgattttctgtttcaaatgcaataaaaatgggttattaatttttactccccgttttttcagcgctttttccccgtcaaaatttgattattttcctcatcggtttgtctgttctgctcctctttgttctccctcgattttgttcacattgttctcctccgattccaatcaacagcagcagcatcagcaacatttgtctttgtccgaccgtttgcgcattttccgagccgagctgcaacagatgctcaaccaaacacgttttgccaatgtacgataaacaattctatgacaaattgaatttgtacaggcttttagccggaaaaaactcggtgggcggaacgcgaagacttttttgcttttcgggccaaaaatgttttttttccattattatttttaaaattttgattgacggggagaaaaaaacagtaattagtagccctttttcgcctaggaaaaagacttttttgccatttttggggtcagattaattgcttacaattttaattttcataaaatttcttattcttgaatattttttcatcggtcccaggaacctggaattattgttaggcaatgggtgccctagtataaaatttatcatcattaagttctccaatttcaagtccattttcggttctttttttcctacattttgcttattttttgaccatatatctttgaacatctaaaatggattgttttgaatgcctttcctccctttttaagtccgctccacgcaccaaatacaacattgaaaggacgctcaattacttggccgaacaaatgttgcgcaggcgtcgccaacgacgcaactcgctgatgaatggtgagtggatgaatggtgagtgggttcagtcccgtatccaaaaaactatttcgtggaggggcaaccggaactggtgtcgtccggcaccgccggggaaaattttgaatctttggtcaaatttgtcaagaaagtttacctaaaaagggaccgatatgtgtgtttggagaggggagtgggggtggggcggtgtacgatgtgcacccttggaaatggcgctcgacaacaaattttctattttggattcccacagcttcttaattatttatcaaattacaggctttttcatttttattttttttttgtaattcttaggtggggccaccgaagaagcagccagtgcaggcggaggtggcacatttggccaataccatccggcaccgcttgtgctgctcatttcatcgccttcctcctccaccccatccccacgaaggtggtggtggtcctccgattgttgaccaagcggcgacg

SEQ ID NO: 6306 - DNA, 5131 bp, Heterodera glycines
gtcaagtgcctttaattgttccattgagtgcctttttccacttaattctattgaaaatgcttttctcgactcccgtccactgcccccaccccgcccccgctcggctgccgaaatccgcttttagttttttagagtattttttgctacccattctctattttcaagcaattgttttttggcggcgccgccggtccgccaaagcggcgtacacaaatgaatgaattgggtgaatggaaatatttcgactgctgctgatgcatacggaaatggagaaaagtgcaaaaggcagccgcttgagcgccttccctcctgtctcatttttttgaaaatttctctccgcatgataaattgtgtgggcgcgttcgtggtggcatttcgggtcagatcggcatcaacaaattaaatttttcttggcattttatttgcggcaattgctagagatcggcgggaacggattcccgtggtatgattctctgccgaaaaattcagatgggatccccattaaaaactgataaattaaaggttgaaagagtgggagtgggagcgagagataggccaaaagacaaaaagaaagtgagggagagaaagagagagaagagtaatggcgagtagaccagccgcttgacgagagggaaatagtgaaatgaaaagatgagagaatcaaaagagcgagagatgtgaggctaaaatgataaaatgagggattgttattataagattctctacgtgttcaaaaatgaggccataaccgccagggcgccaatgactaagggtttcttatttaggtaaatgccgaaaattccgatgcgcttgataggcacaattaaatacgaaaaacgcgttttcctttggttttgagtatctacgatgactttttaatgtagtttttgcctattttaaggttttatgctttttgcctatttcccatttttggcgctcggaaaaatccttaacaaaaatgcaataaaaacgaaaacacgatgaattttcagaaaatacaaaccctaataattgaaaaaatgttcccaaaaaattagaaattttggtttaaaaattgtccttgttataaaaactttaataatttaataatttgttttacaattgaaatataattaaaattaaattttaagtcttaggtattttgctacctaaaaagcattatttaaaaaatttatttgcatgtttttgtgcttatttattgcctattttgcgattttttctttttaggtgcctatttcgcgattttttgtgtctaaaaaaggaagacagacctacaaatggcaaatttaatcactaaaatttttttgttagccaccatcttcataattgccgaagctacactggaggatgatgcttcaactggtatttaacggattcatttttcgtattagggcgcggtagcaatttgaatcctcgctctacagaattatgtaacccataattacgggaccggaaatcgtcaaaaacgccgtaatttccaatctctattccgtaaatgagtggaacattgacatttttattttttgaaaaatattttgattatgtttaaagaaaaaattaaatatttttattatgtttaaagcgaaaattaataaaatttaatttaattacaaaaatttccctggcggcgcctatgccatttgtccttatttctcagattttccttattgtatggttgggtcttagaatgccgatgaaatgcaatttaaaagtttttcaccatttttaggcattattttattaattattttgggttctttgtcactaaaatttctcactttaattattaaactgataaattgctaaaaattgtgttcgatctccgtttaggagagacttctactgcatgccatgcaagtaaaaatgacggcacgagcctgtttcgagaagaacacaaggaggccatttgtaattttttctaaataattttgaagagttttttggacccttaaaaatgattaaaactatagtttgtctgggcagtgccaggcactgtcgaagctccaattaaagcccaatctttttcgaagcttgaagtttgaagttgaaaaaatgtgaatgttggaagaacaagttttcaaaatcaatctttccaattacggacaaaagttttttcataaaattaaatgacggagttaataaatatgcaaaacaaaataaaatctttttttttgattaggtcatctagcaaactttcatgatgttgccggattatttttataaaactcatataacttgtttataattagtaaattttgcaatgaatttttataatgttatttaatatgtaaacaatggccattggtgaatatttctagcgataattcgcgttttctttattagcttatgctgttgaagctgtggttgtccaactgagggagatgacacaaaatgcaaattactcgcaactgctgtttgcacaatgctcccaagcaatggtggaggtgaaaatgttccagtttaaattatttagttttttttaatttttaaaataattttcgataaaaataaaattattatatagtaaattcttttaatgttataaaaataaataatattatcaaaaaaattaaaaggcgagttatttttaaaaagaaaacactatttggggggggggggggagaagcgcgcgtctgaggccgagaggaggtttctaaccatagttgtaccgattctaattatgttgtgttgtttatcttctcaccatgattgcgcctcttgagaatacggttgtaccttttctaaccatgggtttacctattctcgaccatagctgtacttataaccaatgttctacactcacccaaaaaatctcgttccaaacattaaaaatttattcgttgataattttcgcaaaataattggccaattaaatttgttctaaaaaattttataacccaaaatctgccctgttatcatacaattatgtaaaattttatcaataaatgtttgagatatttaagctgaaatggaacagcaaaaaactggtgtgcctctgaagaccaaagtgttaccttttccagcacagattgtaccttttcgaatcattgttgcacctcttacacctgtgatacgtggttgtaccacttacagacatggtacctcttccaaccatggctgtacctctctaaccatgattgtacctttttgaaccattgtttctcctcttccacccgtggttgtatttcttctaaccattgttgtacctcttctaatcatatttgtgactcttcacatccaaggtgttaccttctcgaaccattgtcgcacctcatccatccatggttttagctcttctaaccatggttgtgcctctttataccacggtagcaagtcttccacccgaggttcttttcttaccattgttgtacctgttacagccatggttatacttgttccgcccgcgattgtaccttttctagccatggttgtgcatttgcagaccaatgtgttatctttccagtcaatgttgtaccttttagaaccttccgtggttgtacctctataatcatggtggtgtctctgcagaccaaagtgttaccttttacagccaatgttgtaccttttcgaaccattgttgtacttcttacagccattgttctacctcttctaatcatgttgcacctcttccacccgtggttgtacctcttctaaccatggttgtgcctctttgtaccacggtagcacctcttcaacccgaggttgtacctcttcttaccattgttgtatctcttccagccatggttgtaattcttcctcatggttgtgcatttgcagaccaaagtattactttttccagccaaggttgtatctttcgaaccttccactcgtggttgtacctcttataatcatgttgttcctctgcagatccaagtgttacctttttcagccaaggttgtaccttttcgaatcattgttgcacctcttccacccgtggtacgtggttgtacctcttccagccagcttataccttttctaactatggttgtacctcttccagccatgcttgtacctcttctaacagtggttgtacctagagcccggaaatttcaaatttgcggatcctgttgcaggattggaattcaaaattttttgcaggaccggatccggccggattaatcctgcaaatcctgcaatcctgcaaatcctgcatttaaaatttgccggatcctgcgcaggattgcggatttttggaaattttgaaaaaatttcaattaaatttaaaaaatttccaaaacgataaataagtgttccgatatatttttagacaaaaactggtgaaaattaatatgaaaaattgacatcaggaatagaatgaacaagcgcgtcctcatacctaatccatatgtatattataaaaacaaagtttctgtatatttggcattgtgtcttagaaattttttttaaaatcaataaaatcccgcataatcctgcacaaaaattcaaatttgcggatcctgttgcaggattggaattcaaaaatgtttgcaggaccggatccggccggattaatcctgcaaatcctgttttttccaaaaaatgcaggattgcggactgggattctgcaaaatcctgcgcaggatccggtcctgcgcgcatttcagttggcgatccttgctacacaaagtcactatttctttttggacggagaaaatgaaatcaaagaaaagaaaattaatgtgatcgttgttcggtgtgaaaacgaccgttttggaagggctatccaagcggggcagtggtttacccaaacagttgaaaaccaaatgaaatacatgataaagtaatttttatttaaatagctattagtagggtcgctacttttagtgacgaaaatctcaaaatagttaattaaaatagtgagtgagtaaaaatgccaaaacagtgggaaaagtgacataattttagccaaaaattaagcaaaaataattttattatcttgttgcagttgcaaatgagtaggactgggatgtttaaagacaaaaaccctaaaaggtacctaaaaataatttttaaagttaaaagttcttgccaagaaaatgaatttttgagaaaaattttcacttcgtaggagtgtttttttaaaaattttggatcgatttttagggtgtgaatttttctgaaatttttaagt

SEQ ID NO: 6307 - DNA, 2127 bp, Heterodera glycines
  unsure (1)..(2127): unsure at all n locations
aaaaacaaaaattattttttcgttttgatgaaaaaaaataattttaataatataattaaaanttaaaggttatcatgaaaaaggttgtggagaaatattcttttagttgttttcaaaaatttttaggttgatttttatggaaatagcattttgatcgttttcgattgaaaaaaatttaaccaaaatgccggaagtaattattagggatgatatttttatgcaaaagcattttttttcctgagctccccgtggattttggcagtttttaggtatatgttcgagtcaggtactagattcatgagtcatgactagggttataaattatatggattaacatattttttctgcgcatatgctatgaagaaagggactcaaaaatagcatttgccaattttgcgtttttagtccatattttggccatttttggcaaattttcataagaaaaatgcaaaaaaagcgaaaaatacacccctaaagatcgacttttttggaaatttttaaaaaacacacccctaaaagagaatttttcgatatttcggaattttttttagttattttgtccacttccgaaaattttcgctgaaaacagaatgagattattacaaaaattttgggttgtatttgattcgcaattgtgaagctagaatttaataaaaatcggcattttttaaatgttaaatccattttttggcagtttttagtgtatttttaagtctgttttaacaaatattgaatataaatacattttcggaattttataggggttaaaagttatattttggcagtttttagtctatattttggtccatattttgccatttttgaggtttttagtccatatttcgggcttttttagtccatattttatgtccatatttggcattttttagtccatataatttataaccctagtcatgactaacaatgaccagatcagaaaatatttatttaaagatttatatttgcatcataattttcaaaatattgaattttttaaacgtgtttgtaaaagtttgatttttttttcatctgaaagattctaatgaaattttttcaaatttaaatgtattttccactgaaaaaggaataattttttgaagattagaagaaaacaactacctggattgttaatttaaataattaaagttttatctagcaatcaaaaagcatttaattttttaggatttttagtgcaaagcttccatataagtttgattgccttagaactcatatttgaaaaaatcctagtgagatgaaaaaacaagaacagcattgtccgaatgaatatcatatatatgatcggcgaactggaaaagacctaccattttccgcattttcgcaaatgccaaaatcgaagcgcgacagagttggtcagcaaatcttcagccaaatttacccataattttttgaattttttttcttacagtttctgccaacattcaagcagaattcgcgggttttcttcgtcaaaaacaattttatgaccgtggcattgggcaaatcggcacaggacgaacagatggagagggaaatttgaaaaacattggctttaaaagacatggcaaaacgcccaattataacgtggaccattgcagaaaaattataaaatttttgatttgtaccctcccaatttgggtgaatttatgcagccagcatagtttttatgattggcagaatcttttaaatatgagactgcagactgggacctctgaaattggagacattaaattctcaaccggagacataccagaaaaaatgtgcatttggccgttttccatcactcaaaaatgccgaaatatgggaaaattttcaaatttaatttgccaagacaattccgcccttttttaccattaattttgtctaaagggccattttcatattaggcaataaattaaaatgctaataataagatagtttttgaaggaatattcagaaatttcctccccccccccttcggaagtaaatttaaatttaaaaaaaataacgcactccccaatttaggcaaacgaattgcacaaagtgagcgcacttttgcggggccaaagtggactgatgttcaccaatgcgaaggcaaacgaagtccaaaggtcgggcgcggataattcaattttttcgtaaattattttt

SEQ ID NO: 6308 - DNA, 3587 bp, Heterodera glycines
  unsure (1)..(3587): unsure at all n locations
attttttaattttactttattacctagttcttattcatttaatggagcgtaagcattcatcgatggaggtcagtaaacaaattctatggtaaattatgcattttacggaaaagattacattcgttggttacaattacacacatttttattgtttgtttttggataaggcaaatcccgattattttttatgcttttacactttccttttgatagaatctttttatctgcgctcaaagtgccaagcccaactccgttttgttgttggattctttttctggctcatcgagatggtcgctgcgaggttccgagtttcaacagggaaatttacaaacggcagagccaaacggtaagatttgacaaagcaataaaaatatggacttttgtttcctgagaatcttaaaaatcaattagtcacctaaagttcaagtacncattattacccccccccccctcccacctcatctttacagtgccatttcatttccagggagtcatccgtcgtttctatgcgcggcattggctgacaagcccaacttgtatataatcccactaattcctccgtcgaagaaagagaacgcctcatctccccgctgtgcgcctatccgttcaactttggcaagcaaagcgcgtttcatccaaacgcacccctgcggtgatttcatttttatcggcgccgaaaacaaattgctaatttgggaggtattttaacccaagcgaaattgattttcatttttcacttatttcattttcagatccattctggccaattgctttcccaggtcgaggcacatttgcgagatataagcgcaatgcgaatttcttcgtgtggccatttcttggtgaccgcctcattggacggagatgcgaaggtcttcatgacggccaagtaggaatttatacatttttttcatatgttaatatttctctccagggatttataaatccccgagaaactaatctttcatttgatgtcaaaaatgtatggttcgactaaataagaaaaaattatgacctaagaaactgaagatgcgtctaaaatcgattttacagagaaaaaaattcttcgtaaaattttctgggttttccttggaattttaaaaagattgcgaaacaaaagggtgcccccttttgtttttgaaattcaaaatcggccacttttcatatagcgccaaaaaaccttcgagaattagaaaataaattttcgtttttaaattttttcaagtgatggggaaaggaatgaaaatagtgtaccctgggaattagaggttgattttgattttttttttctttgctcttccaatccgttctcctcaatcagtcttatcactgaacgtgacctcggcctttccgccgccaatgtctctccgttcgccgtttattcgccccattcgcttcccatcacagacctttttctgtctggtggtgctcactcgtcacttcgaattctctccatttcagctgatcacagcgcggcacttttctcactgtcgacccaacaggttgggaaaacctttttaaaaattaaatagcaaaataacgctttttctccagattcttctgcgtgtcactgctgatcggccgttgaccgcctgctgtatggactcggccgagttgcgcatttttcttgccgctgattcgggttccatccgttcgttggacatttgtgcgcaggtcgttcgtttcgttgactctgtgctgatcagctttgcccctgtcttttctctttatgctcctctttcttcagttctctgatcattttgtgccattttcttccgccccaaattcgtcctcttccctcgctgtttcttcgtatatccgtcgttttgaccaccaacacaatgcccaagtctccaaattgtcagtgtccgcagatggcacgcgaatggcgtccggagatgaaaagggctgttattcggtgtgggacacggcaaatggccaatgtttgctgagcggcacaatgcatggtagcagaccaacaatgaatttatttgtttgctaattcatccccctttttagggccaatctccgcgctttccttccgtcgctattggccgaccatcgatgagtcatcaaataatgatttgtacaacagtcaatggaattctgtggcagttctccagcgaaattttccaacaaaacggagcttaaaaatgatcagacattggggagggactgacaaagagtcggctgtggtcggacatgcatttgggaatccatttcatttcatcaattcagaacgatgttggcgaattactcggcaaattggtcaaacagataaacagcggcgaaagaattttggcttcttggggtgacggcattggcataccaattgggaaaaaagcggtattgatcaagcaataattgtgtattagcctttaaattggctgtgccaattcagccttcgtcaaagatcgatggcaaaaggcggagcatttcaaatgcgaaatcgccgctagcaaaagcattacacaacggcgacgtcaatggaaatattgaaactgccagcgaacgcgagaaactgttgtcgaaggaagtgcggtgcctgcgtcgagagttggcgcgagttgtgcaactgaacacagaactgtacaattacagtacaaacatggtactggaagagagtttcacggaaaagagcacgaggagaagcaacagctgacggaaaaagagaaaagccatcatttattatcactattcaatatgaagtttgttaactgttttgagagaataacaaatccaacattccaattttttgaaagaacagccaattaaataattttgggagtcgggctcttttttagaacataaatctgggtaacatttttcatcaggatgattttgttgttgagttcattgaagcagaaattgtagtcagagaagagccgtttatttttacgctaatgttttacttacgttaaagggaaaaacagaatgagaaaaacaaatgaaatgatttactgaaatcattattacagcatggttggcaaatgagaaagaagacgaggtgaggaaagggcaaggagagaacatttgcttacaatgggcgagggatggacgacaaaagcggcaaaagggaaagatcgactgctgtaaccgccccctcacaaccaaatggaattgaatttaaaatgaaaatccaagagaaaataagtcgcgaattagatccagtaatgcgcatcagtatttggcaagacaattggcaattagaagaaatgtatgacaatctcagacacacccgcaatcattgtgatggcccaacgccaaaaaccaacgcccgcgtgaggcgtccgccgtctgttggcaataagcgagcgcaactgcaacaaggtgtccgagttttgattttttcctgaaaaatccgatgaggcgtatgtgccaaatgaagtgcccaccatgcacatatttggtggcaactgccaattccaaactcggcacttcgtccgtcgcgctaacactgcgttcattctgtcatggaagcgattaagcggagaaaatgaaaaatcctaaacattctcaagcagaatccatacgagacgttctccgggcgattcaaatccataagtcataaacacaaagtacgttttgcg

SEQ ID NO: 6309 - DNA, 4542 bp, Heterodera glycines
  unsure (1)..(4542): unsure at all n locations
ttcatcaggatgattttgttgttgagttcattgaagcataaattgtagtcagagaagagccgtttatttttacgctaatgttttacttacgttaaagggaaaaacagaatgagaaaaacaaatgaaatgatttactgaaatcattattacagcatggtgggcaaatgagaaagaagacgaggtgaggaaagggcaaggagagaacatttgcttagcaatgggcgagggatggacgacaaaagcggcaaaggcaaaagggaaagatcgactactgtaaccgccccctcacaaccaaatggaattgaatttaaaatgaaaaatccaagagaaaataagtcgcgaattagatccagtaatgcgcatcagtatttggcaagtcaattggcaattagaagaaatgtatgacaatctcagacacacccgcaatcattgtgatggcccaacgccaaaaaccaacgcccgcgtgaggcgtccgccgtctgttggcaataagcgaacgcaactgcaacaaggtgtccgagttttgattttttcctgaaaaatccgatgaggcgtatgtgccaaatgaagtgcccaccatgcacatatttggtggcaactgccaattccaaactcggcacttcgtccgtcgcgctaacactgcgttcattctgtcatggaagcgattaagcggagaaaatgaaaaatccccaacattctcaagcagaatccaaacgagacgttctccgggtgattcaaatccataagtcataaacacaaagtacgttttgcgtatcccaaaagtggcaggatcaaaaggcgtcaatgaccaatgtcgcaattggaagccatttagcggagtgatatgcaatgacaatttgtcagtgccaccttggatggcgatggttaggttcagttggtttccaggtagatgttgacgctggacgagtcgcactgacagagggctggcgatgggcggttgggtgggcagcggcacccaccgagaacgccttggggagaaaagacatttcaaataaattacaaaaagtactcctcgacatactctggagggaatagttcgtggatagcggtgtagtaagggagctgacaatactcatccgaagtgtgtgagcagtccggctgaccagcaccttaaaaatgaacggcgtaactttttttcaattttatgcacttttaccttgcaaaaacgtatgttctggaagatcgtccggaccacgatagtcaagagtttgaacaaaaagaccagaatcggtagaatttaacgatgaaattcgattttcaacaatttttttgtcaaaattataaattcgtcttgtggcatgctaaatgagaacaatggcatttaattgaccaaatccgacacagaccaaagcaattagtcggcgaatgcgtggctcatcttccgaaaatttataaggtactccaacactcgtagtggcaacgaccagaaaagcgaatgcaaaaacagcggtcatgcatttgatcatgaaattcaatcggcgactcatgtaaaccaaattgttctgaaacgagggcaaattgttgggtatcccatgaagaagagacaaacaaatttaatgctaaaaacaaagaccaaccgtaaacaaaacaaaagtgaaagcgacgagcaaagaaaaggccatcataacctgaattccaattacatttccctattcatggccctttaaaatcacaagttcggggttaattccgttcccaagtcggcccattgttgggacgaaaaagttgaacagcatttgtgtgtgactactgcacatggcaatgatcggagtcaaacatacaatttgagcagtcagaagagcgcgtggggaaaaggctttaaaaaagagataaagcaaaaatgaaaaaaaaagttgaaagagacctttgaaaaggccaaccgatgtcatcaaagagacgagagggtcccgaagaagagggaaaaagacatggatgaagaacaggaaggagctggcggtgcccagccaggtgagaagcagcagcaccaatgcccattggatgacggtgaagtcgtaatggaccctctccaacgaagccatgtgagcacccttaaggggacgagcaatggaaaggcaattttgaattgggcaataaaaaacgcactttgcgcctcgcacgttgtgccattgcgttgtgcacagcaatggacgcggtcagcatgggcagaatataaagggggaaaaccaactcgggcaacgcgtaccaagacatggtcagattgaacacgctgagcacacaaacaacgaaagcaccgacggcaaccatagcgaaaagggcgagaagctggtgccaaaaagcagcctgacaatgcagcaggaaagcgtaagtggagggagaaagtggcaaagaaagcaaccataagtccaccaattgtgtaagtgccgtgctgaagacgacgccagaccaaaaaagcgacgaccaaacagacggaatagtgcagaaaaacagctaaaacagatggataactgcggtaagtccgttttgcttggtcgaatcctacctatatgcatgctgaaaaatacggtgaacaggccgaccacgtcgaagaacacccaattgctgccctcgttgaagtcggcgggctgtttgagatagggtgagcgtatcagtgccttggccagggccaacacattgtcgccagaacgttgaatggcgcccggttcgatccgctgtggttggtcgaactcagtgtggtacacccacccgtttcgaatgtaagcgatgtcgaaccctaaaaaataaaaaataaattacaaattcctgagaaaaaacccgatattcggccatagtcacgaaaaacgcgaaagtccgtgtcagatggaatcactccaagctgaaatatttcttggcccatcacactgcagtgcgggtacggagcgttgtcaagataagttttgatcaaccaagattcaccgggaccagtctgaagggggaggggggaaatattacgatgtttttatttggagtaataaaatggtctttcccatccggctgtcctcgggtggtatttctgaacctgaaacaccaattctcggccacctgccccgcagccctcgaggttaatgaatgcccgaattgagtggcgccaagggtggtccgttataaaaccatgcgacgcctgcaggaaattttcttcagctgaaaatgtaaattccttacaaggagaactttttcccattttgctgattcaaaattttataccaaaaactcaccagcattgaagaggaacagaatgtcattttccaaaggcttttccgagtgtgccaacacttccaaaatgtcgaccataatcgcacaggacaccgcgtcgtccgttgcgccgggcgtgtcgggcagcgtgtcataatgacaattgatcagaatggaatgatcagtgggccgttggcctcgcggtccaatgcgaacaaccaaattggtcactttgtggtagcaaagagtaaacacagacagaaattttaagtcgaaacagccgcttggcctttggacgtccaattccttaaattggccaacggatgatcgttaattttgctactgtcaaagggaatgttcaaagagaaacgcatttaccaatcgattgacgccctttcgctcaatcaccgttctgagctgctcgattttcgaggtcaaaattcggaatgcgtgaatctaatagtaaaaaacaaaaagttgaaatttaagaagtttcgatttgagtgttttattctttcaaaatcaaattggccattcacttcacaattgtcggacccactcggccgcggtccaagatctgtcagcgcattgagcacaactcgggcacgctcttccgaaaaattacccttttcagacgaagagacaaccgaaggcatncnctnttcctaccaaaccactnaaanacaattaaatnctatnaaatttaaaccaccatactcattccttatacaattcccactatacataatactataanccantnaanaaacccaanctaaactcncancctcnttaacannnctanncnnattcanttaaantancctatttccatttcacaatttcctttaaaattcctaattttcattaaaaacnataaaaatttatatccctaaacttccaatttttatatcctaattttacccatccaatnttcaatttctttaccccataactttattttcttacttactcaatncctacattctttcnntcctcaattctcctttaatttttaataatactcaaaaaaacnaattttnaaattctnnacataaattctaaaactnntcacatatccatnaaaactcncctcattcnntcccccatttcnatnantcctcnccntcntttcttctcccccantcctcccatttctnttntcanttnntccttccggggttntttctttctnttntntttntncccttcntnatctcaattnnccttnttntcctccattattttttaaggataaaaacatctttataaatatttaccacgctctatgttgggggtaaaaatgacaataagtatagcggtacttttata

SEQ ID NO: 6310 - DNA, 1653 bp, Heterodera glycines
ggctggggatggtgtccagacatttgcgtcccggacatttgcggcccggacatttgcggctcggacatttgcggccacagccaaatcggacatttgcgttccggacatttgcggcccgacatttgcgtcccggacatttgcggccccatttcttaagggccattttcggacatttgcggcccaattttttgctgaattttgcggcccaagccaaaatcggacatttgcggctttgccctactttcttcatcataatatttaactttttcaatacatcaattaacacacaaaattcttttattttctaatgatttgctcaatgtttaacggtcttacattttcatccaaatttttaaaatcgaaattcaaaaaaacaataaaccaactgtgcataattattttcccctattatccaattaacccaaataagtatcgcctcgcagaggggcttcatgaatggggtgaaatatgaaaaaatgatgctcgttgggccttgagcaagccattggaaatataagaaatttatgtgtgttaattggataataggggaaataattatgtacagttggtttattgtttttttttgaatttcgattctaaaaaattggataatgaataggttacacgaagccgcaaatgtcgggccgcaaatgtccgaaaatggcccttaagaaatgggccgcaaatgtccgggacgcaaatgtccgattttggcttgggccgcaaaattcagcaaaaaattgggccgcaaatgtccgaaaatggcccttaagaaatgggccgcaaatgtccaggacgcaaatgtcgggacgcaaatgtcgggccgcaaatgtccgaatttggctggagccgcaaatgtccgagccgcaaaagcaggggtaaccgctggggatgcatatttgattgaattaagaatttaatggctcaaattttcagattctcgtgagtacatcgactgcgaaagcggcgatctgaagacactcgaaggcgcatttcaccaacttaggacggagatggaaaacgttgcgttcatcgactttgatacaccgaaatgaacgaattcccattcgtgtgggcgtataagtgtgatcagttgcagcagaagacaattaaaagattaagagcttaatttgttgacaatttagacaatcattttgtttatatatatatatatatattttttttttgcttatattttcttgtaatctgcataattaagaaattcagcgactgttttaaaattttaaagaaatcggaggttaatttttgcatagttcacctcccggtctacttaaaatggccaatttcctaaaagcccaaaaaattttatttttcgaaaaaggaggcaccgtcatccccaaggtcaattgttaatggaaaatttcttacaatttttcatactgacacaaaaattttttacctgccatgatgaattttgtaaaatattgtgttacgaattttgtaaaaaattgaatttttaaattgttgaactcaaatactgcaaattataacaggatttgtaataacagttaagaatggttaacacacgctcaaacgcgcaaaatggacgcccgaaacgtgaaaaatttgaggaggagttggaaaatgccatcgctggagccataattgtgcacgcacatcgtgccacgaagc

SEQ ID NO: 6311 - DNA, 1683 bp, Heterodera glycines
ttaatgaattgatggaaccgaacaatggattttatgccttctatggggacaaaataccagtgacaatcaattttgctgtgggcgaagcaaaagtggataaatccatttctgattcaagcaaatcctatggacacttttatggatattgaaaaagtgtcggaatttgcgagggaaattattattaatgaacgtgtaaatgaatctgtcacttatataaagggattgccatggaaaatatgggcacaaataaataagaaaatgaaagcactgacaataatgagaaatgtttggccattttcctttattgtgcggctccaaaagagggtgcaaattaatgttaattgataatatttaataatattatttttagatataaattggaattgcaaatgttcggcaactcttcgaattgtgtcgcaaaagagcgaagtggcggatttcaagaaagaattcagggaagaaataaatttcaacagcgaacgatcgccaggggattccctctttttatgtcatttttttggcaaattatgttaacatattccactcaaaatttttccggcggcgcctatcggcaccgccggaccccccccccccaatgttcctaaaaacttttttgaaaaacagcgcaacaaaatttcggtttaaaagcaaaaaattaaagaaattgttaatttattaaaaaaaatccagaattttggacagaaaattccaattttatgggtacatttttgaatattggcaattttcgtaacaaagtgcacttaaattttcaaattaaaaaaatttcatttgggaacagtcccggttggtcccggtccccggttttttcgcggtcccggtcgaaaatcgaggcccaggtcccgacttttctggttccggcaagtcccggtttttgtcaaaaatccgtcctgctcagctctaattttttattttcgttaagatgttaattatttaataaattgtccattaacaaaaaatgcaaaacgatgaccaaaaaaatagggaccaacggtgatcacagaaaaattaatttaaatgtatttcatatttttctaataaatattaatttattaataaaaataaattttgttaaagtcaaaagttaaatttatttgtattatttatatatttggtaaattagttcagcttaatatgactgcgcgagattctcgctcctcaattgcattttgatgatttttggctgacactgactgaaaataaatgcgacactcgccaaaatgacagtttttcattgaaattcagactctattaaagcaactccaacatttaattcaataaatttttcacctgtttttgcttctttcactgtgacatcgatggccaaagtcactttgtcctcgctttggtcgtaaaagcctttttccgggtccaccaattccttaattatattaatttaaaattaaaaagacattttaaatgccacccacagcaaattcaatggaattgctgaattccaagtgattatattcattgtttccaaaatctgaataaacttctcttctcaaatcagtcacaccattcttttgcgagacaattcgaatggttgccgaacatttacagctccaattttctgctcattgcaaattaatcagttaattcatattaattagcctttaatttgcaccttcttttggagcagcgcagaaaagaaaaatgttgata

SEQ ID NO: 6312 - DNA, 3334 bp, Heterodera glycines
tgaaagcatgcgtccggagcttttcaaaggtcattgatcacgaatatgacaatcctttttcatatgtaacgagatttaactagagtagagcgggaccgggaccaaaacacggacaactgagtacaactgagtaccgaggtcccggttttgaccgggaccgggaccagtcccgggtttttcccggttttcccagccaaaaattcccggtttttcaacccgaaaaggtcccggtcccggttaagcccaaaattcccggtcccgctcaaaaaaacgaacagaaaatttatttaaaatttataaaaatcttgtaaaagtaaaaaggaaaatctgtttttcgcgtactatataaaaacaaatttaacaaggcaaagaaaattatcagaaatcacgggttcatgacaattacgcgaaacacagcgatgaaattccaaataatatgcgccttttgctttacgtaataaaattttttttattttataaatgaaattaccgtatttgctctttttatatgccatggtatattatttttcaacctcctcagaagggggtagataattggagattggtagactaatggagactgggagattatttttcgttgatttatttagtggaaaatttttgaaatttattttaaacatgtcgccaaaaaatgtcatcgcgtcaaaaaaaaaacatttttattgcatttatgttaaagaacttctgaaaatgactccaaaatgacaaaaatctatcattttcttgcttccggtatgcataaaaattggaatttttaatggtgaaagatggacgaaacgatcacgaagaagcctttttttattttttttaatattaattttaattttaaaagtttttagttttttttggcttttctgatgattagtgtcgctacttttagtgatttaacgaatttttttgctcaattgttatgaagaaaggagctcaaaaaacgtattttttcgttgaaatttttcgattctgatgtcactatcgggcactagaaatcactacctattttggcgcttcgtactaaaatagtgaaaatttactatttcgacatttttaggaaaattccttaacaaaaatgcaataaaaccaaaaaaatacacccctaagaaacgacctaaacattttttcaaaaataccactaagaattggaaaattttcttaaaaattcttcccacaatttttttttcttgacaaattttgattaaaaatgttcagtattttgataagggaatagttcaaaggaaaagtacctcatttgcaactccaattagtgaataaaattattttggcttaatttttgactgaaaattaggtcactattcgtcactatttcggactttttgccactattttggaatttttactcactattttagttaactatttcgagattttccgtcactaaaagtagcgaccctactctaatgatgatgcagggctggatggagtcggagatgacaacgaattgttcatttattagccccttttactgttgaatgattttttttggaaaatgtgccaaataaattattaaaaaattctatttatcccccctggcacataaatggagactggtagattattttgcaacctcctcagaaaggggtacataattggagaccggcagtttaatggagactggcacataaaaagagcaaatacggtaagtcaatgacttttttttctgctgattcgaaatgccataaattatttaaaaatctacactttgtttaaagcttctaactattatgcatttttttttctacttttaagaatttttttgcaactttttgattttttcgtaaatttttagttgacttttgatgttttttcgcatttaaatttctatccctacttttcgttccggcctaaaaatacacagcacagttaccagaattggtcgtccaaatttgaccttttttccgagttcgggttacgcatggggtcaaaatgggtctaaatggatgacggatttatgatcagtggccttgaaaacctatgcatttttaatttaaattaaaatgaaaaattgttttgagttaaactgcataagagctgccaaatcgaaaaaagagagtgaagaaatgagaatgaataaattggtactttactgttatgtgactaaagccaaatttcaaaaaatcaacaaaagggcgcgcaaaattcacacgataagctgatccatttgataaactttatcagcgatttttacattttttcctcccaagtgatgctgctgtctgctgtgcgattttcgcgcccttttgttgattttttaatttcgagttgtgaaagtccgggctttttgtttatgatggaaaatctctttgctgatgaaatgctataaggaatcactcggaaaaacaaagtcaattatataaaaaagcttagaatttgcggatattataaagcaaaattatattaaatttacgcctaattcctcccttttaccttttgggaaaacgagcaaaatttcaaaaagaatgaaaattaaattctatttatacctacttcgatggattatttttttaaatgacaggtctatgaccacgatgttaaccggcaaagggtcagccgtgcgcaattgcccgcggtgattgacgagatcatgaacgaagcaaatgaaggcgccagggcattcattttggcgaatttagagaatgtccgaaaggttaatatggggttaaacggtcgggaaggctcggtcaaaaagaattagtaactgtatcagccacgggtcgcagtcgcagtctttctgagaatttttactaaagttttttattttttgaattggcaatttgcgtccaggtcgacgctgttggtatcaactagagtagagcgggaccgggaccgggccgggaattcccggtcctcagaggtcccggtcccagattttgaaaagctcaggttccggtcccggtagggcaaccgggaaccgggaaaaacaagcactggtaagaatggggtctgagtgaaaaattagtgaagaaaattggagtcaacgggaaaaataaaaaataataattaatatattctttaaaagtaaaactcctaagtgtgcaaatggcctagtggctagtctccttgactttccttacttctttcccctggttcaatccctctacagaaattagattattttcaattttttttttgtatactcgtgggtttcctataaagaaaatatgattcctcatagttttttttaaattgatacatattttatcattttttaaatgaaaatcctaccaattgagcttaataatcgcaaaaaccaacctttttttgttgaaaatctgttaacaaattgcacccaaatttt

SEQ ID NO: 6313 - DNA, 2727 bp, Heterodera glycines
  unsure (1)..(2727): unsure at all n locations
agagtaaatgaccaggcagaaaagtgtaaatcaaaagcaaggaggaccgatgnaatgatgagacggaacagaacacagaacaaggcacaggacggacagaaggaaagggccaatgggggaaaagcggaaaatgggggggggggcacgggaaacggcacaatgccaaaggacaaacaacgaatgaccagcgagaggagtgctaaatagtcggttaaactgcttgaagacggggccaatagaagtgcattttgaagtgcgacatttcaaagtgtcaaatgccccatcattaatgaattaattacctaattaatttgcgttttccttctctcttttttacatttgctttgaacaactgtcgcatttgttaaagaaatatgcgattgttctgctcttttccctctttcttctcttctgtcgcttttctttcaccaaaaagtgcaataaaacataaaacggtggtcaaatgaaggaacgaaacggcgggcgaactgatggatttacaaagggccaaaaaagcataaatcccgaacagaaaaaggccaatggcatttccaagtgataatttgcgagcgaccaaatgaaatcgctttcaaattgttgaggttcattcattacgcaatcggttaatttcttttagtccttccaatttggcactgatcatttcccattttaattgattgaataatttatgattgcctccgttttctgccgagattcccttcactccctttcccccatcctttttttcattttttttctttccatctctaatctgttgcgcttcttcttgcgatggtttttctctcttccgccgttcgttccttcgtccgcccatccgccgcattttcaaataaggcgttgtgtctgtttgctgtcgaagaactatataagcgaatcaatgaaaatctacaaaactgaaaaacaaagtttaaaatcagcaggcacaaaaacattctcttccaacttgattcctcaacaaatatgggtaactgacagggctcattgtgtgcacattgttgtggagtgtgacttgctcatttcctttctgacgattgtttagctccatatatgcggggggcgggggtgaaattatcgttggcaataggtcttcgtcctcgccctgttcttctttgcctctctgacggtttctgtttcgacctcctactcctcctcctcctcctcttcttcttccttgtctatgaataatggccgaacccaaagctaatctttctccccctcgttggttatcactaattcgtgtttcaacgacacttcttggacctccgcttgcttcagcttttgcacgggcgtcttcacctccacgtgccattacgacgacttgctggtgcgcgccatcacgatcatcattattatcatcactcgtcttttgggtttgccctttgttggctgcagcaactgcaacaccgccttcacgttcactcaacgcttccgctcttacaatatggctgtcctcctcctcctcctcctccataccactgccttcctctcggttgacaccggtttcagctctagccctggagccttccccggttgcggcgactgctgcccatgtacccttttcgtgtcggtcaggccatttgaaatctctggcattgtcgtcaatcgatttcagtgtatccccccatggttcaggacttctctttgacgctattgagtagacaacagaataaaattggaatagaaaaaacgaaaaaagcatttttttattcaaagttatcagtgatgaatgaagacaatagtgaaaaggccttatttatatgctcaacagaggcgagtccagtgataattgctttgccagaatgataaacaatacaagttgcatgaacatcattatcagtcagtgagagtttgcatcgaagtgctgggaatattgttgggtcataacggacagaaaaaaattctttgcgagtgtacaggacaggcaacaggtgaacaatgggtattcggtgtgggaatgtgtgagaacatacaatgttgaccactcgcaaatttatcaaagaaaatttttctgctttgttggtagcatgattataagcatgttgtatacgtcgaaggacacggtgggcaactatctttgcaaaacttggtttccttacaccagtcaaaacaactcgtcctgattgaaaaataaggcacgcaactgttctcccagcgtagcgaagccgcataattattgagtgaaaacggcgtgtgttcaattcaacatttgctccattacgagcaatttttaaaaattcgtctttgctcaggcgtcgccttattattttgaaagtaacggtgcagttttgaatgtttagcataattttatggctaaaaatttgttacaacagtaataatcaatgaaaaaaaagaattatccgtcattgacatgtaattaaaatcaattcatcaatcaatctttctgttatccttctcttaacactctctctctctctctctctctctcaattctgcttcacaacattcaaacactcgagcgggaacaggtcgtaatgttcacctccacccaaacgcactacacatggaaggtttgggtgccgtaggcggagtccgtgtttaacgtaataatagattcgcacctttaatttttctatttatacagccaccaaatgcatgagcaaacaaaccgtaataagcaaatanccncgcattgcaaaagcatcagttgctgaaaaaggggacaaatcactacatttacgacaaagt

SEQ ID NO: 6314 - DNA, 4699 bp, Heterodera glycines
ctttcgaactttgtttgactgtaaatgcaatgaatctcgacaatttctccgttcctcagcagcacttcgagaggagcagcagaaccttcggttggtcggcaaatgccttttctgtgccaattgaatgaacagcctcatcggccgcccttttgagatgcccttggaataataaatcggccgaatttgcataatttgcgctaaaaaatgatgccgacagcagcgaccattcagcaaaagccgaatactcttcagttcaaaagtgcagattcatccgccacttcatccatttattctgcgcaaaaataaacggaaggacggacggcactttttggaggaaaaggacggcactcaaagaaaaaagggaggggagacaaaagcagacgaaaaaacaatggaaaactagaaaaatggagccagaaaaagtaaaatttggaaaaatggcaaaagtgcgaaaaaaggaaccgaaattatgtattaagggctgcaaattttgcataaaatgatgaataaccgtgacatgcgaaagtgcacttgacctttcagcagcacaattaagcggaatttcggcacggagccaaagggaaagggaacgaatggtggggacagaagagacaatccaatggcatggtaattatttgcgcgatgccatcccaacgacccaatgggacagaataattggacggatggcctattgaaagaagggggagagaaaaactgatcaaagaattcccgcacataaatgaaaaaagggagagcgagaacagaaggaggggggaagaggacaaaaaagggaaaaagaaaatgccgaaaagtatgcttaaaaaaattcaaaattacatcgatgggtcagtgccgtggcttctttttttgagtgattcgatttcgcacgccgctcttctccaaaattcatcttgacccttccatttgatcggtttgtttgtgaatgttccttctctcgttggagattactcacaaaatgccgttgtccatgtgaaaggtcgcccccccccctcgcccattcgattgcccacggcattttgccaacgcttcaatttgaatgcaatggtgcactttttaatcggagaggacgcgaaaagcgtcggtgaatgaccaatgggcaacgtatgagcacagaacgggtaaatgaggagaagagcgatgggcgatgagcagcactcctcaattagacaattaattgcccaattaacctttcccccttcgtccgtttaatccgccgtccgtttgttgcgtttgattttgtccattgcccggcgaatgaccgacggaccatccgtataaaaggggaacaaaacgaagccaattcattccgtcaactttcactccaaccccaattcgtatttttgtctcctcataatatttcgatcccaattgattgctgttttcccagtttttccctttaaattcctttccctccttctcttctcttttctttccctctcccatttcaaaaatggcatccctttcttttttttctttgcccctcctcaaatttaccaacaaaaattcgcttcaaatttgttcgattctgcagctgttttttgtccaccgttcggatcagcacatttctcattgtgaatgtcaaggaatgccgagttcattcacatgattgaaatgtgctggtcccatcggtggttcgtttcggcactttttcttcaattttttcccgtttcggcatttcctcgattccttcacaattcttccgtcatcttctcatcctttctcggtttgtatatgcactcttcggtggactgaactgctcctcctcgttgttcaccgggtgttcatatgcaaattgagtctgcgatttgctactttccacaatttgccgtgctttggtctggcggagggccttttcgtgagccaaatccgaacaatcggacggcgatttggcacgagaagtcctttccccagcaccaagcaaaaaaaaattttcgaatttcacactttggtcgctaccccattgtgaacttcgaactcgaattttattttttctgccttttaaatgaatttttgaagaaaacaaccgagttacataaactagaaaagtgccatacaaaaaattgacatgataaaatttacgtgcactgccaaacattttttccttcaaaaaatgtttcaacgaatgcccaatattttaatgagaaaaaatgaaatttaattaaatgagagaacattaaaatgcaaacaaataataaaacgttacaaaatatttatgcataaattaatgattaaacattctttgggagaataatttaaaaaattgagacgcaaagattcatttaacattaattaaaaggacttttaaatttatttctccacaaaaattgtctcaaatggcccctctttgcttctgtttgctcattttgtccctattgtttctgttcaacagttccgaaagtacggtgacaaaactttttgggaggaaaataaattgggccgaacttttgccgaaaaggcggccgagcaaagaaaagaaaacgaaaattgatctaaattggagaggaaaagccgaacagaaacgaggggaagaaaagccgcagagtttggagaatttcattgagtgttggacgggaattgtggcggagagattgggcgcagatggccaaacggtggccaaattaaaatcgacaaaggccaaacggcggtgttcgagcaacaacaacggatgcgcgaaaatcacatgcaaattcggtagggaaaaaggaaaagcatgccattcattggaagcattgttcccaatgactttagacggaattcagatttgctttgaaaatgagtgcgtagcaagcgaaaaattaataaaaaatggcataaaaatgcaattattaattatatttgctctttcaaatatttttttagatacaatatctttaatttcatatagatatttttttattattatttttgttaaaaaccgtcatacaaatttgagttttggttccttttgatctctttaaatgtatgaatgtaaaattactttttaactaaaacctgtagaagatataaattcaaaatgcacgaaacgccaaaataaatattcgcaaatattcaaaatgcacatacctatctcatggtccgggaacttcgatttaacgatttcctataagcgaagttatacacagaatgagttccgcttcttcacctgtgccttcacttatccttaactcgggcttcccaatgtctcaaattgggtttggcacttggatgtgcaaaccaacagaggtcaacgaaattgttaaaagtgccattcgtaatggatatcggcatttggattgtgcattcatttatcaaaatcaatcggagattggcgcagctctcaaagacatgctccaacacggagagattaaggtgggggggggagacaaattcaaatctaattctcgcgaatttactaaaaacgcgtttagcgcgaggatttgttcatcaccagcaaagtttggaacacttttcacagctttgacgccgcattggcaaatgtccacaaaagcttagaacagctcgggcttgagtcagtgtgctgttgttcaactgctgatccgttctgttttgttccttcgtttttagttatttggacctttgtcttatccattggcccatgggttacaaagaggggaccgaactcttcccaaaggacgcggagggacagaaagtgtttttgtcggacgtggactttttggacacgtggcgggcgttggaaaaggcggtggcccttggcagagttcggtccatcggcgtgtccaatttcaactctgcccaaattcaacggatcatcgacaattgcaacatcagaccaagcgttttacaggcaaaataaaaaagaaacagccaaagacagactttgttggaaaatgttggcacatttcagacggaatgtcacgtgttcttccagcagaaaaagttgcgcactttctgcaaaaacaatggcattcatttcgtcgcttcgtgccccctgggctcgagtgccgacaatgctttccgcaagtcggaatacccttctgtttttgaacatccgaccatttctgagattgcttctctccttcaaaaggtaggcacagacagaaaatgaaaaactgtcaaattgtttattgttagttgactttagagcccggaattttgcaattgccgggaagagaattggaaaaagaaaggggtgagatccccggaactttaatgaaatttgttaagaaaattgaggaaagatttcaactattgtaagattcatgacagaatggttttgaattatgccatgctgcaatattttttagtcccggtccaaattgccggtaccgagacttgaaaaatgggcctggacggggccccgggactcccggccctgtgttttgtccaaagaccgggaccgggagttccggcgggatcccggttctatccgggctctatttaatttttagccattaacaaataaatgcacttatttccaagatttttgtaagacaaaaacgcaatattacattacttttcaaataaagagctgttttagtcaaatgcccaagttgcgctgcgtttcttaacccaatttggcgtcgttgtcgtgccgcgttcgtccgatgcgcagagacaacgccaaaatttggacattttcggattttcgctaaacgaccaacaaatggcgcaaattgaggcgttagacacgggcaaacgcattttgtattgactgtca

SEQ ID NO: 6315 - DNA, 2680 bp, Heterodera glycines
  unsure (1)..(2680): unsure at all n locations
atagaatttatgaagcaaagatatgaaaaaatctcctaaagggggaaancccgcaaacgaancngaaaaacccatcttaaaagccacaaacaaaaaagcccagcannnnncaanacccaccgaaaaancaaagaaaaanaaanaattattctgaaaaagaaaggcaattgaaaccatcgaagagagaaaacagtgcgccaaactgtgactgcccaatcgaatttgaaaaaaaacaacaaccaatcattcattcattctttaccatagtaatctttggcttttttaaaccttcttgaagaaagtgaacgtggtaattatctaatctaattaaatgcaaacaaatcgcaaaatatgcatattatagtgaaaaatatgcacacgaatttttccaaattaaattcattaaatttaagctaaaatatcgaaaatactaaatatgaaaatcatttttaagaaaaacataaaaaggcgctaaaatgcacaaagatgcaaaatatgcatatggaaatacgtccttgaagcttcaaaacgaaccaaaacatattttcatacgttcgaggcctcccataaaccaggaaacaatgcatgtgcatataattacatacccaagtgatttttatggtaaaaattttgagaaaatgtgcagaaaacaacaattaaaaaatatattttgttgaaatttcgcaaaaaaaaaatcataaagcattttggccccataaaacgaatataaagcaaaaaaaaaaattaaaattaaaaaatgaattaaattatcttaaaatatttcaattttatgatcaataaaattaaaaaagaacgattgacacgagccgggttcgaaccggcgacctcgagtgtgtgagactcgcgtgataaccaactacaccaccgtgccttattcccgctaattaatttcactttcattttctgaaatattttgcttttttaaaaattattatacattttttttcatgtcacttaaattagcctttcttcgtccaataaaaaaacaaatgtaacatttaaatgtttaaaattctgtttgctttttgcttttacataaaattgcgattagcaaaatatcgaacatttgaaggaattcgagatttttcaggctttgatgcaaaccgaagaaataatgagtttaatccttgcttttttgaattttatttttgtttacactttcccaattgtttttttgtgtttcttttgattttaatttattcgctttttaataaaataacatttaaaatattaaataacttataattataaagtgagttaaataaattcgcactttccttcgcatttccattgtttctcttctgtggcttgtccatgtttaatttcttcttttcccggtttcaattgcccctttttccattttcttttcccccctttttttcctcttaaaagtcgcgcacaattttttacaccattaaaaaaagcgcaaccattacaaagggacaccgacgacagaacaaataaacaacaaataagcaaacaaaagccataaaatttattctgtcagacatcgcacaaaaagaagcgaattaaataaaattaattgccgacaaaaaagtgcaaaattttgtggttatttgggcaattaataaatggtcggatggaatgattgatgggaaagggaatgaatgattgatgggtgaatgggtatattttggtgccaccccaatccatgccattatccgacccgatcactttgggctgatcattatcaccgatcactcactcattcacccattccctttctaagttttccgtacaaaacgtgttttttctcgcttaattattattattttatttttttgttttttttaaacaatttccgttttgcattttttcgttattttaaggaaagaattgaaattttaattgagaaaagcttaattaatgcgccattttcacttccatcaaattttcattgttttttcgctgaattttctgaaaataaaatcaaaggaaaatgaagaggtaaaaaagtgaataaaataatcctaaattattggaattgccttttttctgttcagccgattggcccaccgattcgaagccgtccctccgaagtgatcgttcatctccgtgccaattcctacaacatcagcgcatttgtgccaaaccacccgggcggagaatccgttcttcggctggtcaatggtcaagacattgagcaatacattgagggacgaaagtgcgttttgggcatttgccatcggcatcgatacgcttatcaggtggccaatttggcaaaattaatttatacattggataaattacactcaaatttgttgaacaaatgccaaagccgattattgttagcgaatctttgcttttttcgagattgacccaccggaacttcaaaaatgaaattcatttggtacaaaacaaaacctaattagcaaatgtctttgattattaattgccttgatttgaggtgctcagacaattcgaaatgccttcggatgttatcgttggggtgaagggcaaattttacaacatcagcgcatttgtaccggaccatccgggcgggtcttttgtgctcagagcgatcaacggtcagcagaacgtggagcagtacctggaggggcgaaagtgcgtttttggcatttgccaccggcacgccaacgcttacgaagtattttatgaattcataaaatttggtgca

SEQ ID NO: 6316 - DNA, 2806 bp, Heterodera glycines
  unsure (1)..(2806): unsure at all n locations
tctaatttacaataataantttgtttttaaatatatttacttattttttgaaaacttgaaaaaatatcggtcacttgaaataataaattctaaaattttgtccaggaaaatccaggttttttcctgttttgcctggacctggacctggatttttttcacatttgacctggacctggatttcctggacaaaaatccaggaaaatccaggtccaggaaaaatccaggttgtcaaaaaatgcctggacctggatccaggaaaaatccaggcctggatccaggtccaggtcgaactctacaaaggagcagccgaaagcttgtaaattcatatccaatttggaaattgtacagaaacgcaaaaaacaattacacttttatttgtacaaataaaaatttcgaaaatattttttatttgtaaaaacatttgacttttcgtaattggtactttataaatttttaattcagagcatcggaagcagcacaaaatgttcttcgtttctcttcgcatgggaaaattaaaacctttaaaaatcaattataaatataagtgtcattttttaaattatttttttattacttatttaaatttttttattttcgttttatttttgcctgttttttttagcattgtccgctgttttggcatcggttctttttcagcgctctgtcatacgctttttcctgctcctcaaatggcattttgcgcagttcgtttcggttctcctcctctgattccaattgtccttcgccattttccgtcgtttcgttggcgccaaaatgtgccaaaaagagaaataaaaacaaagcgaaacgaatggaagcgaaacgcatcactttaaagcagaaattaattaattaattgaaataattagttgtgctaatgaatgactgattggttaattattcgtcctccgtttctctctccgattgattgcctccgtttaattttgctgcaaatttcgttttgatgaaaattaaatcactcgccaaaaaagccagtcatatgaatcaaggtcataatcgtataatcattgtctattaaatgattttccaaataatacaaacaataaaaagtgctcatggaaaatgagtcagaaaaatttatgcaaaaattaaaattgaagtgttttacggacaatgaattagcagcttatgtcacagggcataaatagaaaaacatttgctgaaaatatcgtaaaaaataagcgaaaaaagagtcatttttagtgataaaatattcacttaaaaatagccgagagattagcagaaagacaattcagcaaaaagaaaatacttaacacttaaaatttttttaataagggattggtagggagcaaaacacgcaaaacttaaccaaataacttaattttggtcatttaaataattattaaatgttttataatgtttttcgaataaggaaaaatttttaagcctaaaattttttacaagaaaaaaataaataaattttggtgatcaatttttgagaaaattttttaattcttaggggtgtattttcgcgattttattgcattttttatggaatttttcggaaaaaacgccaaaaaaggcaccaaaatggaaaaatggcaaaaaaggcatttaaggcacgaaaatcccgaaaaaggcaaaaaaaaaaaaggcataataaaagtcaacgtagaagtctcaaatcaagtggaaaatgtgttatttatgcttaattatcgaaactagtgcgcaaaaaaggcatgtctcaaaatgcgagctctaattataagccacccaaatgtttttgataaattttctgacggattgtccatatgacttaaaaaagtgcaattaaaatataattttgcataaattactaatcaaaagtatcagacgattgattattaagtcccaattttgtgattaatcgtttaattatcgctttacaattgtaaaatgaatgaatgattctgtgcatctttcgttcgctctttccttcaccatttgtcctcaatttgcttctctcttcgtccatttctctgctctttcatccccatggtcctccgtacccccaatccgaactgctccaactccatttgcgcttgcaacggacgcaccgccgcgcgatgcgttgggcgcggcttaacactttcgaggcgggcgccggcttcaaatcgctgaaagattggggggggggcacaattagggcgaggaaaaggtaatcaattaattagtctactaattaataacgggaaaagggaagacttctgctaacaaaatgagtgactgactcttgggaaaaaagacaaattcgaattgccaatcaaaacgattgaatcaattagcaaggcaaaagcaaaaaactaaacagactcaaaaatgtaataaataatccgtaaattaagggattttggatttttaatggcaaattcaaacgacaaaatgcagagtatgttcgttttctcacagtccttcctcgtcaatgccttcgtccaccgaaagtccgtcagaaaaagcggcaaatgccaaaatgaacagcaaaaaaagggcaaaattgtagcgaaggttcatctaaatatttcttgagtctatcaaacattcttgagcaattaattcatttctacaaagggagggaatgttttacttttgggggtaatttatgctcttttcattgggtaattggcgaacaaaaagtttacacaaatattctcggtaaaccaaaaatgatcacatgaaaaacgaatgaccgagaagaacggccggcgaatggagggatttgggggcgccaaggacgaaaagcgtgaaaaagggggaggggagaaaaagggagaggggggggggg

SEQ ID NO: 6317 - DNA, 1811 bp, Heterodera glycines
gttcgactctgatctgatcggactgtgtttttggggccgatcatttggccgaccctccgctgctcaattttgatcaccaccacccgcgagtttttgcttcttttggtgttgccaatacttcgacaaaatgcacggaattgcttttgaatggcttttttgtattcaaaactaaaattgggggagatttattgaattaaattagcaagtggggaacgtaaataaatgttccgtgctctcattatttaattacctaattaatttgccctaattattttttaattgtgactgtttttttcaattttcacctgcaaaaatacaaaatgggcccattggttgcggttgcgatgatcaaaatgtaactgaacacacaattaattgcccattttgtcagatcggagagcgaagcgatggcgaacaaattctggaagaaaaacaacgaaagggaattggaagtccagccgaggagttggaggagcatcagcacgaagatggagcggaacagactcagctgactgagagacaaactttgagtgttgttgttttctgcaatgaaaagggagaggatgccaaaaaaagaaggaaatgccatcgaatccccggccaaaaagcgggaaaaaatgccataagaattctcgtcgacttaagagtcgaaaaaacagaatctcattgtcagactgattttaggcttgaatatttgaatccatcaaatgcgtaattcgcatttaaaataaaacagaatcagaaattaaattattttttgtcgggcgaaaattttttaaatcttatttaaattatttgttatattttttgaactgacttggccttcggacgtataagcaaattgccaaaacgcaatacacagcaggcgacacacagttcagaattaaagttgaataaaaggaaacaaaggccgcctcttgctgagtgacctccgaagcggcacacatcacaagactaacaataagaccaattaaaaagggacaaatcagtggaaatggcaaatacattaattaaatatctaactaaataaataatcaattaattagttaattaatcggcagttacttttgcggaattcgtcgcataattcgatagctaatgaaaaggatagaaaccccaaaaagagcagacaaaataagccataaaacagtaaaatatttttggagatgcgaagaaatgcttaaaaagaggaaaaatgaattaaaataaaaaataaaatgaaacattaaaagtgtcaaattaccgtgggaaaatgacaaatttaagtcggtccaatccgatggccaccatcaaagcggaggaaacattcttagaaaaaacggggagaagcattggccaaaagcactggtccaagcgaatcagattttggccagtcaaaacgatgaaaaacatagggaaaaagccgaattggtaaatggcaagcgaaagagagtcaatggcaatcaaaacattggtggagccgtgcaattgcttaaaaatggggaaaataaattaaaatattttgaaatttataattataatttagcaaagacacggaccgatttgaaattgtgacaaaaaccaaaagtaaattcaacacaatgccaacggaagcgatcaaagtacgaacagtgatcagaatgaccagcaaaggcacaaagccggaagaggagagaaacgagtaaaactgaacaaaggcaaaaagcaattagcagtggaaattaataaattaattattttattagggatgcgaatttaaatcaaatgactttttttactgcctcaaaatgactcaaaagtattttactctttattttaagcttctaacactt

SEQ ID NO: 6318 - DNA, 1084 bp, Heterodera glycines
taatgagtaaaattaaaaatctcccattttgccatgagacccgcgattcgatgattattgttcttgttttgaataaaaaaagtacaaataaacggggctccgccgagattttatcgggattttgttccctgctctatttatttcaaaatttcagtctctgattttgtgcttatgttcttcactttttcacacaaaaagatccccaggcccagcccttcgaaacattggtgtattctttgcattaggaaagaaaatcaataaaataacaaatgtttgaatgaaaatgaatgcaatttgtctgtctgaccccacgggaaatgttaatcgtcttcatttcaaattgcaaaacacaggaaattgccagtccagcagcagagaagtcttcttttttgagaatcctccttttcgaattataaacttttcgaaaaattccactcaattccttagtaaaattttcgaaattttatcagttgctttaggcacaaattggtaataaactaaaaatttccaaaatgtaacacaaaggctcaaaatttcttgtaaatccaccatcctcatttcttgtcgatgctttttcaacaagatttgtttttacattttgcggatgaattttgtcttcacttctgtctgttgttttcatgttccaccagcctttctttcttatctttagtattttttcgtctttttcaatttgtatgtcaacatcgggaacaaaaattgttgaaaaatcaaacaacaatcagaaattattatccatcctccccaatcaatcaatccattcttcgttcaacaaatcaattaggttaatcagtgttcgatcggtgctcttttgaattgatgcgtgaatgattgaatgcgacgactgtttcacggtgatttgaattaacactgccaccactccaacaacaattgttgaaatcggcgaggcgactcatcacacaacacaggcattgtgagaagagagatgaaaaatgcgatggtctccgcttcttgggcttttcaacttcctccgatcgatgcctttttgttcaacattcttttcttggttgcttctttcaccacaacaacgacagcaaatgcgcaa

SEQ ID NO: 6319 - DNA, 4280 bp, Heterodera glycines
  unsure (1)..(4280): unsure at all n locations
ttataaatttcgaaactggtaactttttaatagcgcccttttttgttctgtaccgcttaaattttttcacccactttttactacccccccccccccccccataaataaataaaattcagcgccgccgtttggccagaaagcgtcttccgcgctcgtacctcaaaaaaataccgactaaaaagtatcgaaagggcgacccggaggagacgtgtgccatctgtctggaggacttccaggaggcggagaaactgcgcgtgttgccatgtcggcacggtacaaaaggggctaattaattatttgaaatgagcgtttaaataaggaaaaataattccaatggcaattttggaatgagtcgttttaattacttttttcaactctcgcatcacttaaccccggctgttcagcgtaccattgcaaatgcattgacccgtggctgaccaaaagtcgcaaggtttgcccggtgtgcaagcggcgggtgggcccacggaacagcgacagttcggacaccgatgaaacggacgcggaggttggcccggacaaaacaaacaaaaaaagagggaatcgaacacattttgtccgtccagagaacgccctcaacaaccgccggacgcgctgtcagtggcggtggactgaccgctccgtcgtccgccccactgttgtccagcagggacatcgactcgttgctgcgaaatgcacaaccggtgagtctccgcgtttaattggtagaaaaggctggattttttgataagagagagtccatgacaagagttttactgcgcatatgatactttaaagttgtgtttttcttgtataatcccaaacgatggaatttttctattgtagaaattttttcgaaaatgtctatttttcctaacaattttttttaaaaatgggaaccgacggggcagagggatgaaaacccatgtacgcccggtaggtgcactacataacccgcatatcgtttcccccggatttttaaaaaaattttaaacagtaatttaaaatttttaaacaatttttttgaaaaaatagtaattcactataaaattttgtaaaatttctattttgaaaattaaaaaaattcattgttcattgtcagatggcgaccacctcttctgccagcggcgccggtctttccttcgcctccgattgcccttaccccccaaatgtgccgacttcgcatggcactgccaccatcaccagcaccaccagtggaggcagcacattcctacgcacggcaaccacaaattatttggcccatctcaacaacattttccgccgtatgtcgcgtgaaaattacaattttataaacaatttttgccggaagaaaacggcaggaattggtgggggataaaggaggaaattcaaatgaaaattttccatatttccgttcccaaattgtcaggccgagcagcgccaccgtcagctgccgacacttcggctgttctgcaagccgacggcactgaccacaacagacgggggacagcagacccatcggtagagaaacaattttataaatttttgcaaaaaggatagggttgctcactaaacgggtctatttcttcctcaccaaattctattacccattatttctctcgaaagcggacttctgatgcccaaaatctccgtaaaattctttttttttaatcgaaaaattgccttttatacacgactttgttttgtattcaaaatgctactttgtccattttgcagagcaccgctgcccaactgttgttgtcttccgccgcattggacgacgcattcgcaaccagccgaagtgtcggcgatgttcagcaccaaccgttgcctacgaccaccgccacttccgcttcaaatgccgtgcctgcccagccgctgcaccaattggtccgctcccgttgggccggcatgcgcgccacgttggcaaacatggtaagcacataattagctaatctacattagtcaaaggcaaatgccgtacaccaaacatgaaagcgtcatcggaacagaagtgcgggtacacagctataacttattatttgtcaagcaaattttgtaatgccaagaactattagcctaaaaacccaaaaaatatatttttttttccgctgccccacggcttaacaattttttacgcctgaatgaatcgtggtcgtcttgataaggaaaaacttatacaaatatgttaatatttctggcgccgaaacgtccccgagggtcgcaaaagtcgggacacgactcaaatcatccgggtacaccccaaaacgtcgccgccgtaacgtcgccgtcgaaacgtcaccgccgaaacgtcgccgcaaaaaaaatttaaaatttttcaaaattttaagaaaatttaaaattattttaccttttctgaaaatctaagtgttaataaaaactaaatttgttgatttctaagaaaaaaatcgaaaaaaacttgaaaaaaaaaattttttcccctgaatttcttaataaaaattttttttcgaatttttctagaattttttccgaaccaggctaggtaactaaaaaatttttgataaatttttagataaaattttaaaaaattttgcggcgacgttacgtcccggcgacgtttcggctggcgacgttttgtccggcgacgtttcggcggcgacgttttgtcctgctcccgtcccatccatcatcaacaattgttttgaattttcagttggccgacaaatatttgtgcattcgtttgttggaccatcttctgcagagtgggaaggcgagccgtttcatcaccgggcacactttacgtctgtttttgccgcttgtgctcagtgtgccgaccgttggcgacggcggtggactatcggttggtgggagcagcaaattttcaaatttggttacattcttagattttttgacgatttcagggctcccggtttagcgctaaacctgggttaacatcatttttatattgcactgctcgagcatgagttccaagaaatacaatccgaaaatttcggacatatttaaaaatttggacggggtggattaagggttggtgaaagcaaatttgcacatttggttacctaaccattttttacgatttttaattagaaatccattttatataattgctgaaacttattcgaaaggttttatggcgatatttttttccggcagagtttgatcgaaaatttgtatttatacagaattataaaaaccgaaaacatttcacaaaaaaacgaatttctaaaattttttctttttaatttgaaagcgcgaggnggaggaaataaagcgccattctgtccanaaatgtctgttcataattgttgtccgcagaatgtgtgcgcgcttgtgctgctccgctactgcaccgacacgcaggcgctggacgcgctgcgactgttggccgaacgcgacgccgactgtgcgccggtccttcaacgaccgtcgcgccggcgtgcctttgcccccgcgctttcgctgtggactcgctgtgcgacgcgctgcgcgcctttgtgcgcccgttcgccgaactgacgacgccgcaagcgcgcgcgagggccaggcgtgacgcgcgagtcgtcgctggacacgtccgccctactgggacttcagctgatgctgatttgaagaggatgatgatgatgagatggtggaagggaaattgtacaaatttcatgggaagaatgaaagtctggcggtggggccccaccgttttgtttgtctgttttttgtggctaccaccccataagcaaaactaattgtactcactcagcttagttttttttttattattttcgcctaattgtgacatcttggtatggattgaaatcgggccctcggcgagactaaaaaaaaatcgggagtcccggcaaaaaaaaaacagggtggttttcgtttttgtttccgtggtaattggttgtttgtgccttcccttttccgataccctttgtagcttttttggaaaataaccagtgttcggtattcttaattaattccattaaaaaattccaagttttttgggttcggcctacaaaatataaacgtgtctaacccgttctcttacacccaaagcacgcattgttgaattttaagggttccaatttgttttgtttttgtcaaaataaagagatccttaaatctaaataaaatatgctaaacggtgacacgaaaaagacaaaaacattttacaaaaaacaatatacatatatacaatatacacacattccgatcacatgcactagttctactggcgccttcttcctccttcggtgttcgcaacatccagtcgtacaccgcgccccattgagtatcggttgttg

SEQ ID NO: 6320 - DNA, 1606 bp, Heterodera glycines
atttttttgaaaataaatttaaaaaaaataagaaatgttttcaaattacccatttcttttttgttacgggcctgattactttgaacaatttttcactggaatttgcattactcaatttttaccatgttccgatgtcaaataattgtccatttctttttattttccaaattttagtgatttttatgcataagtcttcttcctcttcgtttcatttcatttaaatttctttggcgaataattttttttccattttatgcaatttcagaggctgtcctccctaaagacaaacaccataaattgtttttatggtataaattagtgctttcaggcttaactgggtgcttatagggactgtctctctcattggataattttcttttgtctgtttccatttcctttgtttatgtgctttttgcgtattttttattcatcagctttttgctttttctcgctgcttggtatatccgtcttatgaataaacatgtgttttaaatattctattacactgcaattgggacttggatggtcggaattttctaaatgacactctttggagttagattttagaaaaaaaaattgttaaacaggctttgccaaaaagcaccaattccgaagatgacttggacaaatttttatttatttttgtctatctcttaaccaaaaaaaactgagtcagctacatattgtcagaatgagccatgggataaacaataatgtttgcttgtcctggatttttgtccagaaaatgcaggtcaaagtcccaattctttggttctgagacttgccgtgaacatccatttccatggtcggaaaatttaattttgcttttacaataatttcattttgtgttttttgaaggacagacttaaaattttgggaacacccggatttaagtgactaaaaaatattttttcgatctaaatttgttttagcctaggcaataaattacgtaattgagtaaaaaagaaaagaattaagtttatccataagacacaaggaaaacataagcgaacaagcaaaaaaatgagaataaagaataaaatgaaattaaaatacgcagaaaatgagataagttaattgaagtttaaaaggtaaagcgcaaattcatggcattgtcttatcacgtggcgaaattcagaaagggcggtggccgcccccaccgccgtgcccaaacttgggcaattctttgtactgtccaacgtcctgtttttccgttgcccattgactcgtagacgatgattgaccttccgttgcccattggaacgttgactgctcggcaatcgaggcatcgaaagtcggtgccaattgcggtcggcgctgatccgtcccggacagtgtcgtcccgtgctgctgcttctgcacatgagagaagagggaagggaggagagattggcaaatagcggcctttaagccagtgtacaaaattagggtgcaatgccttcgcctcccggaaaaattaaagtaaatttgtagaaagaaattttcatgcaatttttttaaaattttttgtagaaaaaccagcgattcatcatacacctttaaaaatctttatcgaagttttcgaatatcttttttctgagatattttctatttacaaaaattcagt

SEQ ID NO: 6321 - DNA, 1430 bp, Heterodera glycines
tgaaaaacattagtggtttgttctgtgactttagtgtgagacactaatgtgtgtcatgcttttgaaaaaacattagtggtttgttctgtgactttagtgtgagacactaatgtgtgtcatgcttttgaaaaaacattagtggtttgttctgtgactttagtgtgagacactaatgtgtgtcatgcttttgaaaaaacattagtggtttgttctgtgactttagtgtgagacactaatgtgtcatgcttttgaaaaaacattagtggtttgttctgtgactttcgtgtgagacactaatgtgtgtcatgcttttgaaaaaacattagtggtttgttctgtgactttagtgtgagacactaatgtgtgtcatgcttttgaaaaaacattagtggtttgttctgtgactttagtgtgagacactaatgtgtcatgcttttgaaaaaacattagtggtttgttctgtgactttcgtgtgagacactaatgtgtgtcatgcttttgaaaaaacattagtggtttgttctgtgactttagtgtgagacactaatgtgtgtcatgcttttgaaaaaacattagtggtttgttctgtgactttagtgtgagacactaatgtgtcatgcttttgaaaaaacattagtggtttgttctgtgactttagtgtgagacactaatgtgtgtcatgcttttgaaaaaacattagtggtttgtttgtgactttagtgtgagacactaatgtgtgtcatgcttttgaaaaaacattagtggtttgttctgtgactttcgtgtgagacactaatgtgtgtcatgttgtgccataaggaaatgccacaagaaataagaaaagacgaggaaaagataagaacaagaagagatgatgaaaatgccaagaatgttgtgccatagggaaatgccacaagaaacaagaagagatgatgaaaatgccaagaatgttgtgccataaggaaatgccacaagaaataagaaaagacgaggaaaagataagaacaagaagagatgatgaaaatgccaagaatgttgtgccatagggaaatgccacaagaaataagaaaagacgaggaaaatataagaacaagaagagatgatgaaaatgccaagaatgttgtgccataaggaaatgccacaagaaataagaaaagacgaggaaaagataagaacaagaagagatgatgaaaatgccaagaatgttgtgccatagggaaatgccacaagaaacaagaagagatgatgaaaatgccaagaatgttgtgccataaggaaatgccacaagaaataagaaaagactgcgccgaaggcgctgaccccgctagttcgaacaaaaagttgaaattcaatttttgaaaattcttacttttgtttctaaattgtcaaaacaatctaaatttagtcaaaaaccattgcaacatcaaaaa

SEQ ID NO: 6322 - DNA, 2212 bp, Heterodera glycines
caaagtaaattagatgaaaaattaggggctctgttagagctcgaaaatttcaaatttggggatcctgcttttaaattggaactcggaattttgctggatgtggcccgcagagataaatctcacaaaatcccgcatttaaaatttgcgggtttccgcgcgggattttggaactttcgaaaaattaaaattaaataaaaaacgccaaaaaactaaataaaaatacctgaaaaatgtttggtcgctggcggcaaacatgaaaggcggtgatggacagacaaatatttttcaataggggggtccgacagtttgagaggttgtaggtcaaatgggagccggaaaatccgacactggaaaatccgacaccggaaaatccgacactggaaaatccgacacaagcggaaaatccgacaccgatggaaaatccgacaataacttaaattaaaattttttagtttgtttgaattaatatctatctgcctaagcttagcaagttctcgaattgaatttaccgagaattatttttttttttgcgtctttttttcacgaatgatctgatcaacttctgttgcctggagaggattaggtccaggtgaattctcatgaatttcgcctcttcagaagacattaacaaactcaagggatggggtagaaccgaattattcgagaacagaggacggaatagcattcaaaatggagaattacctcacccatatgttaaaaattgttaagcctatttacattgacgtttcacaaggatcacagaaattatttttaactattttttgagataatcaaaaaatggcatacgaaaaatattcatatgcctacctagatagaatatgaccataaaaatatttttttaaataacttcagtactgtaactttattatatgtattttaaatattaactcaaaatatcaaaaattatttttaaaatttaaagttggtgtcggattttccagtgccggattttccgctagtgtcggattttcaagcggtgtcggattttccgcttgtgtcggattttccagtgtcggattttccggtgtcggattttccagtgtcggattttcctagagccggtcaaatttggatttcggcttggggtgggggggtaactcccccgggcgacgttcttttttttgcctttcgcgccattttttttttgcgtcggtttttccaaaaacttttaaggaacaggagtccagcggtactgataggcgccgccagggaaatttgttgtattttttaatgcaattcgttaatgaattatgtccaaaatgataaattttgcgaatctggagagaggtactaacgaataaaattatccaaaaaaatcctatcctggatcccgcaaaatcccgtgcgagatcctgtcccgcaccaatttaatacaaaaatacataaaatgtaatatggatttataatttaaaaatatataatttatataaattcacaatcagatctccgcgcaacaaattcatcatcagcaaaaagtcttgtcgaagcgctgcaaaaaacaattaacgacaattccgaaatggagtattattttacatttatattcagtaaacagccagaagatttcaaaaatctcccctagcgattttatctattagttcagtattttttaaaaattttaacaaaaatgcaattaaaaatgaccaaggaccgatattattaaatttttttcaaaaaatggtaaaagcgacaaaatttaagatttttgaagaaataattagaatttctctttaaattgaattagaaatgaaaaaagctcaaaaatcgaagttcttataagaaaaactctatgcttttattcaaaaaatgaaatttaattcttgtaattaaaaggcagagcaccggatgcatattggatgccatcgcagactcaaacaaatggcagcgaccggttatttatacagcaattaatacaatcaggctccacaccatacagctcgtgggtgttatttaaattttaaataatttttggcactgatattaatttaaaaatgagacttaatatgttatttgatttttcttaataatccaccttaataatttaaatttttcatttataaccttaattataagcaaattataattcaggctatattgcaaggtgcgtgcatcaacatatcatcaaacggaagtccaaaagaaactgaacgtttatttaaagaactggatgcaaaccttttagggaacattc

SEQ ID NO: 6323 - DNA, 653 bp, Heterodera glycines
  unsure (1)..(653): unsure at all n locations
cttcaataaaatatcatttaaactaattttagagtaaattcgaagattcgaaatttagaattcaggatcttgcgttgagaattcgagtccgggaattcgtacttggccgaaatggatgccgtattcgtgatcagcaaccaaaaaaaaaaacttggaaacatgttttcatgatttttgaaaacaaaaaatattttttccaaaaaaaggtggatacaatctaaagcattacctgtattacctaaatattcatattttctgagtgtccgggaggtcgcttattagaaatttctttaggatttttatcgtcaattcttccacaaaaaatatacatttgagaaaatcggtatttccctttgtcccaaggcttttgcacctcactgtatatttgtataaaatttttanattattttaccaattctattctgaattactgtaaaaaggtgcttaattaaatgctgtttgttttcttcaaatgtccctttaagttacgtacacaccgtaatcattaccgagaacacatataacggaacacagtggatttacaatattccttcatgtgatgcgcaatcggcaaggtgcacaacaatctcggattatcagggtgtcaacatttaaagcttccgttatttgttgggatctaacgacaaaatcag

SEQ ID NO: 6324 - DNA, 914 bp, Heterodera glycines
  unsure (1)..(914): unsure at all n locations
agaaatgaaaagcgtccctttgttatcaattgagggattgccctcatcagtgacactcccgcccccttttgagctgagtttgtcccccgactgatcagtgataattgcctgatcagtgggtgactctgatcagcactcacatgtgtgccacactgttgatcagccaagtcgcgtgaagtgtgaaagtgtagcgaaacactgcggcggtgtaaaaggcgacgcttgacgattcattccacaacaaaacggggattagcttaacgaaaagcatggaaaaaagaaaagtgaggggggaataccgtgggcaacagaaaacagaagagaaggaccaaagggaggtaaaatctgaaaattgacaattattttgccgattcatttggccgactttcgttggaatgccaacaaagggtcggaagtcaaatcggacaaatccaacgtggaccctttggctttgacttgcgggtgctgcaattagcaaatgtttgccattcattcgctgctcgacccacctttttgaccaacagccagcccatgtgggagaagaagaagccccggttgatattgtgactgaatggcattgactgatcaattagtcaaccaatcaattagttaattggtcccacgggtcagcgtcggtgtccgtccatttgtggtggcatcggtggtcgcgcgaccattcgatcacatcgttttggaaggcgacacagttcagaacgaccaacagaacacgaagcgggaaacgagccttgtaagactgagaaatgagaagggagcagtcaatggaaatgttcgctttcgctcgccttgtgcgaccaaaggcggtgggcccccgccgtaatgccaacgcccccggcgaaccataggaaaatgcctanaacatcggaacaatgggcgattgattgtgaaggttttca

SEQ ID NO: 6325 - DNA, 3502 bp, Heterodera glycines
cgtccatttgtcccttagtgttcactctgtcctgacactttggtatcactcctccaaaactgtcctgcattatttattgtttgggaatattctttttcatttacactttttacctttgtaggcgattaggtgtcgagcctccggctgagcggacgacgggtcgaagaagaggcgacggaaaatcataaaatcagtgagagacaattaattaacaattaattaacgaaagggggcggggacagaccgctcgcatttggctggggaagccgagagagagcggtcaaattgagtacggaaggcggcgcggcggacggaggcctttgcctttggggagggcgaagcgaatcagaagacggcccgatcaaaagcagcataattaattaatgcaatttgttgtttttcacgcaataccttttcccgttgtggcggaagacattcataaaatgggacggatttactgaaacaatttttgttggccgcgttttccgcggcaatttgggcaaataaatgggacgaaaatgccatgtcgggaaaagcaaacaaatgaattaaaattgagaaacatttcaaaatgagtaaccattggacgaatgaatggaaaattggcgggtgagcgcggggcgttgcgggcgaagctaagtcaaaacaatgaaaaagcataaaaatggtcggcatttgctaaatgccacatgaggagagtttgagaacggcactcggcggacggccattggcgcgccggaagagcaaaaaggcggcggtggcgacacattggcctccacccgtgccgaccaaccgccaaaaatggcactcaaacggcgaaaccttggcaaaatgtttgctttgcttcgcttttgaatttgcgctcactttgccattgggctgtgcagcggcgacttttgctcattttgttgcaattgttggacactattccgacgcatttttagaggtgaattttcgcacattcccttctgattttggcaggggaaagtgccaaaaaatgaaaaatgatttaaggtgcgattcgcctcataaaatgcgcaaaaatcaaaaaatcactttgattcgcctgtctctgctgaggacggagtgtctccgcaatttgtgagggaaaagaaaagtcaacgcaaaagggcggcactgaatttattggaaaatatttcagttcaaaatgcccgattttacccaaattgctttccgttttgcctttgtccgttaattcgccttggaaaaagttttttaagcattttataaatttattttgaatatttattatttttttttactatttgtgccactaattcgtgccaatgctcgcgcggatttgaaaagcctcaaaaattccaattcgatgttctgctcattttcctccatcagcacatcgaatcgattcgttactgctttttaaaattaattaattttcgttgttttattcgttttttctcatttaatttttaaattaccgtcctccgattcggcccatttcgtcccttttttgtctctatgctggcggattcgttgcgcaattaatttgaatggcaaattcatttgctgttgcaaatgcccaaaatccgtcttaatttgtcggttaattaactctaattagtcttctgctgctgcttcgtcttttgttgtcactttgcacgattaaacttgccatttgttccgccaacgattgcccgtggaatgatttcgggcgacggctcagccggcgatcggaagcattggccattagcagcagaggacactgaaggaaaggcacagcgaatggttggccaattggccaacattggcacgggtgccgaccttaactcgcagccattcgcagttcgtttgggcgagcagtgcttgcgactgcgactgcagcgcctccaattccaagttgaacagttcggcatccctttgtggaagaaggcaatggcataaagcaaacggaaacccgttatttagtccaaaagcatcattgtattatttatttttccacttttccgccactctttcgcgcatttggcccaattttcggacaatccccgccgcaaaagcgtaaagtgcgtcgtatgagctgagtaaatcgtgcagttgcgtccttccgtccgcgtcgcgcggccgcgcgttcgcctgcttttgaagcaacgcgcaattttcatgttgcaatcgttcaatctgagagagaaaggcagaagagaattgcaacttattttatcttttgacaaatttttgcttctgctgtgttttattgcgttttgtccgcttttctttttgttacgttttgtctgtttttgctctttttgttgcttttgtccgcttttccttgcacacctcggccatgctcgcccgcagcgactggcggtcgcagcgtgaagcgttcagtgccatttgctggtgccgttgggcttcgagtcgcagcgattgcaattgtccacgaaaagagttgctcaattggtcctcaaaggcacagcatataaaagcagtgccgaaagtgtttgtttgggaatgccttcagttcgctgatcactttctccaccgatttggccattcgcacgcaattcgcccccagcgacgcgtccaatcgcttctgtgcccgcatttggtcgagctgaacaacccatcccaaattggcatttgccgtctttgtgcttcacctcccggcccaatttgtctgcgcgtgcctcggccattgacaattggcccgacttttccctcagctgtccgatcagtcgcgcgtttcgcgcccgcagcaattgcatttccaggcaaagctcctgctccagtgagctggtcctgtcctcctttctcattccaatgcttttccttctccttttacctttctttcgtctccgcttttttgccgctttccgtcccttcccttctttcgttcgtcgtccaatcgctttgaaatgggccgagaaaacagctgcgcggtcggcccttccgctgcttattggggccaatccctgcgccggccaaaacactttcattggatttgtgccaattctttaaattccatcttccctttaaactcggcatccttccgttggcattttgccattttcctccccacctttagcagattcggctccgactccattcgtccgtcacctaatttttgcctttgccccattttcagttttgtgcccattttggccatttctccagaagaatatccatcaacgaatattggagaaacagccggagaatacggtggggatggctgaaagtggatactgtagtcgcaaaataaatgcgcgacagacaaatggccgacaaatgacaaagtatcaattgtttgggtaataaaaaatcaattgaatataaataattttctaccgataaaattataatcaaaaatctattttggctgatcagtattttataatcccagggaatgtcagtcgatttgtgagttttggtattttaaattttcaaatagagttgcctacacgtacttcatcgccgaggtactgtaattgttgcgaatgacgacgatttcccctcgagacaaaca

SEQ ID NO: 6326 - DNA, 2449 bp, Heterodera glycines
cgaatgccaaaaggtccaaaatggaggagcaacgagagacactcattggcacgtcggccgaagagcgattggcatcattttgggggcggcaggccaaagttggctcaacggaagagcaggcggaggaggaggagccggcgggggaagtgccgctggtcacggaagcggacaagcacaacaacttcatttcagcagtgattattcaaatgaattaggcactaattgcccgtgttaattgtgcaatttacctgttttccctgctcccccgtcttaggcggcttttgcatctccgccctccgtgccatgccgcgtcgtggcttcagccctttgggcgcttcgtttctgccgccgccttcggcgtgccacccaaagggttcgctttgtccgccgccgtttccgtcgcccccaaaattcgaattcgaatttttgtgaagggattcttaatcgaaatgattacaattagattttgacaataaaaacttgcctcccaaaattctctgtttgtttagtgacgcgtcagaagacaaatcggccgaataagcactcactgtcaaaagacttccgattgattttttgggcatcggcggcggcgaactgagccgttccgtttgctgcgtttgggaggtcggacgtccgaacattttgcacaacggcggacgatcggaaccgctgaacaaagaactgacagcggaggaacaactggcggaagaactctaaagaagggcaaaaagtgatcagagaaagagaaaatataaaagtgatcagagaaatacaaaagtgatcagaaagaatcatttgagaaaataggcagcagaaagattaatgggccaacaattgcctgaagcgggaagcaggaaaaggcattgctgccgcggggagcatttaggagcaaaggacgcggcaatgagctgactccgcgcgcatttttcggctgcgtttggttttcctcctaaaaattgggcaaaaattacaaatgaatcagaaaaactcaaaacattaattgaaactgctaatgactgactgtttgttgcacttcgaatcggcgacggaggcgccgattttctcgtcgcaatttgccaatttcgccgattaatgtgcacagagtgtctaacaaattgcatgacgtgttattgtactaattaattagtgccaatggtccagtcaatcagtttcctcccctaattaccgagcattgtcggcgcttcgctcgtcgcttcgccgccgtcgcgcgacttttgcccttcgtcgtttgaactcgtcgccgtccctggggagttataaagtgccttcccctttccctctcttcccatttccccctttttcaccttcgccgcattccgttcgcatcccttcgatttcagtcaaaaattcgtcttctcgcgcttcataacttttttgaatatttattaaattaagtcaattccgttttaatattcatttatttccctcaaaacctcgcaatttttgtccgaagagattggcgctcctccaaatttctttcgtcattctctgccacaatttctcccaccgtcgaattatttgtcatttgtccgccggcttctcctatcgtacccattgctataataaactactgtaattattctactcaaaaaattaacagaaatatttctgttccaaaaattcaaatttaattgaaaggaaagaaaaaacgatgaaagacggacaaatggacgatggaaaaggcggggaaaacttattttgtgtaccttttagcatttggaccttctttaaatggtggacagatgacgccgaaacggccaaatgacctgctggacattcccccggggcatttgtcagcagagggagggacaagcgaagaaatgccccgggggaagggaatccgaaccgacaaaatgcgaaagggaaatccctccaaaacagcaaataattcccattggaaagatggcaaatcgaaatgacaaaaggaaaggcaatcgaatgttttcctttatcacaaacattatcaactttatcaatttgagtgtatttttaattaaattaatttaattatcaagaaaccaaaggcacaagtgctcctattaagtaatggagcgagaaaagaaatttcaaatactccgaattttaaaatgaattccttcgtggttggtcaccgaagaaaagcacatgatttttaatctaattattagatatttattcaaaaaaagttacttaatatgtgtatgtatgtaaaattaatttttgctaatttcaaatgaagcaacagataaaatttgttagccattaataactttttaatttaattgtaattgcaatttttctaaatattgcgtttttccctccatgtgtttattgatcggacttcgactgatcaaatcgtccgtccgaaagattctccgatcagtcagccgattaatgtccgaatgaatgcacagctgtcctaaacaaaacatcgcttcgcttccgttcg

SEQ ID NO: 6327 - DNA, 2910 bp, Heterodera glycines
tttaaagtagagtagagcgggaccgggaccgggccgggaattcccggtcctccgaggtcccggttcccggtcccgggttttgaaaatctcaggtcccggtcccggtagggcaaccgggaaccgggaaaaacaagcactggtaagaatgggggtctagtgaaaaattagtgaagaaaattggagttaaaggataaaatttaaaaaaaattaatatattctttgaaagtgtaaaaactgatttatttcatcaaaatttatatttcaattgtagaggaaataataaaaaaaataatttttgaaaattttttcccatttaggcttaatagattttggctttgtccaacccttgttggctaaaattactctcaaacagagggccaaccacaccagaaaataatcagttaattttatgggacctccccaataaaaagtgacttggatttggctttgattgattgccaatttccccctccccctccccctcatccctcattatcattttgtttagtcaacagtgggcctccccatatttttatcatttctgtccccatttgctccacaattattaaaacgtttagtgccacgttttgtctgccatttcatttatgcaaattcttttcccacttcaaaaaatgggtacttgtactatttacagcccataggaattttttttttaaattttcaaaagccatgaaaattgtttccaatacttttcggaatcgctgatcacgaatccagcatccaaatactcagaaacgaagttgaaaatgatcattggttcaataaaagatcattaaactatttttatactaaaaatgtgaaatttgaaaaatttaaattttctactcttagatcggatttgggtccgggtttcgaaattggtcgaaatgaatgttatattcatgatcagcaaccccgaataggtattcatggaaacacgtttttatctttaaatataaaaaaatttagatttttcggtacgtgaatataaattaagtcataggaaatttgaagaaaaaaggcatatacctcaaatccgggtccctaatattgagatgaatagagactggaaatttacaaaaaaaaaaaaacaaaaaaaaaattgaaaaagtttaaaaattaaaagacataaaaaagcaatttggtcttgtcaacttaaaaattttcaggataattaattgcattaattgatttctgaaaacctgcggaaatgacaaaggtaattttgtgcaaagaaactcggccggcgctgacggctagggggtctgtgcgcgggagtttctctcccgtccctcgggcccaattcactcaaattgccgaatttgctgctgccgtcgggtccgtgcccaagggagtgaactggggagggggtggggaggacaaacaagatggggtttgcggttgttgctgtaacggcaccaccgactttttgaagagctgtcggcgctcccggttgaggttcgggagaagagttggacttccggccgcgaactgcgtcaaccgccaggaactggctcccgtcccttttttgctgctgctctgcgggggattgtcccccgcttcgattctcggggctttggctcccctttggtcacttcgtttccgagcgaatttttcccccctttctgccctctgaccctttcaacactttccgacaaaatgtttattggtgatgatgatgataaaatggccaaaaattggtggatgattatatgcgagatgttgatggattatatggtgaaaattggaggaagggaagggcgataaggattattgagggggtcaaaaattgggaatgattcagcaaaaagaaaaaagatggtgaggagtgaaacgagtgaagagcaagaggtgaatgtgtgtaccaaattagacgataaacaatacttaagtacccaaacattttcccccttggggggggcaaagattaagatgcaaaagagcgacccgaagggtacaaaaatcggcgggagaaaaatggccaacaaagggaaaaaatgagatgaatgcaaaaacggcccaatggaaatggcgatcggagaaagtgtgaaaaaaggaatcaaaatcggaggcagatgtgaatgggcaaaaaaattggaaagaaaaggcaaatggtgaagttgaaggaaaacattatgtaaatgagcaaaagtgaaaggaaatgaaaagtttaaataaagagagaaataaagaggggggaaaaatgtcgtcgaatttaaaaaatggatcgttcaccacggcaatggcctttatccgggaatgtcccctccggaattttcactcagcgccgtcctcctcggcgcttcttccctcctttgttcgggtcccgcggttgggcgggggggggggtggcagaagatccccccggcccactcattttcctcatcctctgacagttccctcgccgtaccgtcggcgttgaacaccaatattccgcttcgtcctcctctggccctctcgtcggcaacgaaattgccgacattatacccatattaaaattcatttgttgtaatttttgcattaaataataaaaaacaaaaattaaccaatttactaaaaaaataaaaaaaattgcaaacaaaactttttaattatgagccgacaattaaaagcatttctcttcggatttggaatattttagctgttgtggtgattaaaatattataagtggtctttgttcggcatttgctctttggatgccataaaatttaactgatgagtttttggaataaccctaaaaatcaaaagatgaatgaatgtgcgattagtagggatgggaattttatgtaagaaaaatcgcgaaatatgtaaataaaatatgcataaaaaatgttaaaatatgtatggaatatgtataaaaaaccccaaatatgtactaaaatatgtaaattaaatttttaaatgttattt

SEQ ID NO: 6328 - DNA, 3796 bp, Heterodera glycines
ccaaaaaatttccccccggggggcaaagattaagatgcgaaaaggccgctccgaagggtacaaaaatcagcggggagaaaaatgccaaaacaaagggaaaaatgagatgaatgcaaaatggccaaatggaaatggcgatctgagaaagtgtgaacaaaggaatcaaaatcggaggcagatgtgaataggcagaaaaggggggaagaaaaaggcaaaatggcgaagttgaagaaaacattacgcaaataggcaaaaaatggaaataaatgaattttaatgaaaaagacaaatgaaaatttaagtaaagagaaaaataaagaggggtgaaaatgtcgacaagaaaaaggggggtcgcttaacacggtaatggtctttatccgggaatgtcccctccggacttttcgatcagcgtcgtccgaatttttcctctttattcaatatcaataaaatagttggaaatttttacaattttttatggtcctttaaatcaaatttttttacaaatattcttaattttaaagatgatcaaacgcttttttttgtaatgtttgcatttgttaatagttttttataataattttttttaatttaaattttaattttttgaaatctccttatcccccatgtgagcttagattagcaggtcacgcaaaaacatttaccaatctccaaaggaaatttggtttttccgtctttagctcagaatctcatcctctttactaatttttagtgattgtccgttcaacgaaaacttatataattctacgaattttatggttaataggcaaacaatggaaaaagtcaatccgataaaagcaaaaaacatttataaatgggaaataaatggttttttggccaaattttaatgccatggaaatgtaaatttgtctgacattcttttggtaacaaatgagggttatataccataaaaatttgctcctctttcttctcttttcattcgttcctctcataattctgccatcttcggcttccgttttgtttgctcaatttggcctaccgtactctcttgctaatgagtcatcagtgtcgccattactgtcttctgtcccttctccttcccaattgatcggactttctgtcgtagtggtcacaaatgtctcttccgcaccaacaaatgtgtccgaaactgggtcatagtgttcaacttgtttacggtcatcatttccattgtcccccgtcggtggtgccggagttgttgttgttgtgatattctggctcctatctctattcgagcctaaaaaatttattaatttattgttctgtcattttaaaaaacgaaaatttaaaaaaagacgaattagttgatactgtaattatatgctttatgcagaacacgctataaatcttctgattgatccactaatatttcaatcacagtatatctttccttaaatacagtatcactggcaaataatccatgataaaattatcctattgccattttattcatatttcaccgacatttgctattcatttgatttctttcgtgcttttcccaacctgccgacggcgccgcggtgttggcacgaccattcattgcgttgaacattcgcagcatcgcatgcaaatgttgtgcccggtcatcatcccccgccgcagttggtcgctgtgctgctccgccaaatggcatgccagcaccaatccgcgtttgaaccacgggcaaaattaaattgaaattcagtgaaaaatgtatacttggcggtggcggttggcccggaatttgaacacgccaaatgaaaaacatggtaaaaaaagcggtaaacactgtgacccaatttgcatcgcttcgagaggcatcgatgccaactacggcgattaaagacatttgcacaatcagcaaaatcatcataattatattggaatgaatatgaaatactggaggtgcgcgtctatgacgacggtcttgtgaacggtcggcgccggtgccattgagttggggctgacaaataaaggtttaatggtattttcactattcttaattatgggcaatttagttccttaattgtatgtataaataatattaaaaaataaatcaatttatatgagtatcatttgggttattcgggcgtaaattttatgataaattattaggtacatttataaatttcaaatcaaagtaattttcatgaaattaccacccaaaatcttttaatttacctgcagataattgtatttttcttggccggcattagcaattcctttcaaaattgtatttgtccaaagctccatgatgatttgtgtcaattcacttggcattaaggttactgtatcaccatcgtccgaagctaccgtatgctttttcaacgttttcgtcagtgcatctatggttgttccaggctcaatttcttggctaattcggctcaatgctttcatcgcttgcgcatatagaagcagagatgcatcattcgggtactgttttgctcgtggtaaaatctcagccattgtaccgtatactctaccggtagaaattatttccgtcgtttctgtttttttcattgcttccacaatttttggcaaatctttttcaatgaaatccgttaaatgttccgttagtttttcaattgtgtccaaattttgacctgtctttttgtcacaaaattttgccaaataaccgttggtcgggtaacttgaggatgaatttttgctagcaattttggctaattggcattccgttttcaacaactcaagtaccaattccaaagatttgcttaaacgatcaattgaaataagaagagaagttagcgatacgttaaaattcgggtgccccgcttttaaggatgcaaatatgcactatttctttagctataaatcaattaaaaaaattgaatatcaaaatttccgaattacttaattttttttcaattctttgtattaattttggcatggttttagtgccaaatttatggtgccaactttttcggcattttattatataaaaatccaaatttacttcgcattgtcaatcttttcgccattcgtcagttcctctgtatttgtatggtaaataaaatgatatttaattaatgggtatttaattattaattttctattttcaccgttactttgttgcgacaatgcttcacttatttgcttcagagcaacaaattcattggcaatttgatgatggttgttgcgtttgttttggggttccgcagacaatgcaaaacaaaagtgataatttaccaaaaatacaataaaaagtagcaacttttggttatccattttctaaaatttttctcacctttacatacttattaatttaattaatttaagctattagagatgcgcgcaaattcacgattctcaaatatttcgtgattaaataaatatgtaaaattaaaaactctcaaatattacatgtaaatgaaatgttaaatgaatggagaaatttgtattgtattggtcgcgtatatgcatatgcgtatgccttagtcattgcttaattattggtgaatatatttacatgtgtaaaaatgaaaattaaataattatgtatattttttactgcctatgaggcaaggcgagaaaaacgcatcctttacaaatatattaagagtgaaattcagagaaaaaatgatgaaatggtgccagggcacacataaaattgtatttgctacgttgcaacatatgttctgacatttaaaatattgaatttttcattgatagaacataatcattgggttaatatgaaatttattgaaataagtaataaatttctaataagtttttttaattattttttttttaatttttattttaaaacaatgattaatac

SEQ ID NO: 6329 - DNA, 1280 bp, Heterodera glycines
  unsure (1)..(1280): unsure at all n locations
taatttttttttntgttnnnnnattttgttaatgtttatttttnattttttgggtattttctcaaaataacaataaaatggaatttatgttaaaataattcaaaatgagaaactttggttttttacttaattttcttaaaaaattactaaattttagctttatttatatatatttttttaaatgagtttcataacagatttagctattttcaatttttttttagcttaaatttaacaaatttgaagaattttggaaaatttatttgaaaaaatacaaacattttcaatcaattttgatggcgccgctgcaaactcagcgacggcggcgccgggaggcacgggcgcgccaactgctcgcccagcaatatacattttctgattttttattttattttaaatttttttgttcataaatttttcataaacatttttgtcttcagagatattggcccatattttataaagcataaaataataaataattaaatgaataaaaaaatacattaatgtgtcatttaaaaaaataataattacaaaacatgaaaaaagatgaacaaaaaaagacatctccacaggcattaattaactttttaatttgtttgtatttaatatattttcgatgcatttaatcaaatttgacaaactttgtacataataatatatatatatatatttcttgtctatttaagtgaggatatttttgtactttttgccaaaaaaattatatagcacatgctggtggatgatgtgttaaaaatgcgtatagggctgaatagagagggactcaaaacactgacacctttaaaaaaagataaaaatttgctgattggaaattggccaatgctgatcagcggcagcagacagatcatccaatgatcactgatctttcccttttctctcatggatggccaacaaatggcacgaacacatggataagtgatgaagcattgttggccaaaaatggactcggacttaatttttgccaacggcgggcggctgttcttcgacttgcaaacttttcgactgttttggcactgcatcaactgcccaagcttgcaagcactggacttcgtccacccgaatgatttctttggtctccggcttactgtagccccaaaagcttacggtaccaccttcggccttctgtaaaagcagtcaattaaaacgggtttttgaaattagaataccaaactcacataacaaacaacatcaatacgagcccaattgtgtccaggatttttttggattagaattccattgaccttgagtttacaagtaaa

SEQ ID NO: 6330 - DNA, 2207 bp, Heterodera glycines
  unsure (1)..(2207): unsure at all n locations
ctctagagtccctgtaaaacttcaaaaatccaagaacggcgatcgtctgaagggttttgccaagacttaacgcattggaaaggtcataaaattaagtaaccaagtaacattttaccccatttcgtccgccaaaatgccgttgattcggttgtgttccaattgaatcaaccaattcagtccacggacttggtagtcgcgcatttccccgtttttgatgaaaggtggggaattctcgaagatgaacggactgtcgtcgcttcgaacgctctgttgcagcagttgctcgtcttcctctttttcggtcattctgtggcggtggtcccctaacgcagccgactttaccaaggccccttcacgttttgctgtcggtgccgcctttaatttctctaatttgaaatagcaaaaagaaattaacaaattaccttttcttgaaaaacttgcttttgaacttcattttcgatctcatttaggaatttgtcgaactcaggcttcgtctaaattatttattgctgaaacaatcctcaatccaagcaaaccttttcatccaactgttctttaacttcctccatttttacgtcagaatcatcaaagctcttggatgaattttgtgtctccatctttcgtatacaaaaaatttaaaattaaattaaaatacctagtagattaattaaagaaagtaattaatttgacgcacgaaaaccgagtttttttgggcgttgttaacacaccgagtcaaaaaacgagacatgtgtcaatacactatgggtcaactccactgtgcagagaaaagcctagtactatctcgtcgtttctctttttctttataatttctctttctttggcgtactatctcttcattttaattatgtaaaaaacaacatttacttcatgctgtttaacttttttttctgctttttaaattcacaccaaattttgcacatcgatagagaaaaaatttttgaatcgaatgttctataaggttttaatgaatttctatcctattttaaagttaagggatgatgaaaattttgcatttcttttcctctaattttggcgtactattttcatgtctctaacacatgaaaaaacatcaaattcgctaattctaacaattttggtttataggctacaaaatcactttgaacacttagaatcaatagaaaatgattagttttcgcattttggttgaaatcagcagtttaggacttgagttataacgtgataaaaaatttgaaactctcacaacttttttcatatgacttaaattgcttagcattcgcttagaaaaagattccccttttcaaattcttattttagataccaaatttgttcactttagttgggaatgaagcgagttatggctgatcaaaataaaaaatacaaaaaaggcattttccagtgtaattttgaattagcgcgcaataatttacgccaattacgctatttggcgttatgagcaattttgtctaacactgggcttgggcgcgccaacgattcgtcaactcgacgattcgtcaactcagcgaaaatgcgacgattcgtcaactcagccaaatgtcaacgattcgtcaactcaacgattcgtcaactcagccaaaatgcgacgattcgtcaactcagccaaatgtcaacgattcgtcaactcaacgattcgtcaactcagccaaaatgcgacgattcgtcaactcagccaaatgtcaacgattcgtcaactcaacgattcgtcaactcatccaaaaatagtttaaaaagcagtttcaagagcttttaatggcgcttagcacaattatagcattcttttaggctaatttagaaacaagaacacataaaatcacgacccttccgatgaaatattcaatcaaaaacttgcataaacaaattttattaaacaaaaattcaaagaaaaaaacgaatcaaaatgatgattatcagggattgaggttaaacaaatttcaactgatattatagggtgaatgaaggtttaaaaatttcaatcaattgcaattggttcaatcttccgcttctgcatagtcctcatgttcttgtgcccctcgtgcacgcagcccgcccacatatccctgcatctgcaaactcagcagagaaaggatgttcaagacgtcttcgtcggtgttgtactccgcttcgtccagtgcatctccgatcaattgctccttcaaaatatatntgatgcgacgcttgtgtgggaa

SEQ ID NO: 6331 - DNA, 3042 bp, Heterodera glycines
atagctagggctgggatttttatgtgctaaaaatcctgaaatatgtaataaaatatgtactaaaaaacccaaaatatgtgctaaaaaccaaaaaaaggcctaaatatgtgttaaaaaatgcaaaaatatgtgctaaaaattggaaaaaccaatggtatttttgcataaaaattccaaaaaactcattctttatcatttttgcccgcacaattgcaaataaaaaacatttggaggtgtttggggtaaaattagtccttttttgataaattgtttttaaagataatttttccatcagttgagtaccagcaagaaacttcgatatccagtaacgaattaatgaagaattcgattttcggtacacgaaataaataaagaaaattttgaaagagcctataaaaatggcaagaaagttgatttttagtggtgcatttttgaattttttatgtttttcttagatatttttttcaaaaatgccaaaatatgtgcaaaatatgtgccaaaccccgaaatatgtgcgatatgtttttatgggtcgggggcgtttgggccccagtttttgggcccccgcgtttgggcccccgtttttgggccccagggtcgtttgggccccaagcgcctcccctcgattcgtcaactcaacgattcggcaagccaacgattcgtcaactcgacgattcgtcaactcagccaaaatgcgacgattcgtcaactcagccaaatgtcaacgattcgtcaactcaacgattcgtcaactcgacgattcgtcaacccagccaaaatgtgacgattcgtcaactcagccaaatgtcaacgattcgtcaactcaacgattcgtcaactcagccaaaatgcgacgattcgtcaactcatccaaaaatagttttaaaaagcagtttcaagagcttttaatggcgcttagcacaattatagcattcttttaggctaatttagaaacaagaacacataaaatcacgacccttccgatgaaatattcaatcaaaaacttgcataaacaaattttattaaacaaaaattcaaagaaaaaaacgaatcaaaatgatgattatcagggattgaggttaaacaaatttcaactgatattatagggtgaatgaaggtttaaaaatttcaatcaattgcaattggttcaatcttccgcttctgcatagtcctcatgttcttgtgcccctcgtgcacgcagcccgcccacatatccctgcatctgcaaactcagcagagaaaggatgttcaagacgtcttcgtcggtgttgtactccgcttcgtccagtgcatctccgatcaattgctccttcaaaatatatttgatgcgacgcttgtgtgggaacacccgggcagatcttgcgatgtccatctgtttgtcgacagaatccagaatagctgctaggaagtctgacaaagacgggtgatggactaaacctcgcttaaatgtgaaaagtgatgaaaaaaatcgcaaaaaatcacactaccgaaaattggaggtgtgacgcctccatagcattgttcgtcttctccactgctgacctcgcacggtcgtggacattccagaagtgcacggggtacagtggtggacgcacaattggcagctcccagcgcggcacgacggaaactgttgttgacgactgggttgttggcgttgatggaacaggtgaagggacgccgaattggatgaaattgtttccataaatatggtccaaatttactaaaataaagaaaataagaacgaattcaaaaaacaaaaatactcaccactactaaatgaattccggcgactgtattcggcatccccagtggcattggtgctgattgaactgcgtcggctttgatcagtgcccggaacaaacgcgacggcgccggcttcttgttcgtgtgcggtcagtccaacatataccctcgcaaagtaaccgaaaaatgcagccaaaccatcgggtgcatgatttactatgatcgcaaaactggtgccactttgaatgttccatcaaccgaaattttcctcgcccgcttcaaaacgtccaacagctgaaaataaaagcgaaaaattgaacatagaaattaatgaacttaacttcgggtgtgcaaagaccaagaccacatccgattctccttggcgacgcactcggctgtcatacaacaatgtgctttcgccatccttcataagcagggcatcgggtaggacaacattcagagggttgacacggtccatgttgccgtaaatctttcttttctgcctaaaaaactggaaataagagtgaaagaggaatacaagtatcaaaagagaataaccttctcattactgccgccagtgcgaggtcagtgcccatggacacaaatgtttcatccttggtgtttgcacggacttctgccaatacttttgatggcttttgcgcgggttttccatcgttgtcgtcttaattccgttgcgttttacctccgcgtggaagcacgctgggtccggcagatggttgtgctctttcttccgagcacaccattagttccgccttctttactcaatgctgcagttgcctcacagtcccggttggaacagcggtaccaccgccctctgatgcgagtgaaacggaaccctgcaaaaaatcgaagccattgaaaaatttaaccacccgaccttgatgccaaatgcataatgatcccctctccgtttttccttgttgaaattcgattagaggtctgttttcctcatcatcttcatctgatgcggtgtattcggcttgttcaatctgctctgcgtcctcgcgttgggtaggaaaaatgttgctgtcgtcgtaatcagcagacggctctccgaaccgctttggtgtttttcgtcgatgttgttgttcaatttgtttacgaatcgatttcattgatttgctaaaattgaaaaacaaaattgaaattgatgcaatgtcaaatgcgcctacaattcgcctggtaaagcattacataaagactaaaaattaaaataaattactgcatgcgtaataaatatttatttttttataaactacttgccgaatacgagttcga

SEQ ID NO: 6332 - DNA, 533 bp, Heterodera glycines
cggtgtcatctatgttactagatcggggatcgatccccttgcgggcgctcgagcaggacctgcagaagctagcttgatggggatcagattgtcgtttcccgccttcagtttaaactatcaagagagggaggagagggttggagaaggaaaggaaaaaaaaatgaaggaggagaaagggtgggagggagtatgagtatgatggtcaatatggagaaaaagaaagagtaattaccaattttttttcaattcaaaaatgtagatgtccgccggtgtcatctatgttactagatcggggatcgatccccgggcggccgctcgagcaggacctgcagaagctagcttgatggggatcagattgtcgtttcccgccttcagtttaaactatcaagagcggcgcgtagcgggggaggtgggtggcggaagaagaaaagggtggggggagtatgagtatgatggtcaatatggagaaaacgaaagagtaattaccaattttttttcaattcaaaaatgtagatgtccgcagcgttattata

SEQ ID NO: 6333 - DNA, 1670 bp, Heterodera glycines
tgagctctcaagaaaaagtgggcgaatggaagagaatgggagaggaaggaaagagcttttaaagcaaaaatgcgtcaataaacgaccgtttaataaaatcgtgtaaaaatggcaaaaaaattagtataaaagtggttgctcttcctccgccacgtttcattattttccattcgccatttcgtcgactttttctcgctgacaatgccttcaaaaatgaatttgtacgtttttcacatttttttcacaattttacgcctttccttcacattttttagtctgttgggtgtgttgttttaacacacaaagacaaaaattattccataaaattgaccatttcaatggcttttttcctcttcaattttttataatgaaattctgagcagatttaaataattttaatcttttttgctaagctaaattaaatcagtcgaagaaaattgtcttaataatttcccctcaaaaaaatgtcagacaatcgaaaagaagcggaggaaaagatggcaaaagcaatgtaaaatttaaaattaaaatgccaattttcaatttcaattttaaattttgtttcctttttcttcagcttcatctccggcgacggttggctttgtgtgtttgatttgctctctccgcgtcaacttggccttggaattgcgctgatcagccaccgctttgacttttatgtggacgaacatttcaaaacgcgcaaaagggcattggcatttattcgaattcgacgcaaaaatggagtgaatggcaccaaggaaatggaaattggcaaatattacgattggaaaccattgccaattccgcaaattcaattgccacgcaaagtcagcggattcggactgatcagcatagcgtaaaactggcgattatggcaaattaatgcaacatttcccatttcttttcagtttcattgaccaaaatgtcatcgcttttctccgccgttttcgccaacttttcgccaaatgtccaattaatttgtccatccgcaccaacactagtgattatcgcattttgaagtccattttgaacaacatttggccaatgctcaacaaaaacattcatggcttgcgattgtccgccacatttttccaccgtttgcgacaatttgtgccgtcaattctcaacgattgtccatcacttcgagttttctccatcgattatgacaatctcttcaccgaatttccatgcgatgacagtgccatggcatcggatggacaggcggtggccaaatggcttttcactccacgtccggacgatgtgccaaagttgttcaaatgcttgttgctttgtgatcgcgggcatttggcgtcgagaatcgaagccttcaaagcggtgattttcaatgatttatttggctgtttacattcttttggattagtttaaaaacaaaaatttttttgcctaaattgagcttttaatcttttgttttttgtgcccccctcccaatcaaaaaatgtcattcattcatttgttttatcaatggtttaggcttttgcctcggcttcatctcccgtcaatttcattgtcgtcatgcttatgccttcgtccgttgtgccatttgatctgaccaacaaatttactcgggaacaattggcattgaaaagaactgactacagcagccgatgttttctgctgatccgttgtccaattgcgcgagacgaaagcaa

SEQ ID NO: 6334 - DNA, 2989 bp, Heterodera glycines
  unsure (1)..(2989): unsure at all n locations
gaagtcgtattccgaccccaaaaatgcnggaaatcganagtcggaaatcggaattccgacctcaaaaatgccggaaatcaaaagtcggaatcggaattccgacctcaaaaatgtcggaaatcggaattggcaaaaaattgaaaatttattggacttttgaaacttggagttgaaaaataaagccccaccacgaattagagcccccctctgaagtaaatcccgcccccctttgaggggggtggaaaaatagaacccccaggggttatattacaataaatacggtaaatcagtgggattgggttggaattacctaaaatctttttacaaggcatcaaaatttggtaaaaattagtataaaagtggttgctccacctccaatttcattattattcattcgccccttattatatttttctctctgttcgaccttttctccgtggcaatgtctttaaaagtgattctgtacgttttgcgcatttcttctcgacatttacccttttccttctcattttttagtctcatcgctgtgccaatgtttatgatctgttgtgccattcttttgaagtattgggaccgtttcaaaaaaccaccaaaacaacgaggccatcgtaaaattgaaaaagtgccggaaactgtcttgtcaatttgctccgacgaaatgtcatcagacaaccaaaatgaagcggaggaaaagatgcggcgacgaacatttcaaaacgcgcaaatggacattggattttgttcgaatttggcgcaaatttgaagcggatggcacacaggaaatgaaaattgtcaattgcctttggaaatcgatgcaaattccgcaaaatccgttgccaaagaaagtcgtcggatttgaagccatcacaataaggtgaagcgaatgattttttggtgtttcctctgtgtaaaacgattccttcctcttttttacagatacatcaatgacaatgtgatcacttttcttcactgttttcgtccaatttttgccgcttttccaatcaatttttccatcgtcgatacctttgtgtcgcaaaattgaaagagtgccggaaactgtcttaacaagtgaaagagtgccggaaatgtcttatgcctcgacgaaatgtcatcagacaaccaaaatgaagcggaggaaaagatggcaaacgcgatgtaaaattaaaaatgccaatttaattttcatttttaaattttgttttcccattttttcagctttatctccgccgattgttggctttgtgtcttcgatttgcttgagccgtcacaacttggccacggaattgcgatgatcagccaccgttttgacttttacgtcgacgaacacttcaaaactcccaaagaaagtcgtcggattcgaagccatcacaataaggtgaagcgaatgattttttggtgtttcctctgtgtaaaacgattccttcctcttttttacagatacatcaatgacaatgtgatcacttttcttcactgttttcgtccaatttttgccgcttttccaatcaatttttccatcgtcgatacctttgtgatcattaacagcactttggattccgttttgcgcaacatttggccaatgattgcgacaaacatttgtgccatccaattgtccgccgaagttttccgccgtttgcgacttctcgtgccgtcaattctcgacgactgtccatcgcttcgcgttttcaatgcgtataatgatggtttcttcgtcgaatttccatgcgatgacagtgccgcggcatcggatggacaaacggtagccaaatggcttttcactccccgtccggacaatgtgccgaaggtgttcaaatgctggttgcaatgggatgatgggcatttggcgtcgagcattgaagacttcaaaagggtgattattgtttgactgatttggcacttttacgggctttgagggtcgctgacaaaaatattttggatggcattaaatttgaatttttcagtttttaattgttttcctcattttaggaatttaccaatgcatttctcaactggcttctcattccacttccggacaattatttactatatgtctttaggataaatttgttgagaagtgatcgatcgatttaataattatgaaatttgaaatcgatgcgctcataaaaattgtttatttattgttggaatgatcaacatggttcttttttaccccattagagctcggaacgggccagttgcgtctgagcaagtttagagcatcataacttttttctttgttgaccaaatccaacaaagttggtatcattcgaaagctcttaacaagctctatcggcttcctaaaaatcacaaagatatgccgacatgtaaaaaagttataaattaaaatatgcaaaaattctgactttttggtagtattcatgttgcaacttttttataagttgttcaatcgcttataaatgccttgtcaaaagcttctaaacatgtagagctttggaatgatgccaaatttataaaatttgaccaacaaagaaaaaagttataatgttttatgcagggttcccagatctgaggatttacatattttttcaacgagtatgaaccaattgcacaattttaccgccaaaaagctttatgaaaaattggcattggctgatgatcagtttgatgagtggcttgtggaattaggcctattacatggtagacgtacatgtcctcaatgtggaaatgaaatgggacgccgccaacctcgcccaaatcagcattatggaaaatggaggtgcaaaaacgcacagtgcaatcgtccggaaatgggctgccttgttggcacttttttcgccggctctcaccttgctattaagcaggtgttctgggcgcaggaattgggtactcaggatcaaatgatgcgcgaaatcgatatcggaggttttgtaaattggtttattcaccgaattccctgccgatgacagtgctacggcaacggatggacaagcgatggccaaatggcttttcactccccgtccggacaatgtgc

SEQ ID NO: 6335 - DNA, 513 bp, Heterodera glycines
cccaaaattagacgattggcctactaataaaattagacaatttacttaatcctaatgaatttattaaactcattgaaaccgtaaattttgattcgcaccttttggcgtacaacggcaacccaaaaacaatcgctttttatttttcaaaatcggtttttttttttttgcaaaaacacaagttgatcagtccaataacagtaaaaagaacaatttttatgagcatgtcaataattccataattctaaattgatcgatcacttttcaacaaaatcattcacttcttctgatcacttgggccgggagttgcgtcaagaagcctaaaaataaaaatacttaataaatttgaatttagaaaaagcattcgcttacccatctccgatttggtcctcattattaatttgaatgccaattttgttccactgatcataaatttcccatccaagcgctttcttttcccattttgcccatttgctttcatctcgcgcaattggacaacggatcagaagaaaacag

SEQ ID NO: 6336 - DNA, 3428 bp, Heterodera glycines
ggcttcatctcttgccaatttcatcatttacgtttggtttccttcgtcttttgctgactccgttgtgccatttgatctgaccaacgaattgactcgggaacaattgacgctgaaaaggattaacaatagcaaccgttttctgctgatccgttgtccaattgagcgagacgaaagcaaatggacaaaatgggaaaaggaagcgattgattggcgaatttataatcagtgtaaccttcacattggaatttataatgatgataacatcggcaaaaggttaagcgaatgctttttcaaaaatccgattttatttggttttatttttaggcttctcaacgcaactcttggcccaagtgatcagcagcagaagtgaatgtttgttaagaagtgatcgatcaatatgaattgcgttgttggataattatttttgttgcggtgatcaccaattgtattatatatatgtgtgtatatatgcctctaggataaattagagatttcctgaaatcccaggctcattcttttgatctaatgataaagtcggtagtcactgttccttcaataactgggtcgttttaagtaccatttattaaacgatgttcacccgtttcgttttattgtgcccccccccctcgattttttagcaaagtcagacaaattaggacagttggctggatcagagaaatgtggacgattggcctactaataaaaattgagacaattgatcaactcataaaaattggacgattagcgtactcagtaaaaagcccatcgtacggtagcggaaaaatcgcaaaagatgcaaatggaatgaagatttctttcatttccattgctttcccagtcgtccgtcgttcacactttccatgaaatgcggccaaatccgtcctgtgcccttccccttggccattccttccacgtcaacccttcgttttcccatccaaaacattttcccttttagccaaacggccatttctttttttacacaaaagtatttatgcaacagtttaagcaaaagcaaatggaaaaggggagaataatatgttttgatagattttatctgcacacatatttcgcgacatccttaacattgaaaaaagcgcaaaaattgcctcgactttgactacaaaagggatgtgtacagtatgccaaagaaaaaggtgctgggtcgaacctaaaaaagtatcagttataataaaaataattaatttaaatgttataaagtgactaaatcctataaaattctaatttttttgtgcatgtttcataaatattttggcatttttaatacatatttatttacatattttgcaatttttcttacatatacctaaattcattccctagtaataaactttttagcgtttttttgcagccattttagcattatgtttacgcaacatttcttctcgtatttcaattcaaacatcgatatcaatttttatgagtaagtattagctagctagaaacttaaaaaatgaatgaatatatgtaaaaaaataataaacaagtgtaaattattttaaatattatcatcaacgaattttgcttcaaaaaattacatttattcttttcttaaattgcaaaatcattatttatttatgtgacataaaatgagtatgtaattgaaattgcttattacataatataattttataagatttagtcactttataacatttaaattaattatttttattataactgatacttttttaggttcgtctcagcacgaagaaaaacattgagtgagtcattgactaagggggacagatttaagtagagtagagcgggactggggcctggtactgaaaaaacgggacaactgagtacctaagccccggttttgaccgtgaccttggaccagtcccggttcctggttttcccagccaaaaatttccaattttgaacccgaaaaggtcccggtcgcggttttgcccaaaattcccttcccgctctactctatatttagaattggacgaaagcattccaacgggacggattctctttttggggagtttgaattggaaaataaaacaggacgatgtgacttaattaattcgtttgaattggcacggtgccaaaaataataccaaaaaaaaaactcctgctgtgatcgagatattaaaatttttggtagggaatctttgtggactaataaaggacactttgggctatcaaataataccaaaaatctgcaaaagcgccgaaatttttatgatcataggtcaaaatagcatcaaattcatttggcaattacataattcaattagatcgtatcacttcaaaacaatacaattgaatcaccgcaacaaaaaaagaacaattttctgaacatcaaattctttatccaacgccgcaattcaaattgatcgatcccttctcaacaaatcattttcattcattcattcactctgctgctgatcacttgggccgggagttgcgttgagaagcctaaaacaaaaaatacataataaaattgggtttttgaaaaagcattcgccttacccatctccgatgtcatccttattaatttcaatgtcaattctgttccatagataagaaattctccagccaatcgcttccttctcccattttgtccatttgctttcgtctcgcgaaattggacaacggacgaacagaaaacgatggctattgtcaatcactttcaatgccaattgttcgcgagttaattcgttggtcagcgcaaatggcacaacggaatcagcaaaaggcaacggacacgaaatgatggcaatgaaattggcaggagatgaagcattggtaaatgcctaaaatgtggaaaaattggttaagtagtaaatgacaaccacagaatgagtactaaataaataataagcaccgctttgaagtgttcaatgctcgacgccaaattcccgtcatcccatcgcaaccaacagttgaacattttcggcacattgttttgaagcggagtgaaaagccatttggccaatgcttgtccatcggatgccgcggcactgtcatcggcagggaattcggcgaagagattatcaaaaattagcgacacaaagcgaagcgatggacagtcgttgagaattgacggggcgatttgtcgcaaacgggggaaaattccaacggacaattccaagacaagaatgttttttccgagcaatggccaaatgttgtgcaaaatgaacttcgaaatgcgatcattggtcgtttcgatggccaaattaattggacagacggcgaaaagttggcgaaaacggtggagaaaggcgatgacattttggtcgatgaaactgaaaaaatggatgggaactgttggcaaaaaattttgacattggccaattttacttgatgttgatcccgtcgaatccgatgacctttgagtggcatttgaatttgaggaattggtattggtattccataacaattgacaatatccattt

SEQ ID NO: 6337 - DNA, 2496 bp, Heterodera glycines
  unsure (1)..(2496): unsure at all n locations
ttcaattaatttcactaaaaatattataaaaaaattacctactagatttaaatattaaactattctaattatttcaaatgctaattgagggaagattttaaaataaatattaattataattataattttattttttttgaattttgtaaaattaataaagtgatcttaaacaaatttaagcaggatgatgacgtgtgtactaattttatttgttttaacccttttaatactttatttttctttaattcatatctattaaatattatttattttatttgttaattttatttcaattcaattaagaaaaaaattttagtttttaattgtcatcattttgtaaaaaacttttcagcaaggaaaacaacttttttaataatataacatgtaaaaattgaattaaaaattttaattacagatattatctactttaaataaaattaaacgttaaataattaatctttatgataaataataatgtcgatttttaatgtatttgtaattaattttattgaattaaaatataataacaaattaatattctctccttctcgatcgtgaatgcacattcgttgttccgtctttagtccgagttttttttcttcttttttttatattgttattaattttttttttaatgttttcgttctttttcaattagcttccatttacgtcaattctcgtttttcatttatatgctattttataaaatcaatttcaattcaattcaattaatagtttaaatatttaacttgagttttaagcaataaaaaaagagttttcttaataataaaatttcgagaatcatagctctttttatcgccccttattagtcatctaattttgtttaagtaaaataaaagtataatttagaataccaatatgggtattttagcaaaattagattgatttatttagaataattcctattcttttaaaattttatttgaattattttttatgaaaagttatgacgatttttctcgaaaaatctgtagaattagcagtttttacgaaaagttagttatttccttgtttaatttcctttaatgtattcttttaatgcccccgttttcatattctacagtaaataatttaaataaatacttttatcaatttttattattaccaaatgtatttaaaagatcttttttaattcatatttttttttgttttacaaaattaaatgtaattaaaattaattacgctcaaatacacccatttaatctaaaattataaataatatttaatagaacgtggatattatttattttttgctactttgtatttcttgtagttgtacaattgttttttattttttgataagaatataaattgttaacaaaatatcaaaaagaaatttacaaagaaatattaaaagtattttattcaattatataaaaatgataaaactttccattgcttaaaagatttttaataatttgctattatattaatggaattttttatttgtaatttcttgtcattcttctttggtccattcatttatcatcatgaaaaacgttgagaataagtaatggaaaatgtaagaacatttaatctgttttgatgtagttgaaaataaatatcatttatataaaagtttttaaaattgttgtattaaatcaaaatagaaaaatattataagttgtgatgtgaaaattcttaaatcagaacaaggaataataaaatggggtaggtcaaacggatttttgcgtaagagtttcaacattaaataacggaattttttttgcgttaaaaagattttttgcgcacttttttataccgaatttaatcccgcgggatcctgaaaaaattccgcgggatcccgtccggtcggtgctatgacattagtcaaaaaccatcataatgggcgttagtcaaaaaccatcaaatgaaaatattttttgataactttgttcaaaagcatctaaatttttaatatcattaaatagcactaagtgctttctattagcctacaaaattccaaatagtttcgttaagtttcaagaaagtatgactaaaaatgttcaaaaaaacttggttttttgaggttctcaagtcataactttttttaaacttaaagaatttttttaaattttgcaggataatagaaaacacttagggctttgaaaaaaatcaatattataaaatttgatcccttttagacgaaattatgaataattttctgtctaaaatgattcatttaatggtttttgactaacgtcccagcacctatgattcttcatagttttttttaattaacacatttttatcattttttaaagaaaatccatacaaattgagcttaataatccctaaaaccaacttttttttgttgaaaatctgttaacaaattacacccaaatttcaaaatttcccccggcggcgcctatcggcaccgccggacccccttctttccctaaaaattttttgaaaagcacgccgaaaaaaagtaaggtgaaaagcaaantattatttataataatattcaatcat

SEQ ID NO: 6338 - DNA, 2344 bp, Heterodera glycines
  unsure (1)..(2344): unsure at all n locations
tcaaaatagaaaaatattattagttgtgatgtgaaaatcttaantcagacaagggaataataaaatggggtaggtcaaacggattttgnncgtaagagtttcaacattaaataacnggaatttttttgcgttaaaaagattttttgcgcacttttttataccgaatttaatcccgcgggatcctgaaaaaattccgcggggatcccgtccggtcggtgctatgacattagtcaaaaaccatcaataatgggcgttagtcaaaaaaccatcaaatgaaaatattttttgatataactttgttcaagagcatctaaatttttaattcttgatagcattaaatagcactcagtgttttctattagcctacaaaattccaaatagtttcgttaagtttcaagaaagtatgactaaaaatgttcaaaaaaacttggttttttgagcttctcaagtcataactttttttaaacttaaagaattttttttaattttgcaggataatagaaaacacttagggctttgaaaaaaatcaatattataaaatttgatcccttttagacgaaattatgaataattttccgtcaaaaatgattcatttaatggtttttgactaacgtcccagcacctatgattatttttatcattttttaaagaaaatccatacgaattgagcttaataatcccaaaaaccaactttttttttgttgaaaatctgttaacaaattacacccaaatttcaaaatttcccccggcggcgcctatcggcaccgccggacccccttctttcccaaaaattttttgaaaagcacgccgaaaaaatgtgatgtgaaaagcaaatattatttataataatattcaatcatttagtccaaaaaatgattaattgtttgaaataattaaagaaatttgtttgaaaattttaattaatttaatttagctttaacttgtggattttattaaataaaaaaacaaaattaaaatttaattttgtattattttcagttgaaaaaaattaaaatttgaatttttttgaattttaaaaattcccggttggtcccggttccggtcccgaaaaaaaatcgaggtcccggtcccggcttatcaggttccggcaagtcccggtttttgcaaaaattcccggtcccatggcactctagttaaaaatattaaatttgataaattttatcgattaataataattaaattacttttttaatttttctttcttatatccctaaaacttattttcaaaataattgaattgataataaatatttattggttttcaatataatattttcattcttgtgcagaactcctaagttgaatattagtgttttgtttatttatagaatttttattatattttggtataagaatatatatataattttataaaaatgaaattttaatgaatttttgcaaattttttttatgcaatggtattaataaatttattgataaaaatatattattatttttttttataaaaatgagtttaatagtctgacttacactttaacaaattattaaatattggtaattttattctttttataaattataaattataatataaatccattcttacattgtcgatctggcctttgttttattcatttttatatgttttcattaattatgataatcttttcttactttcttaatttcagaaaatcattaaaacttcgggtcaaattattgtataaataaaataaagtgaaagtctctcgtgcttgcagacttattttgtttaatattataacgggctttgattttggtaaatgcttaataaaataaataataaatttttaattttaatttgtattaaattttttatttaaaagaataaattaagatatatatattctttcgccgtcttgaacttcaaaaatataataattcaaaaaaaaattattatgtttttttcttggttgatgatcagcaaccccaaaaagcgtttcaggaatagttgaaattgaaatgcaaatattatttttttgataaagtttggcgaagtaactgacaataacttgaaataattaagcaattttctgcataatattataattatttaatagaagcaattattattttttaataaaattcttttgacgcacgaagtgcattagaattaacataataattaaaaaatttaaaaattattttgcagggctgccattttattaaagttaaaatttttgatttttaaaatttcaaattttaatttatttcagtgaaaataatacaaaatttaataaataatgaaaattttcaaccaaatttctttaattattttcaaacaattaatcatttttggactaaatgattttaattattccataat

SEQ ID NO: 6339 - DNA, 2086 bp, Heterodera glycines
aaaaaatttaaaaatttttttccagggctgcccttttttttaaagtaaaaattttgtttttaaaaaattttcaaatttttatttttttcaaaggaaaaataatacaaaaatttaataaattaaagaaaattttcaaaccaaatttctttaattttttcaaccattaatcattttttgggactaaagaattttaatattcgataaattaagggattcgattttcttcttgtttcaaatatttttacattaattgatttatttattatataaaaaacaaaatgtttttattggtttccgaaaacaataaaataataaaataaatatttcagatcttttccctacctattaagtaaaaaatatagtagtttaatgataaaacataattcaaaaaataatttttatagaatttaactccataattattttagtcttttgaaattacttttaaaatcaatttcaattgaattaaaaatgaatgtttttgaattaataattttttaaaaatataaaatataacgaaaactaatcgaatattaatttaatttttattcctttaaacatagaatgtaccgtaataaaattaaaatcaaaaataaatcaatttacttacttcactctggagttttcttacattcgaggctgatctttgttaaaaaatattttattaatttttcttataaaacatagattttttcttaaatttttttaaattataataaaaacagcagagtgacgaagccagtcatttcttaagctattagaattaagtttacattttctttatttttcgtttataatttcaaaacattttttgaataataaatttattttgactaaaattgaaaattagcgttttgttaaaattttaatacttaattttctttaaattttattcgtaataatgctaatgctaaactgagatggccaaaaaaccgttggctctgacgttgcgaccgattgccccccgccgtccccgcgagtgcggcggttggcttttaatggacggacgaaccccagcgcagcttcattaatattcagcagtgccccccccccccccaatttcacaacacttgcgggtgctttttccaaaaaatttttttgggaattggaaggggagaaattgttaataggtttttctaaaattgatcattttaacgtattggagtatctttttgaatcaaattttaagaaaaaacttgggaatttttgtgcaatttattaacaaattttcaccaataatgtaataagttaataaaaattttgtataaaaggtcaaataaaaattaattctttcaatgctctttttcaaagcatcttaaatttaaggatactttaatttttcaagtcagaggccccaatttccaggacgtccttgccattcaaggacgaatgcgaaccttgccatttagagtcaaaaaaagttatttgacttaaattcccttttaaaactataatttgatttcattctataattcctttgttcgatcagtatagatttggttggagcctggttaatgggaattatgtaaaattcctaaattaggcactaaatggggtaaaaggcccaaaaaagttcgaatgtgtataaaaataggtatctactatggatgttgcaaaaataaaaagcgaaaatacgaaatatttttctaaaatttattcataaaatttggttgcgaccccgatttgctttgttttattaagatttggcaaaatggttaaaaaattaaaattatttgcaatattaatgtttatttaaactcaatctttattgatgtacttttatttcgcttttcagccaaaaagcgaaaggcgaaaagcgaacgcaaaaggcctaaaaatgcaaaaatacaaaaggctaaaagcgaaacttgcaagatccctggtatctattataatttatcaacaattccttgaaaacccaattaattttacaagcttttaaacccaaacaatagaaccgaatatgcttcgaggcacgcgagaattccttaacccgagattggagacactcacgcaccttgatattcccagttttttacacaaataagtttgaaaccagcttttcggattcctgctttttcttgaa

SEQ ID NO: 6340 - DNA, 875 bp, Heterodera glycines
actggaagtcgtcaaccatcaccaccgaccacttccaccaccaccaccagcagcacaaccagcggaagggccacgtcggtccatcagacggcggccacggcggccaatccatcgacaaacgccacgggcagaagcagtaccagcaatagcagcagcggctgcggcggcagcaaattccatttgcccgaattgaaagttggccgagcgcaacagcagcaaagcgcggccggcgcatcggccggcggcgatggtaagggaaaaaagtgggagagagggaggaggacgaggagatgaacacatggccaaatttggttgggcatttgggacacgcacggcatgcccgggcgacaaatgccatcgatgaatatctctaattggaggaattatcttttctattctttaagtctaccccaacaaattttacgttttctttttggcgctttgtgacacaaaattcgccaaaaatgaaaaaaaaaacatttgaaaattagacacgcattatttcatttttttgttgatgccctaaatttgccaaaaaagtgtctgcccctaaaagatcaatcaataattttttctctgtcttccctgttgccggtttttgcgtgtctgtcccaattcaatcaatatttctgtcatttatttctctctctgttcagattgaggatgccatagcgtcggcgatcaatggcggtggaagtgcgaaggtgggcgaaggtggcggacattgcgctgctacgcaacgggcgactgagcggcgcgtcgtcgccgcgggcgccaacgacgactttgtgcggcgactggtggacgtggtccgacgcgagccggcactgtacgacccgagccacgagcactacgggaacagacacgccagcgca

SEQ ID NO: 6341 - DNA, 3938 bp, Heterodera glycines
tctagagtcacttttttttattgtcaaccaaatccaacaattttaatcattcgaaagcttatcttgtttgaaagctttttctaagctatcttcttggcaattagacaattaccaaaaaatgacaacatgaaaattgcgaaaaaatcgaacttttttttaaattttttcttaataaaattttttacaggatagaagaaaatctttttgctttttgtaaagctaatagggcaaaaaaattatttaatttggttgaaaattcgaaaagtttaatccaaaactcgggctggcgccgaaacgaccctttccccacggcactgctcattccatggccacacatactcatgtctatgctgtccttcattttagattatcacttggcaaacgtggtgctgccatgacggcgaagccggtgacaaaaaggcagcacaacggcggcggcgaatgcaccgccaatgggtcgtcgccgagcagttcggcgggcagcgaaatcagcgtcggctcggctgccgctgcgaccgtcgcatttggtggcacggcagcggcggggggaggaggacagcagcaacagcacccggtactaattaagtcacaattatattattgtacgagactggtacggagccatgggctgtggataatttgggaaattttggagtgcacctccgttcgatttgtcccacttcgaaatttttaacaaaaactcgaaagaaaacacaatggtcgagagtctcggctttcttgaaattgaatgaataaatcctttttttaatgttttcattttttcgctgcaatttcaaattcatcattaattgccttaaagccgaactctaattgctgatttaaattattgtatcgaaacgagggacgaccaattttccaaaaaagaaatcataaaacaattatttgtctctgtccatcgccgacctcaaacatttggcatttttctctattcccgttatttcacacagaatgccattttgttgccccaactgcggcatttgccgaccaacgtcaatggcatcaccaccaacggcaacaactctttcggctccttcaacggcaccgcgtcatctgccggcgttggccgactgttgcgcgctcggcacggcattggcagcaacagtaaccatgaccaactacaacaaattggaggaggacaacatcagctgcagcaccaattttgtggtggtcgactgtccctccaccaccaacagccgctgctgtacaagttgaaggaggaggaactgctggcagtgaccagcggtggtggcaccaacaacaacacggcacagactggaagtcgtcaacgcatcaccaccgaccacttccaccaccaccaccagcagcacaaccagcggaagggccacgtcggtccatcagatggcggccaatccatcgacaaacgccacgggcagaagcagtacaagcaacagcagctgcggcagcagcaaattccatttgcccgagttgaaagttggccgcccgcaacagcagcaaagcgcggccggcgcatcgggcagcggcgatggaaaggtaaaatgggagagggatgaggggggcgagcggatgcatggccatatatttttatttgttggatattgggacacgcacggggacaaattcccttcaacccaactgaatgaatcttcaaaaagaaaattcatatggcaaagaaaacaaacaaatagtcacgcaataatttatttggcctattttcatcaaacaaaagcaaaatttaatattttgttggttccattattttcgctcgattcagctcagcaattctggcaatttgaacactcatttcctccgatatgcttagtgatgaccgttgtgtccgcccgcactctccataagcacgaatccggcgaaaccccttttaaggcacctgaaacaatgaaatcaaaaaacatataatttggtaaggttattacaactgacattttgtaccgacactgcgtaacgatacaacgataatacttgctttgttcgaggttgcggtaccacacacaattattaatggcaaccaacggataaccgttggagcgctccccgacatgttccaagagatcccaaacgatcggtggccttaataagtgctgacttgtcttagctccacaaaaaccaacatttagtcatagacggtgctccccatcttttcaaggaaaattttgtttttttattcgatttatttcaccctggggttttaatggtcacagaatcaaatggtaatagtaaattttgccctgccccctttttggtaattttttctttctgttctagtcttgaaaacacgtttggattaccaaaacgtaacaaaacgaagaaataagacaaataataaccaacatttgtatttgaagtccgtcccagaaatttgcgcagacgacaaaaaggaatttgaaatccggcccaaagtacgaagacgacaaaaaggaatttgaaatgcacaagttgatgatttgactaaacgaaactgatttaggtcccattttgatgtgacctcacgcatggataagtataacgatataacggcatatacacgattaagaaaataataggatatatactctcatcctatgtatttaaagattcaacaacttgcagatgacggggccccgacatttacggcccgaagggacattaattgctatttacttttttcaaaaatgcatttgtctggggccgcaagtgccgggacaaacagatgacatcaaaaaaaaaaaattttttttttcttgttcaaggttgagcagctttggttctcaaatcggctcgacaagcatttcaaacagtgcgttgtacgtggccagactgagcgaacgacaattgagcaacagattttcggtgagcaaatggaacaaattcttctgattgattgcctcatttttgcgcctaaaaaagtgcacattttaaaaggaaaaattgtggaaatgaatattaattacttttgggtcgaacgacacaaaaaataactgagcattttcagcgtcggaatcctgatcaactcattgccggagctgatcattttgaaaatcacacaaagcgccttcttacgatcaaaagctggcacctgaaaaggggggaaagggcaattcgcgttccgttttaggcattaacaatggtactaaaaaaccagtcggatgtgccatatcaccataatcaaatttcaaccccctacaaatggcttaattgccattcaaattgcctcacctcctgcacagtgttcacaaagttcaacatgcattggaactcttcgtcccggctcacttccttctcgctgatatccgccgggacggtgttgaacatcagtcggttgacaatttgcaaaatgcatccgcgaatgtgcacaacggtcagccgatccattggttccattgccatttgtgccgaatttggcgccgttgtcggcctcaccacccaatagaactgcttgagcgtgtgcatcagtgtgagcacagtgtgcgtacgacggacaatggacgaagcgggtgaaagtagcgaattgttgggggagacgcagaacaaatcgtcggccaaaaagtcgtacagacgcattttgacctgaaaattgagaagtttttgatttggaaatttaaatggccaataaaaagaataatttggatgcgatttttcaagcatttttttgagttttagtcaaattttaccgtcgcatcggcccggacccaaagggttggggtcagaaagacactgtcgatgagctgtttgagcaacgggacgccaatagaacaattgagcaacgatttgtacacggaaatgaagccctttgaaaaaataattccgtgaataaataccgaaaccacgaaaaaatgcgaccaatttcatgtcaaaacaaaacatctacaaaaaaaaaacctccaacaaattcatggtcaaatgtcgactgtccgcattcgctattgtactggccacaattg

SEQ ID NO: 6342 - DNA, 3643 bp, Heterodera glycines
  unsure (1)..(3643): unsure at all n locations
caaaaaataatatatttttaatggatcaattaaaaaccctaccaaatgtcattgtccacgggttcgtgctgtttggcatcaatttgagagaagagcggcaccaacacttggatgccgccgatggaatgcaacgagcagtggacggaatgcgttttgaccaatttgactccctgaaaagatatttgatgagtcattggcattccgatcgttggacactcgacatttttcatgacggcatgtggcacttggacaaaataggaggcggcggaactgtgcagttggccccctttgggcgtttgttgttggaacagacaaagttggtcatggcaattcttgggacagtaagcgaaaacgagagagtcgtgaagacgcccatcgaacaattgctgaaaaaatgtgaaaagggtggaccaatgggaacagaaaaaatgattcaaaatagaactaaaacagtaaatccagtttatttggaacaaatcggaacaaaaattgttaattttatgaaaattaaaaattatttattaattaatcaatttttcatactgattagctttaccttccgatatgtgtccggcaaattcgactcggcctcgtgtttgaactgactctgataggaaactcccaaataaagcaacgcagtgaccaacggaggactgatcgcttgtgaagccggcgggggtagcggtggctcaagaatgtcccggtaacggctgaccatcaaaacggacagaaagtaaacgacggccaacgcgaggaattgggcctgtttagtctcctccttgaaaatggaattattgaaatatttatttgttttttccctggattaccatgtccctgtaaatgacacctttcagcctttgcaagtcaacattttgtaacagtcggtcaaagtcggagattggcttcgacgactcgcactaaatgagcaaaagttttaaacccataatctctttaaacggggacgggacaaaacgacgccattaaagaaattttcaaactatcttggaaagtttttttgatttcaagaataattttaagaaaaaacgctagaaaaatttttcattttttcttgaagaatctctacataaaattttaattttttttaagatttcggctagaagttttgccttggcgagattacgggtggtgagattttggggtgcaaccccctaaacttacaaattttcgaattgcaacaaattttggcgaattgtcggtgttgtacagtccatctttgtgcattgaacacgccaaaatgttacgaacggttacagtggaaactgcgtgaaagaaattggagtaaaaaacattaaaaaatcagtaccaagtctcagcgattggcgcaaaatgccacccgatggcatgtttttctcctgctccaactgaaaatggaaaggttttttttgattttgccagtgattaaaagaaaatcaaaatgaatgaaatttggccgcacttcgtttagactgacgcccgaggcgaacacaaaaacatcggaaagttcggcaaaagtggcaataaaacgggcggcgtcctcaatgtccaactcttgctgggtggtgtcgttgatttccaattcgctctgaaacaaacattgctatcagagaaaagagacaccaattgtaattgtaaatattagttaaaaatgaatttcaactttacattcggtgccgttgcggcggccaacagtggaagcagtccaccgcatgccattgtcagactgtcgccgagttggctgagcagatggatggtgttggcgatgaacacctggttgtccgcgttgttcagatggtccgcaatcggtgtgcccgaacttaaagccgattagatttaggcaattataaaatgccactgctttcgaatttgccataattatcccccccctgattaattggaaatcccagtttcggactaatgaatgtattatagaacacaaactcgttccattcctgcaccacactctcaatggactcgagcaggtcggacagcagacggatgtgcaccggtgaccaagtggtcgggcgtccgatacagtgccatcggttgctcaccagcagactcccccgcctggtgctcaaactcagtccgttcggccaacctcttctccttttgcaggactttgcgccgatatttctcccatgagacctaaaattgtcgaattcactttttttgtttaaaaaacaggggaaacggagtgggtcaccatgaaaaaaaggggagggtcaccgaaatttttgcggatatatccagccatgtaaatcaatgacttttttttttaaacttcttttgggtaacagggggcggtccttctgccggccaataggcgcatgaggaaaattttttgaatttgtttcaaattgagaaaaagcagaacaccaccaacctttgagtgcgcaattgccatgctgtcaacctgcaaatcatcatttatttcccgtaaaacaaattttaattcgaaaatgtcttacccaaacgcgccatccgccgtattcgagtcgcatggcatggaacagcagaacggcgaacaactcgtagaccaactcggtgacctgtttctgttggtcgtccgttggggaatgtaagcgagtgaaatgaaccattcctaaaatggcacattttgaaaaaaaaaattgacctaaagcctgagtgtgaattagcatgcccttaggtttacataacaatcctaaacttttgttaaaaaagattactgaataccggaccaaaaaaacaggtttctcttagttattaggacggcaaaataccatggacacacaaaatgtcacgggacgcgtaacagtttttggtagtgttaagtgtgataggacatgtaaaaccaactacctagaacccaatggactttggcgcttatgtggtttacctcgcaaattttttttttgtttgtcttaaaaaaactcagggattctgatgaccgctgaacacgaatccgacttttatttcatcctttcgaactccgaactaatttttggtcccaagttaccgagttatacccatgcgaacattgatttggataattttgtccttttgattttgaatttgcgttttcagattaaatcaggacatatgtatgaacctagacgaatttgggttcggggttcgaaatagggtgaaatggacgccggatttgtattcagcgaccatcaaaacccctgaaagatttttttaaagacaaacaaacaaacaaattttatgggcgataaaccacataagtaccagaagaagtttatttggtttatttacatattgtctttagcttagaactaatttatggactaagaaagttaggaaacaagaaacgtatttatgattactagaatcgtttagatttaaaaacaaaaacaacaaaacaatttgtttgcatgtgtgccctcattgaatgagcttttttgacgatttcgacatcatttattttttggcattttgttttagcattttttaaatttctgattcgtcgtctcaccggacaatttttgtgtggctttgttcttacaatcatgtacaatgaatagacactgccaaatgagtgtaggggggaagtcaaaaaggtattcaaaaaagttgatattttttgtcattttacaagaaagttgttaatattcacantagtacatttgcgccttaaaca

SEQ ID NO: 6343 - DNA, 2927 bp, Heterodera glycines
agcatatactgcaaaaagaagaaaatttaaaaaaaaaagttcggaaaacaaagtttttgagtcccttcaggccattattttttttaaacctaatgcacgggtgtgatctgttcttattactaagatatgttctgatttcttaaacacactcataattttgaagttttatggcataatgtcaatattagtcaagaaattttcaagtttacgcaaaatttggtcatttttgggcaaaaaatcttaaaaaattattcatttaaaaatgcactgcaaaaaatgttaaaaatcaaaaaaataaaaaaaaatctgaaaaaaggttaaaaaccattttgatcacgattacactgaaattattttctgttaatttcctccacaacattgttataaatgatggaggtgaaaaatataatattttgatacttttttgattaaataaattgtaaaaaacagctgattaaagcaatttgcaaaatgttcttatttttggctttatgttcttatttttggctttatgttcttatttttggctttatgttcttatttttggctttatgttcttattttgaaatattaatggcaaaataataataaacatacagagaatattgaacaacaccaagaatgcttaatttgtattgataacggatgagaaaatttgtttttatggaaaaaactttttggaaaagtatggtaatttttaataaaaacaattggtaatttttttgcgcgatccgccacaactttttcggttccgcttctcaccccatggctctcttttctccttgaggaggaaatactttttttgaaaatgccgccaaataaaacgcaacaccaaaaaaatataagtacaattttcatttttttatttaaattttatgtcaaatgattaaggaaaaatggaatatttcagctctttcgttgactcttcagcaatggaaatgcaaattttgagcaaacaaagagagaattatgaagattttttctatttcctggcaaaagttttgagcaaatttggtggaaaattgacaaaaaatgagaatagggaacaaatcgaaattggcatcgatggggccaacaaaatattggaaagtttgaaaaattatgccgagaaaatgttgataaaaaaggctagagaatggcacccgtactacgagtgccaagcgaagaaaaaattggagcagcaaaatttacaaatggcagccgtcgaaattatgtgcccaaattttgtggacagtgccgaaatatttgaaattttaaacgggcaaaatgaattgtttaaatctgtgccaaaaagtgaaggaaatgatgaaaaagttgaccctaaattggtcaacaattcgcaactgttcaatttgttgtattcatttgtgacacgaattgaggcgataatttacggcaaaaatgccgatgggacaattattagagaggaaaaagcggcaaaaaaaagagaaaaaaatggaagcagaaaaacatggtgaaacgcccgtgaagagaatccatgcgtttattgctaccacaaaatgttttcaccttccatatcagcaaagatataagaaacttaggtcaaatatttcatccaattgagcgaatattaatacaatgtttaagctattaagggatgcattgaatttttatattaactcttttattaaagaatgttgattagttattttaattaaaaaattatttatacaatttaaattttagtacgtttgactcttcgattgaaatgcatcaaattaattcaaaaaaattggtagttgcaataaagaaggaacaaaaagatgttaacaacatcaaccaaagtaataatttgtaataaaaaaaagaatcaaattcatttaaatgtatcattttataagttgaaaatcaaattaaaataattcgataaaaaataaattttcatttgaaaatagagaaaattaattttaaacgatgagaattttagatacttttattttgctgaaagagctaaatgcgcaacaattttcaatttatgaatcacaaaaattgatcagaaaactttattgtcgggcccagcagaattgcgcaacaaaatatttcactgatttaaaaatgctttcaattcttcaaaatttattcgaccaaattcacaatgagcacaaaggtctcaaattcaaagtcaatttttgggaatgcttgtttgcacgatttgccaaaagaatttcctcaaaacttgccaaaatgctccacgaaaatgggattaagccggaagagcatttgctatcgaaagctttggagaatcaaaaagaaatatttgaaaatacttttgttgccgaccattgcaaagcattgcaagagttttattttctataaataaatttaaaaataaatattatatttaaaatctgagaattctaagttttgaatttaagaaagaactcagaagacgaaataatcggtcaattgaataccattcgatatgatttggttattaattttgaatacaatgcgcgaaaaggtggttaatgtaaaatattaattgatattttaaacagtgagtaattaaattcgtttatttaattaattacgattaaataagtttttaaaaaatattattttttattaagatttatatgaaagagcagacgatttgttaaaactattgtccgagattaacataaatgaaaatgatgatgagaaaaatgccgatggaacaacaattatttttggaactgttaaacaaattaattcttttggacaacgcaaatggccaaatgctaagggaaagaaaaagcgaattggacaaattgctggtcgttagccggctaattgagaagacgaaaaaggatttaattaaagcgaaaaaagcaatgtttaaaaagctaaatgaaattgccaaattggaaattgaaagacggggagcaagcggagagtgccaagaaaagccatggcaaaattggacc

SEQ ID NO: 6344 - DNA, 4166 bp, Heterodera glycines
tattaaactagcgcaggcgcgctcgcttcgctcgcgcacctcgcgctagccgagctttgaaaaaatttattatcttctctctctctctctcacctctctttctttctccctctcctctttttctctctctctcactcttcctcctcttttctatctctctcctcttctctccctcctctttctttctctctctctctcctcttttctatctctctcctcttctctccctcctcttttctctcccttctctcctctctttctttctctccctcctcttttctatctctcacctcttctctccctcctcttttctttctctctctctctcacctctctttctttctccctctcctctttttctctctctctctcttcctcctcttttctatctctctcctcttttctctttctctctctcttctttctatctctctcctcttcactccctcctcttttctctcccttctctcctctctttctttctctccctcctcttttctatctctctcctcttcactccctcctcttttctttctctctctctctcacctctctttctttctccctcctcctctctttctctctctcttcctctctctctatttctctctctctctctctccctcctctatctctctcctcttctctccctcctcttttctctctctctcctcctctctttctttctctctcctctttctatccctcctctcttcctctctctcctctctctcacctctctctcttcctccctctcctctttttctctctctctctctccctcctcttttctctccctcctcttttctctctctctcctctcttctttctctctctctctcctcttcactccctctctcctcttctctcccttctctcctctctttctttctccccctcctctttttctctctctcctcttcctctctctcctcttttctttctctctctcctcttctccctttctttctctttctccctcttctgtttctctctcctcgattttatgtgctcgctcataacacaaaaaagacgtaaacaacaaacagaaaagaaaagaaaaaaagactgaactattttccaaaaggaattcgtttcgataaattgtttacttttaaatgtattagttacagcgcaaaattaggttcatttctcgtttttagttatacagaaatttaaatttttcttttggcacgataactttaataaatattatactatactctcattcattagttgttcattcgcagtactaaccgaaatatagattcacactttttctttatttatttcgaacatttttgaaatttattagctacatacctaattcgtaataattttcttttcattaggtacttttctgaattctcttcgcttttctttatctgtaaaaatgcgaaacagctatgatcggtacgggtgagagctttgttcaattgtttccattttaaaagttcagaggtgggaacagaagtggcgggggatttggcggaggtggtggagcttatggacgaggtgccagtggtggtggttacggagcgcgcggaggcagcggcggttatggaggaggaggaggagcacctcgtggtggatatggcgccggcgggggaggttttgggcctccgccttctggctacggagcgcctgaaccatattatggaggatatggtgcacctccgccctttggcagcggcgggggagggtacggaggcggaggtcgcggaggaggcgggcctggtaagtgataactgaagtttaccgtttgctgatacaaacaatcatggcgaacttattcttaggtggcagacgtttggacgacgcaggctcaaaattaagacctgtcgactgggcgaggcaaaatctgaacccaatcaagaagagtctataccacgaacatgcttcaatttcgcgtcgaaaccaagccgagattgacatgtggcttactgaaaatgagtgtaccctacagggcaccaatattccgcgtccaattttccatttcaacgagagcggatttccaggtttggaattgcattttctagctttgcctaaccttcattcgctttaagacccgattgtccatcttctttctgtgcattatcacattccgactaccatccaaagcatttcgtggcccgtcgcactcagtggacgcgatttgatctcaattgctaagacaggctcaggcaaaacccttggatttattctacctgccatcgttcacactatggcccagcctccacgtcgaccaaatgatgggcctggagtgcttgtgctgcttcctactcgcgaattggctgtgcaggtggagcaagtggcacgagaatactgcaagctgatgaaattggatgtgacttgttgttacggtggagcaccgaaagcaggacaggcaaacgatttgcgaagaggttttccgaaaaagccatgacaacacccatcgttatctagtttaggcgtcgatatttgcgttgccactccggggcgcattctcgactttatggaggccaataccaccaatatgcgtcgctgcacttttttggttttggacgaagctgaccgtatgctcgatatgggatttgaacctcaaattcgcaagattgttggccaaattcgggttcgtaattttcaatacggcatacaaattgacgttactgaggagtttttagccggatcgtcagtctctgatgttctcggccacttggccaaaggaggtgcgctctctcgctgccgatttccaagtgaatccggtccatttgaacgtcggttcgttagagttggcggccaaccacaacatccaacaacacgtggaagtgattgacgagtactccaaacagggccgtctcttcgagttgcttgatcacattatgcgccaggtaaatggggttaatggttgttgatcggtgaggagacggcgcttttctcttttcttctcactcctaccattggtgagagggtttagcaaagcgcaaaaacaaaagggccaaattgcaaccgttgttagctttttttctgaagctttcacgtacttatttctggccacattctttttatgcaaatggcattttcttaattcctgatgtttagcgcgaatgcaaaacgctgatttttgttgaaacgaagcgtaaagccgatgacataacgcggaatatgcgacgcgatggttggccggcgttatgtatccacggggacaaagaacagaaagagcgcgaatgggtgctcagcggttcggattttttaattggtttatagaaactaaatgtgatttattattgttaactctttaaaaatatgaaagaattaaaaagaatttttgcctaattcagaattcaaagaaagcaaaacgcccattttgcttgcaactgatgtggcggctcgtggcttgggtattattttacggtgtataaaacgaaaattccctttgtaattttatatagtttggaataaaatacaaaaaacaaaatgaaggaactcaaaattagtcggatttgaatttggatttacaatgtttggggggcggggtgttccatcggtggtttcttttggtttgccgttcgtgtggatcggatggtcacgtggatagttccaccccacttccacatttcgcacttccctctaacagaagcatagtggtggtggtggtgcaattacagcagaatcggagaatgaattggtcgtccgcaaaaagggacgtccgggaagagtggcggtggatgtgaggtggtggggcttcggtcggattggcctcggtcggactcgtcgtccttccgtcggctgccccatcgatgtgctctgtttgtggctgcggttcacacgattaatggcaatacatttgtgtgttattcgtcgtcgtgatggcggcggcggagggcacacgcacaaaaatggccaacctcaaagtttccgcaaagctccgttgtgtccgcgattcgttaaaattgtggtacaacacggagtgcggaaaaaggttggtggtatatattttgttgttctcgccttttctggcctcttattctcattggcgagttatattttgttttcttaagatgtcagcgacattaaatacgtgatcaatttcgattatccgaacaacagtgaggattacgtgcaccgcatcggacgcactggacgtcaggataaaacggtcgttaaaggagcacccccacccctaa

SEQ ID NO: 6345 - DNA, 888 bp, Heterodera glycines
  unsure (1)..(888): unsure at all n locations
tatatagaattcaaaaagcatatttggataagtttntgggcgagattccccccctcctaaataatctcaaaaaaaagaaaatttcccaaaatatgggggctataactcacagtgcatatctatcataaaatgggcatttaagcgttggcgtccggtggatgacgacggaccctccgaaaagcgtggaagaccaagtgactccggcggtttcagtggagggaccaactcgtgggcgagttcgaatggttttcaacaggcccgttggtgaatgggaggaaaaacgaatggagaagaaagagtgtgcaccggaagaaccatattaagagaatttctaaggtgttggagcgaaagtatttttagataaaaccaacttaattttatgattttttgctctaatgccttatttgcttatatattttttcaatttaatgaaatttccacgtatattttctgtcattggttgcgttttttgattaaagtccattcattcgtcgcgacttattctatcgttttctcttctcctcccaattctcgctacgcttctctttcgttcctttaaaggtccaataaattctctgtttggtgttaatgtaactttttcgtgcatttcatttaaaagcgatcgaacttgttgctgctgttttgtgaaaacctttttctgttcgaatttccccttttacgttgggtgttccttcaccccccccccccttttcgtcttattttcctgtttggaaagggagtgaaatgaaatgataaaggaagggacggagaaagggaaggtattgaattccacgaattgacagcgagcgaagggatgtgaataatttgagatttgcggaagacaatgaaatgaacgaagggaggggaaacgaaataagacaatcgatc

SEQ ID NO: 6346 - DNA, 1247 bp, Heterodera glycines
  unsure (1)..(1247): unsure at all n locations
ttgcatgcnnctgcaggtcaaatgtgatttcaatattcaatttcttttttatcattttccttttaatccatatttttattcactaaaattccaaaaaaaacttattaattcgatttaaaaactttttcttataatctatttaataacaccaacctttggtgcatttggccaagtaacaaaaatggtcatcgtcctcacaaaaatccaatttaatgaactcctcccccgcgaagcacaacagcccatcgggcacgcgcggacgtttgaagtgcgtattgccaaagtctttgtccttttccccaaattcggcatggcaatgcacatttggcacactcaaatttttctcataataatcttcgaaccatttttctttgctttctttcatatccattgaggcacaagcccaaaaaattgccgacaaaccgttaagaccggctgaaataattataccaaaattcggtaagacttttgataaaattaacgatagttttttccagccaatgagtgattaattcacgagagaagtcattagaaaaatattcattagcgaaagaagccatcgcaaggattttgaatttttttttcattttgtttgttttaggcttgaaaatttcataaagcactcccaaaatttccgaatttttttgcagcactcataatgaactcccgagcataaattgtatgctatttgttacaataataaaaaaccaatccaaaaatgttaggcaaagttaagttttaattgtaaaataaataattcgacctttggtacagattatagctgcacagtaatcgaccgtatctgggcacgttctatttccaatttggtccctgaatccatagtcattacgaatgaatgagtagccgctcttgcagatcaaaccttgttgaatttgtttaatttaagtaattaaaacgctttaaatttattttaaatattcatgttcataattaataattaccactaaattaccataacagctccaggtcaaaacaggaatggtaagcaaaaagaaaaaaagatcatttttcattgcttatttccgtcaaaatattaattgagggaaaatcttatgggatgaattgattttgagttggattgcttaaatcagaattatgccaattaatttagattacaaaagtccgcactattttaaactgaatttttgtgtggcataatcaactatttatgcacacaaagtaatcaacgaattgtgcagatttcacactaatcaaaagctgatgat

SEQ ID NO: 6347 - DNA, 1496 bp, Heterodera glycines
agaccgataataaaaaacccgggatttttgtctaatgaaattctagaccgagactccccagcatgctaatgctatacgttatgctttaaaatatgatttaaatatttaaataaaaaacacatttgcataaaaaatggttcataattcactaaaaattatgataatttttatcaaaaaataatatggtaaatgaggagttgagaaacaaaaatataaaaaaaatacaaaatcatgaagaaattaaatttggtattttgctcatttacaataatattgaaattattaagtgatgagcgaatatacttagaattaaaaatgattagaagatggagcgtttgtttgtgtgaagcttacaaattagctggcccttttttgaatgttaagatttaaaaacagttagggcttggatttatatggaaattactaggagtacgaacttaaattaataatttaatgaaactttacgaaatttataatcaatttgtgaaaatttatgtccctatttctgcacttaatgtccacattttggggtttttgcttcgttttttttactatatttcacgattttatatgtccatataatctcaaaccctattataaaccacgggaagaaaaagaccggcggatatttcatatctccattggtcgtttacatcatttgccggattttgcaaaaccaccgtggcactcgcactgctttggtgtggactcgaaaccaagttcaaccattttctgggcacagctcagcgtaagatttgaagtgcaaccccactctttaacatttcttttcggatcattgcctgatgctgtgaaaaaataccaaaaactttgaaaattttttaaaaatggaaaaaaaaattattcataaatagaaataatatttttatgcaaatttatattttcttggcggtacgacaactgcgaaccggcaattgcggaccggacatttgcgggcggacgacaattgcggacgacaattgcgcactgtacttttacggacgacaattgcggaccgtacttttacggacgacaattgcggacgacaattgcggaccgtacttttgcggacgacaattgcggacgacaattgcggaccgtacttttgcggacgacaattgcggacgacaattgcgcactgtacttttacggacgacaattgcggaccgtacttttgcggacgacaattgcgcactgtacttttacggacgacaattgcggacgacaattgcggaccgtacttttgcggacgacaattgcggacgacaattgcgcactgtacttttacggacgacaattgcggaccgtacttttgcggacgacaattgcggactatacttttacggacgacaattgcggacgacaattgcggactgtacttttacggacgacaattgcggacgacaattgcggaccgtacttttacggacgacaattgcggacgacaattgcggactgtacttttacggacgacaattgcggacgacaattgcggactg

SEQ ID NO: 6348 - DNA, 1757 bp, Heterodera glycines
aaaagtacggtccgcaattgtcgtccgcaattgtcgtccgtaaaaagtacagtccgcaattgtcgtccgcaattgtcgtccgtaaaaagtatagtccgcaattgtcgtccgtaaaagtacggtccgcaattgtcgtccgtaaaagtacagtccgcaattgtcgtccgtaaaagtatagtccgcaattgtcgtccgtaaaagtacggtccgcaattgtcgtccgtaaaagtacggtccgcaattgtcgtaccgccgttttcttttcttcagagcctaagaatttaatcgttaaaaaagattaaaacctagatgcgatttgtcgtaattttattaaaattcataataaaaatttctatccatttcttacggtcctcgcaagaaatgaagtaacacgcattcgtgtctgggccacattcgccgtttgaagttttgttcccaaacgcaactcgaccaattttgcacttatttggagcggcttaaacacacgaccaaaaaacagttaaagattttaattaatcatatccggacttggtgcaggcattattatgccatcatttgagccatgtacaacagtggaaacgcacaaggaattgttcgggattgtactgatgtaagcaaaatcgcgccctttgccctggataaattcatccgtgtcgtactctctttcagtacagccccattccgtgatgatttcagattgatggctatccttattgactgaaagtcggatcaaaatttagattggacgacaaatattccgaaccgtaaggatttccatgaaaaattgtcaaaactaattctacgaaaaataaaaatataaatcactatgaattatccaattatttaacaatcccctttcatacatttgtatgaatatatcattaaatttctaatattatgtccaaaaacttaaaaaaatgagtcatattttttgtattgttttatttatagagaaatttgtgcctaatttaccataaaaatagagaaagtttttcttgaattcaatcctctccctgaattagaattcacccgaggggggagggggtgaaaaatttagtccaagatggactccaattaattaaaataaaaaaaagtgcgtttaaaagtcatttgcctgtggaacaattcaacatgtagcaaaagtgcttaaattggtcacatttgttgtcgctgctttcattatgaccaagcatctttgaaaagtatgcctttttgcactctttggctaaaacaattcataattataaacaaatttttgtttaaattaatttgcctggaattggcacagccattgcagcgttggacattgacacatccgcttcactataattgtgcgcgcaaaaatggtccatgattttgattgtatcattttggtcgatcaattctttgggatcagtcagaggactttcattggattgtttgtcggtgcagccccatttagtcaacaagccaaattccaaatcgaatgatttatttgcagcttcaaaaccaaaataattgattattttttaataaattcattatatattacattagtgatgctcaagaccgagactcggccccgagacccgagactgagaacgaaacatcgagacctagacccaaaaaagccgagacttttttcgagtgatactcgagaacgagactctcggtaacatttaaataataataccaattttcgacataatgatttcgttaattttcatttttgttttttattatcgcctttttgagtttaaaaagtttacaaatttttt

SEQ ID NO: 6349 - DNA, 3408 bp, Heterodera glycines
ataccaattttcgacataatgatttcgttaattttcaattttttgttttttatttatcgccttttgagtttaaaaaagtttacgaatttttttgtttattttcgatattaaatggaaaaagttagcatatttttgtttaacatttttatctttatcctcaaaacagtgcggccatgataaaataaatcctgaataataaattttatttttaccaagattgtcgtttaaatagataatttttgattgaaaagttcaaattttatgagaatttaaactttatttggctttttaggcataaattttcgcgaattcttattttcaattattattcaaaatatgttaataaaaacccagaacgccttccggaaacaaaatacctgtaagcacaattgtacaattgagcacatagcagtaatgctcgtttggcttacaaaaagtcatgttgtctccataattgtgtgtgttccaaaaatggccacctttgcaccaatgggtggtaattgcttaaaatggcaaaaaaaacttccaacatttcttaacaaatttgttaaaattgtacaggcattgaagattggcacttccttgttaaggtttgacatgtctttgttctttttgccaacaaaataattgcaggtggacttgaaggacgggctttcgagccaattgttccgttttttaaaatcatcataaaatgattccttcttcacactgcatccccactctgttttgaatccgacatagccttgatatgacgaagaaactaaaattttgtaggaaaaacattagcataagtgctgcaagcttgtaatattaaaaaaaaaatttttaatcatgtattaattattaaaatacattattattgtaaaatcctgcaaattttattaacttaaattaccatttttttgaaaagtaaagatcattattttgtaccaaatttttgaataaataaaaccattttttcgaattccaaaaaatattatattttaataaagaactaattatgtattttggtggataatggtcgaaatattttactttcttaagggtgcagtatttttcaattataatgtctttttgtgagaaaatttcacgaaaaaataattaagcataaaaatattcccgatttaagcaaaataaaggaagaaaaacttatgtaatgtttctctagtttggcaaattcaacgaatggcgctaattgtaagggcaaaagcattgacttgtggtgcagttcagcacgtaacagtgccgttcggccacgctgcacgccttgtcctcctgctcattgtaaatgttccccgccgggttcgactcaaacgtcgcttttttgcatcgcagaaattcgtcagtggttgttgtggtgctgatggtcgtagttgtggtggtggtcgtcgtagttgtagaagtggtctacaaagacagatagacatatttgtaaacatatatttaaaaccaggggttggattatatttgaatgtcaatactactaatagacccttttgtgggaaatttgattaatcggaccccctattttcaaagtgtttttttgaaatcgtcccacataaaagtgcacaggcagtataatataatattttaataaaaattatatgtaataataaattaattataattttatttttgtgaaaaaacatttttaaggaaaataaaaataaaaatttattttttgtattttgttttttagcaaaaatttaaacctttactgtatttgagatattgaccataaatttgagtgatttctatcagactaactaaactacagtattgcaactgataaaccgtaccgtaacacaacatttcatttcgtacccaggcccacagcagccggaatacgtcatccatacttccggaattggaatgcatgaatagagaccgccgcactgcttgcagtctcgttccggattgcatccttccttcacttctctattcttgctttgttcatccacaattttgaatgcaccttccacatgtggcaccattttttcggaatttttgtacaattcatatttctaaatatgtttatgttttaaattttttatagtaaacaaaacaaaaattaatttaaatttatttatctaattgtaagaatgacaaatcactattttttttattgaatacaatattgtaccaatttgtattccgggaaacggtcagaaagtatagtatgcacctaaaaattgaaaaaatatatgaaattggaaaaaatcgacaaaattcaaaatagtgcataatgcgattattagaaatttaaattttttataaaattcaacacttacttatcagtaggggggctgtcaaaaatatataaaaagtagtaaaaatatgtacataaatatgtaagaaaaatcacgaaatatgtacaaaaaaatcccaaattgtaaaatatgtaaaaaaaattgaaaatatgtacaaaccgaacggatttgcaaaaatttcgtaaaaaatcctcaaaatatgtaaaaaaaataatatatgaaaaaatccaaaataataccaaatatgtaagaaaatcccaaaatttgtaaaaaaaaaatgtaaaaaaatgtaaataaaagtcccaacttttgttagaaaacacaaaaaagaaagtgttcttcctactatttagagcatggagaattctttaacaaatatgtatttacatacataaaattgacagccctacttatgagggattacaaaaattaaaataataatttagcaatgttttaaattaaacagaaataaattcaaaaacttatagccatataagggttttaaaattaattgatcctaatttttaaagccaaatgaattttaatttggatcatttaaatgaaacaaagagttaaattgtcaagttcttaatggtcgtgtaaatttttatgatcgagaaaagtgtattgagctcaattttccattcctactaattaaaatcttacaaaattgtagttttggtaacatattgtttcatagtttggggaacaacattcatcatctccttcctcttccagtagaacacaaataatttttccaggatgacaatttctaaaattaaataaaaattcattttaaaattaatggctcaattttgtcaaatgattaaattagggttgctctccaacccctcgggggcaaaatgtcgagagccgtggaccatagtccggggaccccgatcgggtagtgagtgatcaacaaaaaatttttaacgaaaaaagccaattttaaccgaaatttttgctaacgagtctggggggagaggggtgatcacagcgccaatttgtgaaggagtatgaacatcgtttgacgaccctttttttgctttttctaaactggttttttgtggcgtgcattttccaaaaatttttggggggaataaaggagcccggcggtgcagataggcgccgccgaaaa

SEQ ID NO: 6350 - DNA, 1582 bp, Heterodera glycines
ttttgctctttaaaataaaaaacatacttcaattttgcaaggcaactttcgtagcgtttatcgctttgcactgctgcatcaacagcccccgcagcaattccaatcacaactccaaaaaaagtgccaacaggtcctgctaatgaaccaattgcgccaccaatcgaagcacccaattctgctccttcaaataacttgccgtcatcatcatttttaaatttgaatgcagctttcacatattcactttcagttttgataatgctgggaatcaaacaagcaaaaagaatgccgaaaatgaaaggcttacattttacaagcatttttgcttaaatttgtccaaattatgcaaagtaaaatttcaaaaatctttttaaatcatcagcagggtgtgtgttgatatgttctgatttatcaagaatattaaataaatattgcccctggcaaaaacattgggattttctgattttcgccaaaaatctgctttttcataactaatttctgtcttttaattttggcaaaaaagacatcctgttttaaatgagctaataataaaaattatttatttcataataaatgtatagtttgccaaatgatttcaatgttaacagaattttttgattctctgtatttattggtgattcaccagtagaatgaacaaactatctaatttcccaaaaaaatgctaataaacagcgaatgtaaattcacataaaaggaatttgatgatgtgtaaaaaatggttttcattaagaaaaattgtctttgatattttcttttttttcaattttataaatcatagttgaaacaagtttttgttttgaattatgaaaaattttggcgttaaaagtgttttttcattattcacaaaatgttttaattataaaaataaaataatttaaactgatagtatccatttcttgaacaaattctccattagcctacaaaaacaaaatttttgtcatgttccaaaaaaatgtgagcaaaaatgtacaaaaaaaaaaattttccttttcattgtttcaaattttttaatgagtaaattttttaaattttgtatgctagagcataagaagctagtgctttttatctattgatatcaacttgataagttttttttttgagtttaagcaaagttatgatagattatttgttcaaacaacgcccatttcgcatttctggtgaaatctgtttaaaaaattgaaaaaaaagtctaaatttggctaaaaagcattcttataaaaaaacttgggacgtttatatattttaaagtcctttaaaattcaaattagccacatcacccaaggtattacgcgattttcctgtaatttttatttgtgattattttttttttattcttttcattcatcattgaaaatcatttgcatttttaatgggaaagcagtaaatggaatttaatgtgatgaataataatggtcaaagaaggaaaaaccaaaaaaaaggagctagttcttatgatattcgattaacaacacaaaaattttacgaattatataatcctattttttcatttttaggaattaaaataaaaaaatgcctgtaatatgcctgctgccttcccatttat

SEQ ID NO: 6351 - DNA, 4772 bp, Heterodera glycines
ttttcactgacgaaatcactcactgacgaaatcacttcctttcaaaatcactcactgacgaaatcacttaatgacgaaatcaccgggaaccgcggcgatatttcggcggtgatattttgtctcgtccccatatccgaccaaatttgatttttcttgatgaaatgttcattggatccgatcaccttgcatcttcaacttttcttttaagaaattttgtttttgaattttattgttatactttaatgttagaaacaaaaacaaagtgctggagtcaaagaaaaaaatttaaataataataaaatattctttagaactaccaattttgcaaatggcctagtggctagtctccttgactttcccttcttctttctcttggtttaatctagagatcggaccggtcggtttttttcggtatttttcgattttcggtttcggtttttaaccgaaaaaaaccgaccgagaaatttttgagtttttcggtttttttcggtttcggtttttttcggttttttaaccgaaaccgttcgaccgaaatatttaaaacgtcatacgagtgcggagacccttttgacattattttcatcatttattttaaatttaaattatattttacatttcgccaattttatctttttattttgttttgcattttcatttgtcacacaattttctacaacttcgtctttgatcttttaaaaatgattttatattttgtcttctcttctcggcaataaatttataaaaatctatcgcttcggacccttttggtttaattgtttcagtctgcttttcccaaaagagcagtacttggcgctcctggtctacaaaccctcccaacttttggaacggccaacaagaagcactgactgaggattttgttttggatttggaaatggaaaatcagagcaacgcatcggtccatagcagatcagagcgcgaagaaaatggagcggacgcagagagaaatgcggaaaacggcggaaatggaggtttggatggtggcaatgagcatgcaccgattttgggacagaatttgaatcgaggtgctgatccgcgtcacccacagccgggacgtcaccgatacaatctccgaccccgccaaaacaatttgttttatggcctcaatcccaatgagtctgccgacagttttcagccacacggcgaaaaccgccaaccaaatcgaagacagcaagcacccattcaaaatccgggttttttcgaaaatgttgaaatgggaaatcccctttttgctcagaaccaaatcgtagaacaagtcgttgagaattcacattccggcattagaaatgaaatacagcatccaattggactcgaaattgagcggtacggacgcccgatcgctaattcctctccaatcaccagaatgggaagttcgcataacgagccacacaattcttttgaaaacgtggagtttgaagagataaggcaatttcgggccaggcaactttacgaaaatccacgcggatttcgtgaacaaaattttgtcggggaacaacgagaaaggatgaatgaatttgagcaaaaccatgctccggtcccaaattttgaaagaagaaatgtatttgttggtgatccgcacggaaatcagctaatttttgggaattttggaaggaacatggaacggaattttggacattttgaaaattttcccggactcgcacgaggcggaaaccaaaatttgaatgttgggggaccaagaatggaacaaattcgagacccacacagagaaagaaatcagtacgaggaacggcaattcatgccaattcccgaaccaaatatgaggcaaattgatggacaaaaccaaaatttggcttttcgacaagtgcagagccaaaattttcaagaaaacatggcgagagtgatgccatacaccgaaggaattcctgatattattcttgaacttcacaaagtcacactttcaaatcagtacgcaaatgtccttagagaaattcctactctttttggcactgaagggagggacaaaatcaacgattttttcaccactcttgaattgtgtacaggagattggagacccgagaaaaagttggaaattttgagagcgaaattaaaggggaaggcatccaaagcattgaatttgtccctacgaaaatttggtcaccaagtgccattcgaagtcattaaaagggagattaagaccattttacgggaaacggattataaagaggcaagcgcatttacggaattgacgcagtttggaaagcagaaagtcggtgaggatattgtgaaatttggtgagcggattcagcagctggtcagctgcgcgtactatgggatcgaagaagaacagttggacgaaatttcgaaaaaatttttcatttcgaatgttagtgatcccaatatgtcacgttttttggaatgccaaaccaaacaatcccagacattcgacgaattgttgatggtggcaaaccgattgagtttaattgagtcaaaacgaaacgtaaaccaatccctgaaccaaaattatagagaaaacaattcacagttttctcatccgcgaaatcagttcaaccaaaaccgttttttccaaaaccaaagttttgaaccaaggcctcaaaataatcaagttagattttttgctgatcgaaatttcacccgacaaaatttcacggataggcagcagccaaacacaaatgagaacagaaactccggctggaaccgaggcggctaccaaaattcaaatttccaaaaccggcaaaatttcccaaatactgataaccgaacccaaaatgtgccgaatccacagcagattcaatcatcttctggcacacgaaccaacacgaatacgattacagtcacggaaaagaaccaaaacgagcagaacgaattggttttttgcaataatatttctcaaaaagaagttcaggattttgaaattttttttaattgcctaactactaaagcatacgattttccatctaaaaatcccgcccaaccaaaaacatatgaatgtcttaaattggtaatgaaagtggaaggtcaaaatgcgaaaactttgggagactctggtgccgaaacgaatattgtcaaccccgaatttctttataatttggcgaaaaaattgaaattggatttgataaattggggttttaatccgaataaagggctaacgagaattccatttgatgttgcttcgttttctggttcaaggatttccattataggcgtaataaatatcccaatcgaaacatctggttttaaaacaaatgttccgtgtttgatttcaaaagaaagatttaattttgatttggttttgggcactggtgcgatggaaacactcggattttaccttgcaaactcatttacaaatgaaataacttatttcacttcaaaagagcaacaagaaatgtcaattcctctcataaattctgttaaagtcgcatcttttacggtcataccccctatgtcctcgtgttttgtcgattctagaattgaaaaccattctaatctacccaaaaattcccattttcttatagaaaactcggaaaaatcaattttattaaaaatgcaaagcgacgaagaccttatggactacgacgaaacagacaaagtcgaaatggaacggctgagaaaattggacaaagtggcggagcaaaaggaattggaaaaactgggaataattgtgccggagaccaacattggacaaaaatggaatggaaaaagagggcacagtgaaccgcccattcattgcactgatgcgaaaatcccagtgcatgaacttccgattatcgaaatggcgttggcaacgtcggagccaggttcatttaaaattttggttcataacaaaaatttaacgccaatattcctcaaaagtggcattgaaattgcaaaagcagaaattgttgaagaaatttatgacccccatatcgaacttcttcctgaaaggttctggaaatcccaaagattcattagaaactttggtgttcagaaaaatggagagcgaatttcgcaacttttgtctgtcattaaaccaaattttgggcctttaaataatgaagaaaaaagtctgttggaggaaattttggttgaattttctgatgttctagcactcgaagaatccgaattaactcaaacaaacttaaccgaacataaaatcgatactggaaacacacaagcaattaaaataccaccgcgccctatgccttttggagttagagcaaaagttaacgaaatgttggacgattatctgaaccgtggcataataagaccctcaaatagcccatgggcatccccgattgttttggcggtcaaaaaggacaaatcgataaggctgtgtatcgattatcggaaactgaattcggtcacaaaaagagactcgtatccccttccaaacattgacggaattttaatgtatttaggggaaaggaaatttttcagtacattggaccttatgtcaggatactggcagatccccgttgccaaagaagacgtcccaaaaaccgctttttcagtaccaaatggtcattacgaatttttggttctcccttttggtctttcaaatgcgcccgcaactttccagcgttttatgaactgcattttaaacgagtacataaacgattttgtgttcgtatatctcgacgacattcttatagcctcaaaaaattttgatgaacacattttacatcttaaaatggtttttcaaaaattgcgaaaaagtggtgtcaaggcgaaggccgaaaaatgcggatttgctcgagaaaaggctccttatttgggacacactttaaccagagaag

SEQ ID NO: 6352 - DNA, 3157 bp, Heterodera glycines
agagtcccgatccgcccagtctctactaattaccctttaccccccccccccccccccccccccctcgtcccgtcccgttcccccttaacctcccctctcttcctcggtcccatttctcccccccccccctttttggtcgcctgtcgccgcctctccgtctcacctcctctcttccacatttattttttaatttttttgtcgttgtcttaatttttgactgactttgcgctggcccatcaaaacaattctctttacaccgataatttcgcttgtctttttaagattttatcggtattatcatgtgaaaagtgcgcaattctgtcaggagaaaagcggggaaatgttcgccaacgatggaattaaattcattcgaggaattcgcgcagttcgctgtttttctatttcaaaataaaattaacgaaataataactgtcatcctcacgctattttgaaatttcctcatcgttttttttcgcataatctttgcccaaaatggccaatttgtcggccacgccttcccccgtcgtcccctcccatttcaatgcctcatcttcgctgtttcccaccgccacggcttttccctcccccgctgcttcttcgcagagtttggccactgctccgttgaatgcctattccgtggtgaacatttgcatttgtgcgccgatgcttttgctgcagctgctcactttgcccgtacctttggccattctttgctccgtttttctcgcattgtccgctttttcttcagattttccttatcttccccaattaccgtcgcaatgtttgctttcgcattttgttcacaaatggcgtcaccgactgtcttcagttggccccgttactcatcttcgccgtgcttaatctgatcaccgatcaaattcccatttggttccaaatggttgcttttcattttaattttgtttaatttcaatttttttttaatttggcaatttgttcttcagtttggcagcagcattgtgctcaatgcgtggaaccttctcgtcatgcagcactttttgctggccatcaaccgacttattgtgattttgcgtgcccgataccttggctcgaaattcattccggacgaggacaccgaagcgatgtgtttcaatgtgaggggcattttgaaaaaggcattcaatcacatgatcggattccatcccatttttttgtgtcttgtcactctgtactgatcagtagggctgtgaattttagtgactaaaaacttgcacaaatcgccaagcggaattttctaacacagctcattgttttcgaaagagtttaaaattttgcatgaaaatactttggtataaggcctagcatcttgccaaattctagaattttttatgcactcagagatttttaaaaaaatccgctttttccagcctgaatgccaagtttgtggtcaagttttgaaaacaggtggttttttgtaaaaaagttttaacaatatgaaaaattctgaaattttgcagggtgttaggtctcatgccaaagtattttcatgcaaaatttcaagctattctgataactctgaaccgaattacaaaaatcaacttgagcaaaatttaaacttttattcactaaaattcacagccctactgatcagtccccctctgatcactttgctgatcgtactctgtcatcttttttccatcttctgatcgcactgctgatccttctttcagattgcgcatgtgttctgctggacggtgtacttcgtcattgtcggtctccaccaaaccaatttgatgggtgggcttttccattccggcaccagccaattcgtcttcgacattggaaagccgtggactcagacgatgcgcgaagtgttcaaatatttgaccatcgcaatgccaatcatttgcctggtcatttacattgtgatcattgcatttgccaaactggtaaatcgttttaatttaaatgcctttttaaaatttgttcagagtcgcgctggcacccgccgaggcgacgactttaccaaagccaaaacgacggcgccgcttttgaacgattacgaacagcgactgctcatccaagttggaattggtttcttagcaccaccgagttcaatttgggaatgtttttcaattgaatttccaatcggtgctccgtccaattcactcttaacagttgcctcaggctatcattctgtacgtggtcatggctcttctgatcatcgcttggaattcgttcgagtcgtgccccaacgacatttgcatcggcaaaattttgggattaattcccatttcgctgtcccgttccaaccacacttttttcattgaggtctttcgttcgttcgttcgattcatttcggcactttttagggcctttggatggtttactgcggattgagcccaattctgtttttgacgatgaacaagtggacattttaattgcacaaccaaaaagattaattaattttttttaatttcagagagtttagaaaccgatttttgaaattgtacggattcaaaagggcaattgttttcccaagcaccggacacacaaacatttcgaaaagcaacgaaagcaatgacacgaaggcggacaacaaataagttggacggaccataacacaaaaacggaatcaatgaaataatgggggggggggggaaaggttctcagcagatggattattatcttaattaattaattaccctttagaaatacaaagtgaccgaaaaacatgggcacacgcaccccggtgacgtaatgatgggccgtcttttttttacagaaatcaatatgttatgatataataattgttctcaattttgaatagcaattataatataaccaagtgcatttggcccattttgttaattaagatttttattatgtcattaaactaaaattggattgattagtaacaaatgatttttgatcgtttcgtttgcctttcattttccttttcattgtttgtggaatttccttcggtaagtctgtttctgctgctgctgcagttgttgcgtttgggcttccctatttgcatttggagttttgccttccatttccctttttggggacgaaaggagaagcgcgtttctgctcgggcacggacaatactcggcttaaatggatgacaaaaatgccctcctctcccaattgtgccatcaaattctctccccctcccaatgtgttccgttacccc

SEQ ID NO: 6353 - DNA, 4123 bp, Heterodera glycines
cccttttccccttccggccccttaaaatgaatgttgatccaagcttcagactcggctgcttgcctgcgcaccgaccccgccctgcggcccctgcggtcccgcgtccccttggtctccgactgcgcccggcggtcccttcagtccgggccttccatgaacgagctttgcgtcctctcctggtattccctgttctccgaccgtcccaatggaccccgcttttccttgaggacccaactaaaacaaatacttggaagaggcaacaatcggtcggcagtttttacccctccggggaatccgggctgtccatctcgtccaggtacttaaaagatcattaataacacggtgaaaatgcgaaaatgagtcattaccgcccggttggcccttccctccgcgcattccccgtgggccaggccgacccggcaaacccaggggccccggaggacccattggacagtggaaacacttttccagctgctggacttgtgccagaacgtcttcagcagagacaccagcgaccccatcctgaaaataaaaataatcgcgtgaatccatgcccaatgattaacaagggggacctgtcctgctgcgccggcttcgcctttctctccgggtgccccgcgggggcctttcggcccggcgggacattttcgttcggcgcaattgcacttggccatcggcgattgttgcgtggcacttcggtctgtcccttcagcagaagttgtgctcccagtttccttttggtcggccgccttttctttcttttctccctccactccggcgcttttttcacccgaattttcagctgcgtctcgtcgcattcgccgttgcccattcacttcgattaccgtggcccaaatttcatccgattggacctgacaaattggcagttattttaatgaacaaccattaaaatagaaagttactctaaatagcagcatctcttcggctaattccgtgcggatttggctcatcttttggtaaagcattggcccgccaattagacaactcaaagtgcagaaaatgcccaacgccgcgcaagtggcagccgcaacttttaaacccatttaaaatttgaatttgaagacgaggaataagtgacttgtgattggcaatagcaaagccttttaaggggtgaggggggggggacaaaacataaaaccggatgaatttgcgcattttcggggtttgcgtggcgggagagagcgaaagaaacggtgaaggacgaattttgaattccaaccaattcaagtgaatttacagccctttcaaaggacgggatgaaaggaatgatctccggtttgacatcctttgtacgtcatatgcaaattaattgaaatgaaatgcccaatttcggaatttcaaaatgcaaaaaaggtcaattctaaaatttattaaattttaaatgtcttttgggtctcagataatattaaagtgaattgatcattttatcagcattcatcaaagttatgcttacgtaatttttgagctttttaaattgttatcgaatattggtatttttaatatttttctattagaaaataagaaattttttaaatttacatgttaatagaatttatataaaaatgctaatatttggcttattttaagggaattcgggtggatatgccgaaagtttatttattattaattcagaatgtcagaaaaattgtgaaaatcattaaattcattatgaaatatttatttgcataaatttattcatcaaaattctcgaccatttttaaacatttgcgtcatccgaaattaataattccgtttgaaattggatggattcgttgggtttcaacagcaaatttatttgcccattacgatttttgaattttgtttagaaatttcctccaatgtcttcatggaatgcgtcatccgcttcttcgtttattttcatcttcaaataaatttacagagaattggaatttattcgtcggatgattggccattaattttgatcgaattgatgggaggaataatttaaaagcattaaaatattggccaataaaatggcccccccccccacagaatcctccgacagttttcctcttcacattccgagcctttttctgactcagaaatggcccttcttctcgccaaattcgccctcgctttgtttttcattctttcagaagtgacaaaagggaacggacaaaatggttaattaaataataattaaacaaaacttcgattttgttttgtttaggataccataatctgatgtattaccacccccagcagcaggtgatcattgatcactcaccgattagtcgattttgctttttacccattttattttaataatgaaacgtcctttttttaaaagttgatcgtttagcaaaatgcgccgcttctcagttcgcttcagcagtgccagcaacagctgaacgatttgcagcagcaaatcgcgtcaatgcaaaatcagaaaacggtgggcaaaaacgaaagtaaaggggaaactgtatgaattaatacggcgattttgttctttcggatgattaggcgggaggggggggggggaaattgtgggacaaaaacaatggaaaaacgtttgtttagccaacggcgaattcgccctcgggcaacggcacgcaaacgcagcaggggacagacagcgcaaagaatcttttggagggagtggtggtggcgaattcgagcacgaaattcgtaaaaagcgcattcacatgaaaagggagacgaagaaaaagaaaggacagagagaaaagttaagggaagtggacaaaacaaattatgagaaataagagagaaatccattccatttttaaatgcataaacaaatgtgacactgtcagaatgtacgactcaaaatcaaagaaaagagcaatccccgatgaatttgccattatttggccatcgcctgcttttgcttttcctccgtcggcccctcaaaaaacatctgtcccaatttgcttttgctttcgattcgccgctgtctctcctccttttgagctttctcgtcggttgtgtttgtctgctgctgtgcgaaatacgaacctaatgaaaagagcaattaattaaagtttgtcggtgttgttgtacataatttagtattaattttccaacgtgaaaaggtcttgttagaattaaaaaagcaatcatcgtatttataaaaatgtattaatttaaattaataatcgttgtgttttccaatgaaaataatccattacatcatataataacacgataatgggcatgttgcgcgacaatgcgtgacgtttgattgaaaaataatgccgtattcgtattcagtttaattttgggaggatacgagaggtaataacataacgaacgtgaagtgccgtgtctgtttcaattcgaaagaaatcataaataagtggcaggaagtgaacaacgaatatttctttttaaataaatattttgatgcagattttctgtataggcaaaatttttcggcccaaagacttagtaaacaatttcctaaatttttgacccaatatactcatgaatatttttggtgcataatctattaacaattgatttaaattgaagaaattttcgaccataataattcttaaaatatcaaaaacaaagcacattaatgcaagtaaaatttgaatatgtagacctgggttcgaaattggactagattaacatgatactcaatagtcataacaagcgaattttttcgatttttggacttaattgaactaattaccagttttgatcagtgatcacacacagttcaagaaagaacgagaatcataaataacacaaatattttcatgcgaataaaaaaggtaaaaaaaatttctgaaggatttgccaaccaatttaataaatattttgtttttaccattgttttgttctgttgcgactgtttctccgcccgttttgtcattccttttgacatttaacaaattcggtagggtttccatttgcttttgttcaatagttccattcgcagttgattgtgagatttctctgctggctaaaacgtttttattataaagacaatttttaaaatttcattttgagtgtatttccccccctccacccaaaaataatattctcaaacaatctaaaaaacagaaattgtctttaaaattcaaatattgcgacgggtggaaacgaaatg

SEQ ID NO: 6354 - DNA, 1722 bp, Heterodera glycines
gcgatcggacatggacaccccccaatatggaaatttatcaacattttgcgcgagcaccagaaaataatcgacgtggacttcgaacatttcctcgccggaaatgctccgccgccgaaagcaaagcgttactgtgaagcagacagacgaattttgaggatcctggagcgctacaatcaagaaaaagagcggccgcaaatcgaaaatgatcaccaatattgtcaaaaccaaattaatccgaatttgattaatgaaatgcttaggggaatttccagcaattaccaaatgaatcaatgattttctttttaattgcattattatttatttgtattttcgttttaattaaaatagattttttataatttctctatgtacttaaccgaattcaatacaaatatcattctctcaaaaattgtattctttgaaaaagtgattcaaaaaatgtttgagacgcaaccggccccttaagtactaagacgcaactggccaagacgcaactggccccagacgcaactggccccagacgcaactgacccctaccgggaccgggccgggaattcccggtcatccgaggtcccggtcccggattttgaaaagctcaggtcccggtcccggcttctcaggtcccggcaagtcccggtcccggtttttgcaaaaattcccggtcccgtggcactctataaaaaaggatcaaacatttctatttttcctccggaggtagcgacaccgacggacccccaaacaaatcttattttttcataaaattggctcaaaatctcaaaaattggcatttttggtttggcaaccctggcactttttgaaaaaaagaagttatttttcaacaataaaaccgttgtaattgtgcaaataggtttaaaaagtcattaaaaaaatcttatttttgggtattttagttttagcctcgattgtccttattttgaaaaaaatttggcagctctattttcattaggcgacatgcctagtaaataagcgaaaatgcttttgctgcttgtcctcccataaatttgatgctgatcagaaaaaaatattaaaattaccaattaataaaaagcattttttacggattatccggagactttctgatcagtcctggcaatgtcgctgatcagcagggatcattttcatggtgaacaaatcagcgcagcaacagcagcatcagcagagaagtggaactcacatttgcacttttcttttgctaaaacaatattcccaatttgtctctatcgatttacttcgattgtaaattttcggctttttgcctatgccactaatggatagggcgcgtttaaattattactagagcacgaccaaaaaggcaacaaaactcgcgaaaaaggcactttaataggcaccaaaaaattgaaaaaaaggcatgttaaatgcacgaaaatcccaacatgaaaaaggcatttaaaattttttattaaggatttttagggagcaaaacacgtaaaagttaaccaaaaaacttaattttggtcatttaaatgattattaaaatattttataattattttcgaataaggaattttttaaagctaaaattttttatcaaaaaaaataattaattttttgcgatcaattttttagaaaatttttctattcttaatggtgtattttcccgattttattgcatttttaattgaatttttcggaaaaaacgccaaaaaaggcaccaaaacggcaaaatgccaaaaaaggcat

SEQ ID NO: 6355 - DNA, 4149 bp, Heterodera glycines
ttttagtgtatataaagcatattttggggtttcgagaataaatgcatattttgcattttagagcatatttaatgtctaaaacgctgcttagtcatgttttaatttttatacaattttggcattttttgagaaattaaaagcaatttttgcaatttttacggcatattttattgcatatttgggcatttttcgggtttttagggcgtattggagggatctttagtgcatattttatgcattgccattttttagtgcataaacttcgaaccctaataacaatggccatattttatgaataataaaaaaaatttaaataattttttaatttttcttacagaaaaaaatggtggcgttgtgcattactcctcaaattattgctgtggtgtttatggtgttgtttttgagtggattttttaacggtatctaaagaattttttgtaaaaaaaatatattttacaaatttgtcatattaatactcattgtaaaaagggggacatgaaattgtggagatttcaatgtcaacagtttcgtcggaacgaatctggcaaagttgggcgattttttcaattgcctttttgccgatagacccaccccccccccccttttcggcattttctccgctgaaattcaaattttgcctttaattaatttttaaaatttcaaaagaaaaagtgattattttaaggatttaaaaaaatttaattctgtgcaaaaaaaattttgttttttaaatttttttttgcctaaaattaaattggcattttttgctgcaaattttgccagctttgggaattaacaaacatgaaaatgtgatcattcatcgcttaactcaaattaggtggcgtaaattcgtcaagtggaaaaagtgtcttcctctcaaatgttcaacatccgccggcaaacattccgaagaattcaaatgccaatttgctgcagcaaattggcgtgactaattatcaacagcagcagcagaatgccaacaaaacattgaagggtaattaatgaaaataaattatattttttggtagctttcatttcagggaaaaactcgcttaaattttttattaaaattttcttattaaaaatttttttaaattttttgtgaaaaatttcgtttttaaaattttcaaagaaatttcggggtggaacaatacgggggcgcggaaaatgagcttctcctatgctcgagaacatttggtctcgatagggtaaaaaatttctcggaatatttgagtctcggtcttgaacttgggggtaagtgctcggcatttgtctggtgggttcaattcttcaaaattaaaaaatactcttctttcaaaaggttaagatgtttttgactgtctgacaaaattttgtttttactttaatatttcttaaaatttctcaaattaaaaaaatatatatatttccaatgaaagtttttttatgggaaattttgcataaaaatatatttttttcaaataaaacatgaccaaaaaccatttatgtatgacttgattcaatctaatttattaatatttttggtgatttttcatgaattcaaaaagaaatccgcgacatttattgtttttaattttaaaaaataataaaaaataaaaataaatttaccttttagagagtgatcgagaacaaaaaacaacgtaagcaaaaaaaaattgatactcatggccagcaggcccctaaccagaaaaaaaactttggaggcttttgcctctaaaatttttcccaatgtaatttttaatttttcaacttttcttggcccgcggaattaaactcgtatttttgaagatattttttcgcgaaatttgctaataaaatttttataaattcatataacagaccattttgaattacggtattatccaattaccgtactatctcattttctaaaaagtattactatacatacgcattgtcaaatttcatagattttgagggctcaaggggtaaaaaccacaaaaatatttacttagatgaaattcattgtcgtggcataaagcctcggtccaagtggtagtttattctagagaatgggctttttaaagaaatcaggaccagcattttggatgattgaactttatgactcgctcaggggcaattttatctgtgttaaaaagtgggccttttattctcctaaaaataacccattaattatcttatgtagtcctttttagtgaccagggtctttgttaattcacattaaaaaatggtttattttcattaagcctttctccggaaaattgccaaaatattggtgcgggagttgcgtgccatgttcaaaaaatttttgacaattttttgtctctatcttatgactctccaatgataggataaaacaattatgtagcaatattccctagtttgttttgaacattttgaatatattttgtcatttttggttgcgtttgaaaaaagttattcaaataaataagtgggacattacttatttgtcaccctgtatgctggttacgggcctgttgcccatgcgccaccctaatgaaacgactaattaggcacccaattaataataatttagcccctcacgcagaaagaaaaatggaaaaaaatcggacaaaaaaataaattcggctgcttctcttgtaaatacaaaaaagaaggaagaggagaagctgaataagcaaaagcatcagcaaaaaggcaaaaataatgggaggaaaaggaaggaaaagaataaatcgcagatgggccgattgggaaaatttatgtgagtgagagaatttgggggcggcaattcggtgctgttagttttcgacagtgcttgatttcaatcagtaatcttttgtttttttaaaaaacttatcctatatggtgcaagtctagttaaattttgaaaattaaaagtggagggcttttgcgattttctaattctgctacaagagcctccaggttcgcatcttggcactcaaacccggcacttgttagcaggactttcccacgcgattcaagaatcttatctacgaaatttgttgggtttttgagtgcttcaagaaatgtttgtatagaaaaaatgaaagcgataaatcttttgacaaaaattaccataaaattcattattacttaaattataagttttgtttatgcaaatatatggatattaatttaattcatatgtaagaaattatatggaaaaaagaatttaaaaccattgttcaaatcaactactgtcgaaaacacctgctggtacgagcaattcagagccaaatttgagcagcaaatccgattaatccccgttccggacctgggtctggaaaattccgaccggaaatttgtttcggtgcctttttgaacaaaaactctcctgaaaattcgtaatcttattcaaaaaaccatttttgtacaaaatttgcttgtaaataatatttacccaaatttgcatatgaaaaaattcttcggcgacgggccctcaaatttttttgagaaatataaaaattcaaaaatttggcaatttgtctgctgggcactttcaaatttgttgtccttatgcgttttaaggacaattatcattcatttgtacatgcatttttaccccttttttgtgcacaggttcactgtgttcatggtgatcagtatgttcgttccacaagttccgctcaatttggtgctccgtaagcatttaaaaataaaaattaatataaactcagtgtttaaaaattatattttctagagttgtacgggaccgcgaattttgagaaaatccgggaccgggacttttcggattgaaaagccgggactttttggctgggaaaaccggaaaaaccgagacttaggtattcagtcatatttttttcagtaccagtcccggtcccatacaactctaatattttccaatagaaaaaaaaagtttttttttcaaaattactagtaaaatattttgaaaaaaaatcaggcgatatagataatggaaaactataaaataataaaattaatttgatttttctttttttcactgttattataaattttttctgaattttgagcggattgacgcaaaaaattgaggtttttaattatttcaaacttactataatttgtttactgtatattgtaaaaaacaaacgtactgtaattttttttactgtatatttgtcggcgtatcaatttacgcttaaaatttcatttcatcattta

SEQ ID NO: 6356 - DNA, 3510 bp, Heterodera glycines
cctagaaattttcggaaattttttttcggacgaaaatgggagtgaaaaatatttttctggggtaaaataaggtgctgagcacgaatatgatgtttatttttcgtttcagaatttttggaattttttaaaaattttttattttttggcaattttttggccctcgggattttggcctaatatttgaaaattcatatctagcctaagggttgaccaattttacaggaataaagccttaaaaatagagaaaaatcaggagaattttatggactttatttggaatttctatctaaaaaaggaaaaaagttattccagaatttctggaaattttcgatttttcagaaaaaaattcgtagctgccttctgaaaagctattcgggaaaagtaaaatactacaaaaatccgcaatttttttctctataatataaattttattttacatttttatcacatttttaaaaaaagatacaaaaataaaagtgattttggcattcgggaccaaaggggggagcacatgatttttgagtggaaaatttttttttcacaaaattcttccaaaaatatgtctttaggggttatttgggccgctgatcacgaatacgtgatcagattttacttttgacatagtcaagacctcagaatccctgtgtgattggggattctgaggcatcattttgagggggggggggcaggttcggatccggacggtgtaaattatttttctatttatttttgtgttatttttaatgtttttaattcatttaaaagagtgtttgttttataataaaaaataaattttttaatttaaattaaattatttttttatgaaaaattttattaaaattaattatttttttaattaaataatttcatatatttttttttatttgagtttttcagaaattaatttcatttcaattattataaacttcaaagtttttttaataatcaaaagaggcatttattttacaatttttaaaaattattaatgcatttttgtacctcttctgccatttgttgtacctacttctctcttttaatcactgttgtacctcttctaggttggtaattaaaatatttttaaataaataaaacaaatgtttatatttattgcaaaatcttctttttctttaaaagacaattaatttaaaccaaaacacattcatcctttaaattgatttacaattaacggttcccctcttaaaagaacaatgacattttactgagggttttgaatttttacgaaaattaaacttttcagtgttatttaaaaatttaacattgccaaaattgatcggcaaaaactgaatattttcagtatttgtttccaggcccaattgaaccctaataataatttaaaattaatttgatttttaatcaaataaattttatttattttccctgtgaacggagtgaagaaaatgcagagaaaagtgaaaaatatgagagaaatattgtacaaacagacagcgggagaaaggcgttctctgccctaattgtattgtaaaaaatggaggacgtggaagaaatattgatttttaaattttttgtagaaaaattattcgtcattacaattttagtcctacgtaatcataattattttaaatttatattatgtgaatgaaaaagaaaagccagcgaatttctaattccaaaaaaaaaaattctaaaaaatctatttgggaattaacgacagagttttttcaattttcacaaggctcgaaaatttttttaaaaatcactgatttaagcgcctgagaattaaataaaataatttcttcgttttcctcatcccaaatttcttagttaaatggcattctttttttttcaattttatacccaattaaaaaaatattttaaatttttttcaaaattttcatcaaggtcttgacccttcaaatttttcagcattttttgtatatcatcgtaaaaatatttttaaaaaatgttggaatcggacactttggcccaaaatcagtcggcaagcgtttcgcccggatggaatgacccgccgccgttggccaacccggcgacaacgacagctgcggcacatgccggcctcaccaacggagtggctaacggcgcaggtcggctgcatttgcagcgacagcgaaggcccgtggacccgtccgtccaggtttttggggaccaattctggtattttttggcactgtaggactaattttggattttcatccatgaaattaaaaactcggaaatttttgccaaaaaatttttgttttatggcgttttgcttttctatggccccttaggcgtcaaaaaacccaaaattgtcggatgaattaatgctcattctccaaattggctttagagtgcggaaaactttgtccaattgagaggcaatacgtcgtccgcagcaaatttgcagcccgcccaaccgcaacaacaacagcaaaaccatgtaaaacactatttgaaagaatgcgggaggaaaaaatggcatttttagcccaatttacgacggattttgcacaaaaaatttatcccttctttttcttttgcctttcattttcggcattttctcaattttttcatttttaatttaccatgattaaaaacgatgaaatcaactatcgaatatcatatttaactttggttttcatattattcttggtattttatatttgcaagtaaaaaatttgaccaattttcgaagaaattatggactcaaaacattttgggatactcagtttttctaaattttgttcaatttcttttaaattttgggcgctatttaaaaagagtaaccttttgaattctatcaaaaacaaaaggggggacccttttgttttgcaaaatttttttgagataaaaatccatgaaaatttgttatccgagggttttagaggtcgctgatcacgaatctgacatctaattcgaggtcttggacccaaagaaccccagggaataatttttcatgactaaatattaaaaaattttgcaaacaaaagggtcccccctttttttgtgtttgctttttgataatttcaaaaaggccctctttgcaagtagcgccgaaatttttactagggtcaaaaaaattttcctctggtcagattttcttaaaattttgcataggcccatattttgaccccctctatcgaatcacagtttattttttagctgtctagtttttaactcgagatcggctcttgtgtttttacaagggaaaatcccctaaaaaatttaagtatcgcaaagttttggcgttctgattacaaaataaataataaacttatttgcactgggagcccaaaattgaatttatagagtcggataaaacacttttccttaggttttcggagtcgctaatcacgaattcggcatttattttaaccatttctagccccgaattcgaattgaatcgctttgtgcaaaaaaaaaaaaattgaattagttgaaaattgagtttttgactttttgttcgaactcgggttcggagttcgaaatgggtcgaaatggatgccgtattcatgattagcgaccctgaaa

SEQ ID NO: 6357 - DNA, 2035 bp, Heterodera glycines
  unsure (1)..(2035): unsure at all n locations
tttgctagcaaaatgaaaacatttaagagggctactggaaaaacaaaaaacctacaatttcaaactttctttgctcgtttttcggaacaaacagtgtgagtcgaggcctacgagtttcattttatgccctacaaatttctgttttatacctaatttaaaaatttagcatttccaccactcgcgctcttttcctcaactcgccgctgccgctgtgaacaatgggtcaacgcctccgccgccgccactcgcagcgccggtgccacagcgaccgcctcgccatttcttccaaaaatatgtctttaggggttatttgggccgctgatcacgaatacgtgatcagattttacttttaacatcgtcaagacctcagaatccctgtgtgattggggattctgaggcatcattttgaggggggggggcaggttcgaatccggacggtgtaacattatttttttgtgcatttttacgttattttcaatgattttaattaatttaaaatattttgtgttttattcgttaataatttataaatgttttacatttaaaatagttatatatatatttctttttaaattaaattagtaccaatttcttgaaaatttcaaacaaaatgacaaaaatcttctgattaagaattttttttttggatttttcgaatccggaattggtcgaaatagattcagaatgcgggggggagaaatttaatacatccaccaaaacaaaatagtaataaatcgaaatttttgccgaggtttcaaaaaaaaacttgcatcgcttcttccaaaaacatgtcattagtggttatttgggccgctgatcacgaatacgtgatcagatttcaattgttacatcgttaagccctcagaatccctgtgtgattggggattctgagtcatcttctggggggggcggcaggttcgaacccggccggtgtagattatttttctgtgcattttttgattacttttgcatgtttaatttcatttcaaattaaataaatataatattattaattttcattttaataaatataaatagttttgtttaatccataaaaaataaaaatttttaatttaaattaaattatttttttgtgaaaaatgttttaaattaaaataataatttatttacttttattaaagaactcctgtattttttaaattagaatttgtaatattaatttcttaatttcaatttaaataaatattcaatccctgtacatttcaaactctctttttaattaataaaaggaaatttatttaatttttaaaaatttattaattacattcaatttttaatcttactttttaataaacgatttccttaattatttaattttaaaaccatgattgtaccctttttaaccattattgtaccattccaacaatttttgtacctctccaacaattattgtaccttttcgacagtggttgtacctcttctaatcgctgttgtacctcttctaatcactgttgtaccacttctaaccactgttgtaccacttctaatcactgttgtacctcttctaatcactcttcaatcgctgttgaacctcttctaatcactcttctaatcgctgttgtacctcttctaatcactgttgtaccacttctaatcactgttgtacctcttctaatcactcttcaatcgctgttgtacctcttctaatcactgttgtaccacttctaatcactcttctaatcgcttttgtacctcttctaatcactgttgtaccacttctaatcactgttgaacctcttctaatcactcttctaatcgctgttgtacctcttctaatcactgttgtacctcttctaatcactcttctaatcgcttttgtacctaatcactgttgtaccacttctaatcactcttctaatcgctgttgtacctcttctaatcactgttgtaccacttctaatcactgttgaacctcttctaatcactcttctaatcgctgttgtacctcttctaatcactgttgtacctcttctaatcactcttctaatcgctgntgtacctcaaaatttaaaaa

SEQ ID NO: 6358 - DNA, 994 bp, Heterodera glycines
accaattaagtaggaaattcgcctaaggctattagtgaatgccattgtgaaaagaatgctaatgatttatatgcaacagcacaaattgagtattttttaaatattttcgggattaaattggaaacaatggcacccaatttttgcacaaaaagagaaatacttccttgtgaaacaaaaaagaaaggattaaaagatttaatgaaaataaatggcatttctgtttcgagaaaggagagaaagattaagctcgagagtgacgggaatttcgtcttttgagacggaaattgaaaaacgaaaaacgaagttatgaagaccacttgccgaggtgaaaacattcattaatttttgaaaataacaatgaatccaattaaaatatacaaaattgttgttagccatttaaaatggaatcaaaaaagcgtaaaatttaaatgaacgacagacaaaagaaaaaaaaaagagtgtaattgttacgaaaaagaacaattgattgagtgttttgttgccttcggcgctattaaaacaaactttatccctgggtgaaaaaagcattttgaatttggttgggatttaaattgttgcaacgatttgggtcgggatcgaatgtcgggaattgggaccggagaaagattaaaaactgaaagatattcccactaaaaagttgatgggccggtgcaacgtggaccggagtcctaaaaagtcgagattccgtgggtcggaaccaagatcaagcttactgaagagcgggtccgagtgtttgtggcgtacgataataccccatagcttttggagattatgggaacaaatcgttttttatgccatggggtaataatttcaactgcttttcctgttttaaatggtctgtaaatgggctttttgctttgtcatgattgatgacggacggacgcggaatggcggcacttttgcccggagagggggtactacaaacttccgacaatccaaggcgtagcgccaaacctggggttttcgggggggg

SEQ ID NO: 6359 - DNA, 2119 bp, Heterodera glycines
ttttaagtgtatgttgttgggcaggccatcgtcgggttgtgttatccccgtgtcccttcccatacggcggaggggagggaaaatgtgaaatttgagaagcaatcgccgcttctccccgaccccccccccccccgagggcaaatagcacttttcacaatgacttggccatttcccctgtccccatgtcccatcattcattcatttgatgagttatgtaactgaggggggggggggcagaaaaaagcagattttgacaaaatgtgacaggaaattgttaacttctttccccgggacatcatgatttatttgttgaaaattgccttagtgcggctaaatgcaatttttttgttaaaaaattattattttttttatttttgccataaatattgaatttcaaattgttaaaattgccttagggattaaaatgggcaaatgtcaaaaaattggatttttttagtttcactttataaataaataaatgatacaaagaaaaagattagatttctcacaatcagtgaaacaaataacactaagtttaaaaaaggaattgctattaaatttattttaatatttatgactgttgcggtatttttttaaattgttaccttaaagcttaaaatagaatttataaaaaaattaaatcgccccagggattcttaacatattaactttaaaatatgcattttacaattttaggtacaaaaatttcgaaaaaattttccaaaaggtcaaaaatgcgccatcgccgctcaagaagcatttgcagatcaaaaagggattattacaacccccgggggggggggcttaaaaatggggtcgtcgttcattcgttcaaaaaaatgcagtcataatttttggcgttccgccacaccactttttgtgatggattgataatcccagagcagcagaagcagacgggcccctaaatttcttcttttttgtgcccgcccttgcccatcactcattttgttgcccccggcttatgcccccgggggcgggggattatttagtggcctctgggcaaggacacacgccgctttaaaaagagagagagaggccaataatgccggtttgggtggcattggccagccgcggaagaagcgaggctaaaaatcgaaaattaggaaaagcttaagctaccgagaatgtgttaactcttcagttaaattagctgaaaataaattgtcccccaattcagtcccggggggggggggaaagatttgtttgcgcagacaaaaaatataaataacaacagccagaatttaaattgcgcaaagcttcaaatgtccaagactttttgaagtagcttcttaaaaaaataaagcttaagctgctaaaaatagaaaaaaatatatatttataaaaataaaatggagggaaaaaagttgcggcatttcgttgacaaacaaagggggtggagctcatcagttgtaggaaaagttagaacggggacccatttgtgtggttaggtccgtagtcagggggggggggatttctagaaaaatggagcaaattttttttgaaaattttaagcaattttcttaataacgaaaaattttcccggcgcggacccccactttaccatattttttgaaaatttgactccaaaatggccaaaattagggctacaaattcctgctttttcacctcgggtctaattttttggcccgaagagcaaaaaaaaaagtcttcggatttacctctccgaaattttggtggagaagaaatttgcccgaaaaaaagaagcaaaaatagaaaagcggtaacttcaaggtaccctatttaatttcaatccgatcgtttttatggggtttaaaatgggtcccgcgatgattctcgccaactcaatttcagtttaagcccctcggggaatgggatgggtcaaaaatgagtgtgtgccaccccggcaccccctctcaaatatgggggagattaatgggctgttgggcaatgactgacgacgatgagtggggcgtgttccgtttccgttgctcttcgtcgagagtctcgagagagagagagaaagccccgggggacgacttacgtataaaaaataggggggagggtaaaggaaattgagctatgagcagaagcatgatgagaagcggggagggggggg

SEQ ID NO: 6360 - DNA, 2139 bp, Heterodera glycines
aaaatttgtctctcggcggaaaaaaaaagctaatacatttttagcccgggaaattctcatttttaatgccattattcacactaggaatcactagtttgatttttcgccactaaaataatcatgccactatttttggcatttcgtcactgttttttccactattttggattatttgagaaattttttaaaaatgaaaaaaagcaccgaagaattgaataccgtaaaattcataaaatgtgtcttagaatgccgatgcaatccttaagaatttaacgatttgtttcgaaaaatccggcatgaaatgtgcacaattttgtcaattctctctactgaatactgaatgtactgatgtcgctcccaatttttcccatttttcaaatgcctttctcatttcttgctactttgagaaaaatttccaaacagaaatttacaaaaaaaaaaaattcttcggaaatttttagtaagaaaatttcaagtaaaatttttgtttttgaaaattttcaacgatttttggaaaattttttgaaaaaacttagtagttcacctgaaatttttgaagaaatagctaaatttcaaaaaaaacatttttcttgaaaatttcttactaaaatttcttaagaatttttgtaaatttttaatttttcgggggggggggggaatgacctgctcccgcacttttgcaacttgcatcagtgaatgatttgcatttcttttgacatttttcttaaaaaacaaggacttaaaaaatttcatcattataataatttttcgccatttgccactatgttggcatttttttttgcatagaaaaagaaaagaattaaattaatttttgaataaattaaattatttttttaatttagcaattattaatgaaatgaaaaaagcaaagaacaaatttttgtcagcgcgcgctccaaaagcagtgaaaaaaagaccaaattatgcaaatttatcaattctaattaagcagagagggagagggatatatcaatgttaattttgacgtcgtttgttcttctcagctgtaattgtttcatttagcaattagctattaattgaccccatcttcatatttatggcaaaaaggtttcgggtgcaaggaattttttttttaaatgataatggaaaaatgtggctttttaagagccaagtttttttttgtttgttttatttcaagactaagcagtgtttttcctaagaatatcatgttaggattggggttacacgggcccgggtgtttggacaaaaaccgggtcaggtctttaaaaagccgggtatcagggtctggactcggtcgagcacccggacacgtgtaactctagttaggacactgagaaaattatggctgggtccgcgacctgtctgacaatgagctctaataatggctcattcaaaatccgttaaaacgccaattaaaaagacccattatcgcttcgcccaatccgcgtcagagtctggcgccgatttggcaacaatcatacaaaaatgataacaaaatgataaaacattgtccaatgatgcacaaatttgtttgtgcggcaatttgtgccggatggaatttttgccgccggcgtccgcccgcctggcgccactgtgccattgacgtaaaataaatttttcgcgcaataatttgcaccagtcatctacaactggcagaaaatgtgctagttgcttatccgatgatacgatgaacatagaagggatggaggagggggagaggatgtcacttaagcgcccgtcggtacccattaagccgcgccaaagcgaaaatttttatatgtgccatagtttgaatggaactattttgcaaaataaatgatgaatggcatttggaaaaatttagggtggcgccgtctcagttcctttttaagctggcgaaaagttcactatgaacaacagaggaagtaaaaatgtcgggaaaggagggattaatgagcattggattaagcaatcggtgccaagttcttaaaaagtaacaaacaaaactttgatggcctggccaggcccagaacgctcggaaaaaggaagctgaaaatgccgggaaagggattaatgactctggattattcggcccggcctaccgctagcacttttatggcaaagccctgccttatcgaataaaattcagactgagtg

SEQ ID NO: 6361 - DNA, 1169 bp, Heterodera glycines
gggggggggggctaaatggattgcatttccaaaaatgtatattacctaatgtaatgaaaaagggacaaaaactcaattaaattgtgggaaaatggtgtatgactattgtctgatgcgagtgacgacatttgacatcaaccatcaagcagtaaagtagcaaattttttggaaaaagaggaggaagaaatttgatgaaaaaatttatggcactgctaatttgggcaccccacataattacattgcgacataaaaagaaaccgcccgcacagaagagtcaatggcaactcgtacaatgaatttttttacaaaataaagcctaagcctatgcccaagcaagcctaggcctaaagcttaggcttaacctagtaacctaggcctatgtacgagttgccttttgtacaagttgtcatgacaccgcacagaaatggcatttttatggacagtttggcggcgacgcacatttttgagtgccaataaatatcttttttagacaattaggcatattttgttaaattggatgcctttttatcctaagaaaacctaatgaaagtttgctgccgcctgtccatccgtttgctaaacaaaattggcacattgtgtgccatcaactgtaatttctacaaagttttagcggcatcagcaaaagggtgagaagccaagtaggggaagacaaatggggaaatgtgtcaaattaaaaagagcaaaatgccatcaattaattcagatgtgccgtgccaacaacggcacacgtcttccctgcctcaaggggctgaaatacaattttcacaaaagtgaaagggcaaaagtgcaaatgtgtaaaagaagtgactaaatttggcatttcacttctcacaacaaaatgagatgaagcctgtcaaaaaagggctaacacgtgttttaattaaatgattattagccatcaaaatacaggcacaattaattatttcccctaaggcagaaatattacgaaaaacaaaaattctgtgccacccgcgaagcccatatgttcacgggattattaaatcgcacaatgtacgaggaaagcttggtttttcagttactaatataaaccatttctcaaatatcccaaattttaaaagggattaattaatgaaaattcaatgcagaaaatcagtcgagattaaggaattcagccgtacggtgtagga

SEQ ID NO: 6362 - DNA, 1708 bp, Heterodera glycines
  unsure (1)..(1708): unsure at all n locations
tatgccagacattagtgtggtttatgtcagtcaaccacattagtgtgttctgtgactttgtgtgacacaataatgcgtgtcaatttttttgataaaacaatagtgtcacacagaagtgaaattagtcaaagttttttaaaatgtattgttatgtgatgacactattgtgcctttcatccataagacacaaaagtgaaatttgtcaaagctttttaaattgtattgctttgagatgacactattgtgcatctcatgttttagagataacgcatgagttgaatatgtcaaaagaatcgtttgtattgtattgttatgagatgacactattgtgcctctccgcgaagcggccgagccctccccaacggttcaacatccaaaggcacacaaaaagaaaaatactgaataaatttgctgaagttgaatcccagtgattggaatgccgtaaggttgagtcttgagtcccggtcattggaatgtcatataattgagtcccagtgattgggatgcctggggttgagtccaggtgatggaaatgcagaagaattggttagataagtccaagtaaatggaatgccggagaattgagttacggcgataataccagagaattgggtctgtaatggtaatgaattaagtgtccctgtgatgcagaattgttgaaataagtcccagtgattggaatgccgagcgtgtttaacaaatgacaagaaacaaaaagatcagtaaaatgttaaaattttgtgccaaagaaattgccaagagacgggtgcgaggccgcgaagcggccaagccataatagtcatttttatcattcataatacaacacaatcgtactgcctagcgggggatgcgccgaaggcgctaccccgctagttgagacaaaaattcaaatctttttggaacttggaggcaaaaactgaaacggtgtgtaaattaagtaattagaaaataatttgaatctttaaattcttaaaaataaataattagaactaatttgaatctgaatttaaaaacaaataaaaattcagtccgccgagagtgccacatcatattcaatgattgaggacattggcattgccactgtcacattgggaccatgggacaaagacattttggaaatgtttttgcaagagcatttttttaacaaattaattttcgacacgcaaaaaggcaagtttcactgttgtagaatggattatttgttcttattaatttaatttaataatatgggcaaacaaaaaaaaatgaataaatttataaaaaatgggcaaaaagtttttaaaaataaataaaaaataaaaatgcgaaaatgacattagcatcagcgagaaaaaacaggatacaggttaatttatataattttcttttatttttgctcacagtcaaataaatttgtgtgtcgataaggccccaaaaatttaaaaaagttatttctttccaaaaattgaaaattacctataaaaattaaaaaatataaagatagttagcccagttaaattttctattaatccgcccagaaaaaataaaatagttggcctacataaaaaaattgatttttgccagctcaaaaataataaattttgtgccccacctaaaaaaatataaaatattagttcatcctcctanagaaataaaaatttatggcaaattaagaatttatttcccacacatgctttaggcgtgccttactgggaaatgacgatgaaat

SEQ ID NO: 6363 - DNA, 2928 bp, Heterodera glycines
  unsure (1)..(2928): unsure at all n locations
ctcacacccgatacagaaaaattgtgtatgcgattaaacgcttcacaaaaaaattagaaaaatatttttaaaaggcaatttaaaaaaagctaatcgaaaccgttaagtgagtgtttaaatagaaatttaaaaaaagaataaaaataaagctttcaaatttaattttacagagtcaaaggaaaaatttaaccattttctttttagcatttgataattaatttaattgtttttttgatttcctatgatatgatgtgtataatatttcataaaattgccctctacggtaaggggtaaagaatatttctttctctacttttttcggctcagcatgaggcaggaattttcattataaataggtatatatctaaaaaattatagccaattaaaaaagaataaagataaatgactagatgaaattttaaaaatttacgagaaaaatcaatattggaaattaattttcactcatgttccctatccaatgatagatttatcgattaattttcaactagtctaatactcgcattgattactataactatttgatttagcttataaaaaagatgaagcaaaggaagatataatatatgattataaatggttaaaataaaatccgcgcgggtatggcggtgcgcgctgacatcctcttttatgaattgctccctttaatcgaagacaaaagaaattgattggaaaattaaatgacaaaaataaatttaaagacccgaaaattaatgcaaaattaagtattataaatatattcgaaaattttagaaatttagaagaaaaaaatttaaacattgcaaaaaaatcaatattattttagaaattacattatccattcttgtgtattccatttaaatatgaaaaatggataaaaaagatgaagcaaaggaagatataattaatattgtaataagtagggctgaggatctttaagcgcgaaaaagtccaaaacaaggccttaaataagtgcgaaaatatcgcgaaataagtgcgaaaatatgcatgaaaacattccaaatttaggggaattttttaaattgctttttttatatgaaaataatttcaaattaaggctaaaaattttatccnttattgcaggtactaatagggtacatttcagattttcgggattaaatggtcgattcttcggaccggctcagttcggccccagcatgtttttgcattataacttttttctttgtcaaccaaattcaacattcttggtatcattcgaaagctctttacatactctattagccttacaaaaagcaaaaattttcaaacctggaaaaaatttatgaagaaaaaaatttcaaaaaaaaaattgattttttcagttttcatgttataacttttttgaaatttgtctgtttgccaagcaatagcttagaaaagcttctaaacacattaagctttgaatgatatcaagattgttggatttggttgacaaagaaaaaagttatagtcaaaaaatttgctggggccgaactgtttgcaatgtaattcagccaaccttgggtatttttggcaaaaacaattgttgcaactttattttaaaccaacaaatataaataattttacttagtttttcaaaagttctagccaaaaaacgggaaaaattgtcataacttttgaaaaacaataaaattttttgaaatttagcaggctgataaagcaattcaagggctatcatatgatatcaagattgtacaatatcggttgcgtctaagaaaatttatgagcagatttagtcaaaatttagcaaatttgcacttttttccttcgacccaccacgatgcgactctctcaaactaataaagagagctttctttcccctaaagatgtgattgaaagaactgcaagtgggttccctgtgtagctcagtggttatagcatccccgatgggttcgaatcccaccgcaggctgtctcatgtttccaaaaacatttgaaatataattctgtttttggacaaccttaattaaatgtttattcaataaattttggcttcaccaattgaggcaattgtttcgataccttcggattatatataaatataatgtatttatatattattgtataaattcaatcttataggggccgttcatggaaatatggatataaatcgcgaaatatggaaaaatatggaaaatatggatatagaaacccatcctaggagcttcaaaccaagctaaaaacatgtttttcgtgcgtttcaggcctcccaaagtccaggaaaaaaaatatggatttccatataatttcatgccatagtcatcatattcttcttccaaatgtcttttgacccaatccaattaataaaatgtgcatattttgaagtacagtatagtaagtacaatcatattatttggtaaatattacagaaggaaatgcttaaggagtttttggaatttcgaaaaaaaagattttttttgaaaaaagtgataaaatttaaaaaaatggaaattttggttttttacacataaaaaaattatttttatctacaaaataacgcaacatcgacaaattccgcgacgcgcgggcggaggcggtggcggtggtgtggcgggcgcaaaatatgcatgaactccatgctttgcagaaaaattttatagaaagcgtcgctggtatgcggccccaactgaaagtgttgtttgaaatgttataaattctgactttctgatgtaattctcgaccaatttacaacaaaagccttacctacctactgtaacaaaattaaattaaaagtcaaatataatagtctagctttctgaaaatgataaataaaacaggtcaaatcctcagaatattaagcaagacccagcgagggtcttgcgccattcgttgaagaatatatnaatatttttcatgccttgatgcttttattattctcaatttattagtgcaaagttttcatgcgattttt

SEQ ID NO: 6364 - DNA, 2668 bp, Heterodera glycines
ttggtataattcttatggtaatttgaatctaaaattattgaatgagcaaaaattgaattataatttaaaattggaaattgaacaaaaaatgtcaattaatgaaacaattttgcaattggcaattgacacagcgaatgaatatccgaaaaaggaaactttagacggaataattcgacataaatttgaaaagaaattgaaggatttgtttaaaaaggcagaagaaaaggcaaaaaaagataatccacggagagccaatgagataaatgatgacataaataaaatacttttgggttcaaaattcaatgactcatatacatgggtaagcaaaaattatattattatttttaattaaaattaaatttagttatctgacgccttactttcggtctttgtgaaaggaaatgtgacgaagtttaacaaattccttaagcgactaaaacactaccaagcggcagcattttaccaagatgaaagtgatctttgcattgggtatgagaattggcaatgtgacaaaatcggggagaaatttgaaggatatgaacagacagaaacccaaaaatataataaatatttggacataatattcgaatatttattcagacttaatgtccaaggtttgacaaaattattagggtttgaaattttattttaagaaaaagagtaaaatatgtacacaataaatttgtaaaagaaacaacaacagaattctcgaaatatagaagaaacatgtattcaaaaaggcctaatttgcatattttatgctatttattttttaaaaagatagcaattatttaagattatataaaaaaaaatttgttgaatttctcaaaaaccataaaatatattagaaaaatggaaacatatacgaatcgtttagaaaccagtcaaaaagtccctaattattagaaatttttgattttgaataataaagatttgctttttgaaggtaaaaacgctgaattggcatatcatttgccagcagtgaagccaatatttatgacagatgatggaaacgtttctttaattcaatttatccgaagccttaatgagaagttgaagtataaaagtgtagacaaattggatttggattatcaccctcgggtgaatatttatttgttaaatgaattggatttgaattatgcaattaaagaggatgaaaaaaagaaagaaaagccattaaaaaatgcattggacacaaaaattgccaaaatccgtgaagaatttgaaggaaaaatgaaaaatctttgtgataatgtcaaggaaagaacatcagaagaaagggaaaaatttgtagaagcattctattttggcactttcgattcgtcgccattttcataaaaattctctttttcattcaatgtttttcttatactttcctattcttttcccactctttatgcttctgtcttttttcttttttcaactattttatgtgggctaatttttgagtaagtaaaattttcattgctaacaaaagtagtgagtgatttgtcgaaaattataaaaagccacatggacaacaatttagttgaattccaaatccaaaaaaaagatagaacatctttgccccgttgtaaaagctcgcgtaatttcttcagttcatcccagttatttcccttcaaaaacattggcactagcatctcccgggccatttggtcccttctacaaacgcaaattgattttctcggatcggcagacttttcaagtgcttcgatttgcaaataagtgatcgattgatgatacagaatgtctctcgcagagacaataatcaaaatcgaaaaatgcttttcaaaattccacaaagtgctgacaattaacggttttaatgcgtttttgaatggatttttttcacattggaagtgttgaaatttccatcttttcccctcttctcgctcacgaaaattttccgtttttgttaaactctgagaaatttcctatcgctttttttctttttgtctccaacgactttgttccataaaatgaattaactgatcaggaagaatgaaagatttcgataataataatgagaagaaatgaaataaaatttaaattgaaaaatcattaaatgtatatttgtttaaaaaaatatttcctccgtctcttctgttttggcccttcaattctttcggcattttatgtcatctcggcactttctttcgcactgctgatcagagttagtcggtcgcggacgccgacagactggggccatcatctaaaaccgatacatagcaattcaaacggttctggcgttttgacgacatttagtggaggttccgtcttttgtatgagtcaagatccggcagatttggtgaattttagtgcaatctttgagcagatttggctgcaaatactgtcacacaaataatgcagtccatcgagcagcatgtatttgtgacatgtttctttaaattctgtgcatgttttggattatttggaaaattttcttcaaaaccaatttaaaaaaatttggttaaaatgttgcaaaaaatttgtgataaaaagctttatgaaaattttaatattttagattcttgctatgaacttttttatttcaaatatcttgggtaaagaattttgtgctctttccaatgggcaataattttttcgtaaaagatttccctacccccaaggaatttttttcaaaaatattcctaaattttttgactct

SEQ ID NO: 6365 - DNA, 990 bp, Heterodera glycines
atgaaaaatgggggacgaattttaaaaatgctaaattttttatcattttacatttacttatgctttttccaatttttcctcttcttcttaggcattttcttttgcattttcggcaatttcacccattttttgctcaaattgttcccaaatactttgaatgtccgttggtccgttcaattgtttatttttatcgaaccaatttttctcctctttaatttcgtaattcaattcctcttcatttaccaaattgatactccaaatatagactttttcctctttttcccaaaaatattttgaaattgcattcagccatctcacaatatcgattaaacaataaggactactatttccatacataaatattggcttcaccaatggtgacaattgtttcgacaccttcggatctttagcttaataaattattattattattattaccattttaataaatccaaacaaaccttcagcatacaatcggaataaatattcgtacaaaatgtccaaatattttcgatatttttggcattcttcttcaaattccttcccaattttatcacaatgccaattctctttcatctgatacataatgccaagatgggctttatatttttgtgtcaaatgcattttcattttctcaatttcgtataacccaaaagatatcattgtgttttcatcagagaaaatataatatcctttctctttctttagacgtaaataattcgaatattcttttgccattttaaaaaatttctttgaatttgtcgttaatcctttgacaaattccgaaaagaaagcatcttcagtctaaattttgaatttattaaattttcattgaatgttaattctcacccatgtcaattgatcatcgaatttcgatcccacaattatcctatgcttgtcatcatttattttggcactccaataaccgtattcttttgccctttcttccgcttttttgtacatttcctccaatttattgtcaaaattttg

SEQ ID NO: 6366 - DNA, 4220 bp, Heterodera glycines
atgcgcgcacggttgaagagctgtcgccgtccacaaaattgttggcgctgttgctgctgctgctgccgctattgttgctgctgctctcgtgcagcctcttccgaccccgggaggggatgcggttttcgcccgccgttgttgccaccaccaccattgttactgttgttgtccatatttgttgtcgacacactttttgctgttgatgaacaaattgcgttgaagtgaactgcttaaaatgtgaggaaataaataattgaacatttattaataaagtgcacaaaaattgaaggaaaatgaatgaatgatcagagggggtgaaagatggaacagaacggggttgagggggcgggggtgtctaagaatttcttatccgtttcctaatctactccttccatccacgacctttattcgaattcatgcctgccatccgttttctcatctagtctatagaatcttttgtagtcccaaacactggggctaaaatttgtagacaaaaaaaaattcttgaatatactcaaaaaggatgcgtttcgtgttttctcgttgtcgtttttttcttaatgtcactatttgctattttcttgtcttaatgattctagggacttttagcttttgtttgatacaaaggttctgcattctttgtatcaatttaaagcttaaagcatcagtctcggtgaaatgaatgcccagttacatatcttacatatctccaacacaaaatcttatgtacaataatttttcctgattttttttcacaaagtaaattaaatttgaatttacgcattgcttaattatttattggcattgtattttcttcaaatattttttgtagagaccgtaatattcaatcagccggacggtgccaggaaatttcgacagtggctgatttcgacagtggctgatttcgacagtgaccgatttcgacagtgaactattttcatttattttactgttttccgacatttccgacagtggctgattacgacagtgaccgatttcgacaatgaacaaaattatatttgtgtattagtcatttttatttaaaaaagtcactatttaatgggtgaaatttatatatgatgtagtaaaataaagcatttttcttttattttcaatgaggtaaaactcagttgtactgtactttggccgtaggccgttgatagtggaagggccggtcgttcactttatattgggaggtcaattttcttggaggtcaatttgataagagaattttgagaggaattgttttggtgttcccgaatgctgatggtcattctcgacttgtcattgctggtgttcatcatttgctgttccctctattcgtttttttccgaattcattgaccaatggctctactccgattcgcagagaccaaaacaaatcgtgggaaaattcttctatctcgtagcggatatgactacactttcgaggttaaaaggctaatttaatttcgtgaaaatgttaaacgaaaaattctaaggctgtttcgaaaactgaagacggaatggagtattggtgttgcccaaaccgtccaccttattgcccagggcgtgcttgtgtacaaggccgttgggaagtcgatgccgatgggtcgcgatataaaattggacgcactaccggacagcataaccatccacccgttttggggggtcatatggtagaaatttaaaatgtaacgggtgttaagtagctaattaggtgagacaagcatctgaacgtctccgacaagaggcgcaaagcgaattcccgaccacaagccgtaacatcatcagagaagttcggtcgaaccttagtgatgagattcgggcaatcagtgcaccctctgcagctgatatgaggcgaacatataattatcagaaacggaatcatcaggaagaggcaaatgataattagataattaaaaatataaatttaataagcaaaaataattttaaaaataaatggttaggtcggcgatgttggattggatatcttacccgcatctcaaatcatcataccggacagattgcgtgatcgtacgatttatgatcaaactgttaatggagaaaaaatgatcattttttgttcttgttttggccttgatcttttggcgaattatcagaatgaagtggcaatcgatggcacttttgaggtgaataactaaagggcacttttagctgatagtggcgagaggcatataaaatgtgccgctaccaatataccacaaaataagtaaaattgtttttatcttagacatgcccaaggggatttactcaagtctacacactggcagttgtcatcgatcattgtgcagttccggcagtttatggtttactgcccagcaaaactctcgccacatacacaagattcttcgaaacaattcgtcagtctgttggcaataattggttcccgtaccgtattatgagcgatttcgaatcgggagcgatcactgcagctggcaacgtctttccaaattccataagaaccggatgcttgtttcactttggacaagcaatttggcgaagaattcagcgattgccaaatttgctcacgcgatatcgtgacgatgaagttgtcagaacatccttgcggtctctacaagcgctggcttttgtccccgtcgactttgtctacaactatttttgcattgccatgtcaattcttgagccgactcctgagcttcaagagctgatcatctatttcattaacacgtggatcgggcctcgccgaatcatgcaaaatgaagaagttttggttcacgatgcaggcggagtagctgataattggattcgagggagaattgaggcgcttaatttggcacagactgacgctctttttccaattgaattgtggaatgtggtggacagagtagcagaagggcttggaagaacaaacaattcgcttgaagtgtggtgggatgtgaccattttttcatgtcttttcttcagggttggcattcaacttggaatgtgcaccttagggggaaccaacgaccgagttcatttgctcggaaaatgatcgaggaagatgaactgtggagaattcgggttgcagattatcagattgcaccggctgacggcattaaagggcctcatgaaacgagaaaggccaaatacattcgtcaagaccaaaacttggaagcacttgtgcaggattttttcaatcgtgatccgatccaatttcttcgcgcttgcgcttatcatctgcacttttaaacatttataggattttagcattgtcgttttacacaattttgtcgttattttcgatatcaatttgaagttttcaaatgttagaattggcaaagttaaaattttgttcattgtcgaaatcggtcactgtcgtaatcagccactgtcggaaatgtcggaaaacagtaaaataaatgaaaatagttcactgtcgaaatcggtcactgtcgaaatcagccactgtcgaaatccactgtcgaaatcggtcactgtcgaaatcagccactgtcgaaatgttacagcaccgcatatctttcctcgtatttctgggatttttttcagaatgtggtcatagaataggtgggttgaattatttgtattttttatgagtattatgtaaggatattttcgacaaaacataaccaattccgagtttcatgaggcatcaacttcattcttttcttgtcctgcccaattgtctcaaatgtatacctaaaaatgcgctaaaaatgatcaaacccgtttttagccgaatatcctgtcaatatttccctattagaaacgatactgtgaattctttcgcctctttaattcattcgtgctttgcttcggattagtctaaaaatttctggacgccaattttacatattagccattttttattttatttgtgaccgcaaatttttacatactagccattttttattttgttgtgaccaagcatatctttcctcgtatttctgggatttttttcagaatgtggtcatagaatagatgggttgaattatttgtatttttttatgagtattatgtaaggatattttcgacaaaacataaccaattccgagtttcatgaggcatcaacttcattcttttcttgtcctgcccaattgtctcaaatgtatacctaaaaatgcgctaaaaatgatcaaacccgtttttagcggaatatcctgtcaatatttccctattagaaacgatactgtgaattctttcgcctctttaattcattcgtgctttgcttcggattagtctaaaaatttctggacg

SEQ ID NO: 6367 - DNA, 1507 bp, Heterodera glycines
acatttacattattaaaaaaaatttttttcttttggcctgttcattggctttatccgatggaatttttagaccctgatttacgcttttaaattaataaattaggaacaacaatttaaatcccatgaacacacctctaaaatcgtattttactttaaaagaataattttctaaaattctttttgttatatatttataaaattgcattatttattatttggcttataaaaatttaaataaatgaataaattacaaaattagtgcgagttttttccttgtcttcagagatgacatcatctcttattgaattttatgcccatattcataaaacatatatattttgctatgcatttttaagccctcgtcactaattaattccttttttcgtcatgaattcattacctttttatttttatttatttaagattattaattgtcattttaatgctaccactcattacacaacatcaaaaacaaattccattgtcttcgatcagtcgcggcacaactgtacagtttggcaatggaaaaagtaatcaaagaaccggacaatgctcaaagtgaacattttatgaaacaataatattaatcaaattaaaaaaacattccgtatcattttttaaatgttaaaatttttcccttttccaaaagaatttttgccttttggctattttcagttttttatgcattttttccattttggtgccctttcatctttttttaattttagtaccttttaggcgattttttgccaccaaatactattctagatgaggtcaaaaaaagacccaaggaagcggagtttatggaatgttcgacatttaacagtgggagaaaatgtccatattacggttttttaagcgaattgcttaccaccagcaactgctgctgttgtaagccatcgctgcagcgaagaagcggatgagcacgtgaaaaggccgatgaagtaacaaaatttataatttttgttgggtttttcttgaattttacaataaaataattgattttttatttcacctgaattaatcattgaaaagtgtgcccatttgtcagtgcctttatggtgtggtcgcgcgggaagcgaaagcgaatggcggcggacaatccgaaaatgcacaattcgaccatctccaaacagttgggccacgagtggaagctgttggacgaagctgacaagcgtccgttcattgacgaggcgaagcgcctgcgacaactgcatatgtgaggaatttgcattttttatttatatattttttcaataatttaaaatttaatttggaaaattatcaatgacatgaatatgattggaattgctttcatccaaaatgtgggcaagaatttctttgtctaaataaagtccgacgagaaattctctgattttttggctcttgagtctcgagcttaattctcgcgttgcaaaatgttcgcctctcaagtaccattgcatagaatctgttgcgagaaaagggatcggttccgttcggccttttctatcttaatggctttttt

SEQ ID NO: 6368 - DNA, 5242 bp, Heterodera glycines
  unsure (1)..(5242): unsure at all n locations
cctcagctgcgggtaaatcaatgagtatcgggtaaaattcatttagtacgggttaacctgcagctgcgggtaggtttatcgggtaaagttacctcgttcttttggtacgggcccagaagtttttcctgctttttcggtaaatatttgtgcattttctgtaaaataaataattcaggtgcatcgtcccccccgaaaatttttttaaaagtttccaaatagtaatttttcaaaaaaattttcttataatctatgttcggttagaaatttttttttatttttcggggtggggggacgacctgcttcaaagataattctgtccctaattaatatttggttttccatattattaaagagcaacttaaaatagctgtttgattcagacaacagtatcccaactacaaataccggccaaaacggaaatacaaagcgcagtactgtagcagctacacatcggcgggaataaagcaaaagcaacaacaacagcattgttttggaggtgttcagcagcaacaaatgaattatgcagtaacatcaacaaattgtgacgacatttcaaaacagcggcagcagcaacgacaaattggcacggcaattggcgttggcatcggtgggggagacagcggaccaacaaacggtaacacagttggagaatactgtagtgaaaattgaaaaaatcagagaacatttgaagcgaagaatggggagggggctttaaaggagggaaaagaaagtgttttatccgctaaattaaaatttccatattttctcaatagtataaattgcccttatttcctcctaactcaaatttgctatgattctttattttcccattttaattaagccgaattgttgcactttccgccgtttgcatcggatgcgcaaaatttcatcgcactaatggcctcatcactgactccaaacccactaattacggtatattaaataacttagcccaaatatctgagtcaaaagatatttcttgttgaaagggcgtacttgaaaactagaaaatcacataaccctaaacaatgggagcctatttcaaagggtttaaggacataactttaaagaattcacgcggaagcttctgttctggtaagttgttgttccaactatgtccttgaaaataagacccaccccaattttctgggaattaaagtacatgttttcaagtacttatagcacccatgcagggctgcacgaaatttcgtgtcgttttcgtttcatcctacattttcggcactttttgagttcgttttcgattttaaaaattccatttttcgtctcgtgtttcgttttcgagttttaaaatttaaaattttcgtttcgttttcgtcagacggaattttgacgaaaaagacgaaaatatttacacccttaagaatgacttttttagtaaaaaaaataagtgatttcattgaactgttgtagtttagtcgtgcacacttcagatttttgttgtttttttatatgggttcgtcccatatgcccgcactctcgagctatcaaatttttttatatctggaatttttgtaattttttttgtcagcttgccccaacccattttgagtgtcatggaattgtaaaattgtttaattaatgaaaagcacaaacataatttaaaggaatcaacagttttaatggcacaaaagcagcaacaacaggcgcaaattggccaccaatttgatgagggcgcactgctcgaaaaggtgcaacgaatgatcagagaggaattgcgacgatttgatgccgaccgtactggcattgttgactatgcactcgaaagttcaggttcgacatattactggcaaagagggcatattgtgtaagagaaatctgttttttgttaaaaaaggggaaaaaatttaaattccaaattttgaaaattcaccgcgtcaaacttattggcgtttcacaaccaaaaaccacaatcagtagcaattttcttcaaaaaaaaaaattgtttttaataatagaaaaattgatagataaatcgaattagaggaaaacaataacatacctattcaggtggatcagttctctccacgcgttgcactgtccaatacaatgaacggtcgcgtgtccaaaaattgtttggcttcccactgtggtacaccggttattcgccaagaactgttatacaggtgcgctatttgcacaaatctcaaataaaaacttttcaatttattaaattgaaaaatttctcacaatatgccgagtttgagatgctatagcttctttcattgctgaccaaactcaatttagtggtcccttttttagatacgtccaaaaatcggtttaaaattaaatcccaaaattccattattttatattgaatcatcgagaaaatatataaataaatacccgacataggaaaaatatataaataaattaaataccaattaccgcttaagcgaaagggctatggcgcatcaactggcgaatgctgggcattctacggaggccatggctatttgaccattgggctgtcgcaagtaaaaaattttttttttttttgattcgtcccataaatttttgtaactttattagcgcatcaatgtgaccgcagtgtcttatgaacatttgccggttgaaatgtcgccggacaagcaaattcggagcgcaccgcgcaatttcctcgtttgggttagttgtttttttagtgtcgggattagatgatgttatttttaatttcccatctgactttcacccattataaataataaaaatgctaaaaaattacgaaatcgtaaataatttttaggtgttatttcccaatttcattaaaaaatacaaaattgaaaccataaaaaaattctttaaaggataaaaaaacaaaaaatttagggcaattatgaccctagtaattagagttaaaatttagagttaccaggacttggatgagctggacacccgacttttgcttggcaattttacttatgacgctgagaggggcgaaccattgcaaatgttcccagttcaggtaatttaatcaatgacttcgaatacaataattacaattaaaaaatgaatgcacaaattaagttacgcatcagatttttgacacagatttcaataaattttactttaatgtcagcaatgggacccacatggtacacaaattgttgagctggaaacgctggcaaattggggctcgcaagtcacatgtttgtaccggttcagagtgcacggagacaaaatgagggtgagtctggctgttaatttctttcccaagtcattaaaaatcatttttacgaaataacttctatggtaaaagctttataaaaatctaaataaccctaaaaatattttataatataaataaccctaaaaattatatgttttttccaacaaaaaatttttttttttaatttatgattatttatacaaacctaaaggaaattccggaagtggcatcggcagatgatttggcggcatttgactccgctaaacgatggcccgactcatcaaaacacaaagaaattggtggcggatgaacggactgacggacggacacaacgtcttcccgtggaagaagaactcaacataacaaaactcattatcagttttattaaaggatttttctttattttatttttccccaatttgtttatttaccatttaattactctatcccatttattattgttaaccaatttgacttctgttaagtcgcaattcactggttttctttgttatcattcatacatattaacctaaacacttatttaatcactgtagcaattaaaactttgttttgtttggagaacaaattttcctttccagcaatttggattactaaacaccacactgagtatagtctgtttttcccaagataattcgttttggttttttccctcatttcttggtgcaaagtttcgttgttttgatgacgctttctgcccctgctttttttgttttagctgctgcgcagcttaagtagtgattatatttatttatttgttctattttgagtttgcttttgcatgaccataactcaacaaaagggaaaaatggtggaggttcaaatccgcctcacgccaacatttttggatcaaaaaatttaaaaaatgacgcttattgaactttttgctagtagatgacatgaatttcggttttaataaaaaaaataataatatgccaaaatgagaggtgtatttttctctgcactctcttctttacgaaatacatttattattaatcatgataaaatgttattacccataattctctaatcaatttaaatggttgagtcattattagtcatttgattaatttttctatcttttgcaaatttacattttttctaacttgttaaatcattttaaaaagaaaaacccgacagaaatgttgccccacggctgtttcccattccgtgcctgtctcgactgtatccaagggccaagtctgacggccacacaaagttatgcgcagctgagagaagaaatgcgcactgtgcgacttgatcgcaaccacatgggtgtgttgtgcaagggaccgggaattttaggcaaaatcggtaccagaaaagccgggatcggtgcatgaattttcaatcgggaatttttccgtaaaaagaggggtgggtaccaggggtgtgacttgtctcagaaaagacgagagcgagagtttggcgagaggcgagagtccccaaaaagacgagagcgagagtttggcgagaggcgagagtccccaaaaacacgagagttggcgagaggacgagaggcgagagtttttcaattttttctgtagccttatttttaatttaaaaaacttcaaaatcgtatattaaattaggggtacgggcttgggtatttgggcaaataccgggtcagggtattgccgggtacagaaagccgggtcagagtcctagtttttaaaccgagtccaagtcatgaaaaatccaaacaaaaatctttaaaattttttcatgaaaattaaaaaatattttcatgaaatatatttattttagaaacaaactttattatttgtattttttccaccttttttttgcggtgcgtttttaaaacttcgggacagttggggggtccggggcgtggccggtaggcgccgccgaaaaaattttgaaaatgtcttcggatttgttaacagattttattcaaaaaatgaccaaaacttttttttaaaatttttttgtttttaagtcgctttttttttgtggcgctgttttttccaaaaaatttttttggaacatggngggggggggggggccccggcgggg

SEQ ID NO: 6369 - DNA, 2147 bp, Heterodera glycines
atccccttaaaaaggcgaataattaaagaaaatttcccattttcatggcgtcgcatttgaccatgttgagctgcacttctacaagggtggcgtgccgatttggactggtccgatcaaagcgtccgctgttggacttgttttctacccgtgtttgtgcattgatgagaattgtgttttggatatctgcttcagtgcggctaaatttagcccaaaagcgccattgggctatcaggagataatgtctgaacagacattgctttaatttttttggggcaaggacgatcccgggggcgggggaaaattcttaagaaaaaaaagcaaaaaatgatgaaagattttttttcctacgtttacctctccccaagccccaaaaactaaaccctagaaccatctctgtctgtggacaaaataaccagacaagttgccacaccgcctagcttaaaatgagaattaaagggaatttgtgggttaagttcgtttaaaaaatgccaaacttcatgcaaattgatttttttttaactcctttcattttttcaaaatggatttatatatattttataacaaaatagcataaggcttcttaaaaatttcagtatttttaatcaaataaatacaaattttacaaaaatccgcctgctttcaaaacagtgcgggttttgagtaaattccctatgctattaatgtattttgcttttttcaatcttttcatcatgaataccctacaccgttcgttattaaatgcataaaaattgtagaaatgtgaattaaatgctttttatttacacaaaatataatcaaattcacactaattttaaaataattaaaaataaaatcccgtattctcaaaagtacacaaaatcatcaatagaaaattagctaaggaattctttcatctcttcgtcaatgggttcattttttgagtttttaacatcgctttttgattcttttttgaaatccatttcagtccaaggtcgaggctcaactcgtaatgtcaaattgaacacagttgctccgacaacaagagacactgcggaatatttaaagattgaagaccactgaaatttaaaaaaagcatttaaatttatttgatttaattagtttcctttaaatttatttgatttaattagtttcctttaaatttatttgatttaataaacttcctttaaatttgtttgatttaattagtttcctatgttccacctcgatttgggaaatggattttgaaattgtgaagaaatttgtataaaaaaattaatccaaaaatagcctttttttgtaacaaaaaaaaagtttgtctatagatagaaccaaaacttttaaaatttcccaggcagcgctttcgtcacggatgaaaaaaaaaatgctaaaaaaacaatctaaatttgaccaaaattggtgccattttgtaacaaaaaaaattcgatagattgggataaaactttcaaattctcaggtttgcgcttatcatcacggcacaaacccatttttttaaactatttttttattagaaaaaacgctacttcatctacagtgttgtttggcgctgcccaactgataccaaacgggatgattctaaaaaacattaaaattaaattagacattgataaaacataaaaaaaaacatacaggaatatggtacttgtcaaaaaatattgtaaagaaaaaatcacatgggcaaattggcacgcgacctgatgaaaaaaacaaataattaaattctgagttaaaaaaatgaaaattagaattttatttgatattaattatgaaagcctaacaatttgagtgcattttgcagctccgatcagactaagtacgagactagcagtaatgccaacaaagcaaagctccatccatttcaaatttgtgatgccaaactttggcaacacagcaattattaagtagcaaagagcagccaaatacttaaagcaagcaaataaaaaagacaaatgaaagttcataaattataataaaaaaatattttcaagatattagttaataaaattattaaaaaatgttttgagattaatttaattaatgaaaaatttaattaataaaattgttaaaaatatttttgaatattacttgattaataaaaatttaaaaaatatatttttgaaggataatttaattataaaatttttttttat

SEQ ID NO: 6370 - DNA, 3226 bp, Heterodera glycines
ttcgaaacaatttacacaactcacagtgccaaaacgcgttgttcgtcctcctcccccgcctcctttcgctctgctttttcttcgtcgtcctccgtcgcttcggcaacaccaccctttttggcgacattgctgctgtccaacagctggacgaactgcttgaacttctttggctccaacagtgtggctgcctgcacaatgttgctgctgtgctgcttggcaaccagccgagcggaggagcgaagtcggccaaaaacgaagcggacgggcagcaaagtttccagggaagaagccacctaaaaaggggaaaatagcatttaaactgttaaaaaggaaatgaaggtgacaaagaagttaaatttggaactgttcactactatttatagcatgaaattacgtttattgggctgtttaaaacaaattaaccattccaaatcaattgaactttgtgcgaacattttttatgtcttttcgttgtttttatgctgtttttttaatttcaaatcagggccccaaaacattaaagtttactctatatagatgatattttaaacttattataggggtaatcgaaaaagttttggcgtgagcggaaaaagtcggttccgattgtatggacttcccccttttatggtggacttgataaactgtacaattagacaaatagataggtggtatatgcaatgtccaaccccatttcttaccatgttgtacaccgcgtctttgtcctttttgacgttttcttcccccgtcgccttttcactgccctcctttctcgcctgtatcattttgaccgcttcttccagtcgctccgctgactctcgcgccaatttcatgtgatttttcttttctaaaattcaaaaagttacaaattccccctcctccaacttttctataccgtttttattcaaattttcctcattcggttgaccctaaataaacaatattattatgatgaatttacaattccttttgtcaaccgtttgtttctgctgttgatgtttctgtttgatcttctcctttttctcacgtttctgttgcttcttcttttcttttttggacatcggcgacggcccaccgttttggtcacttttcggcttcccattttgctgattttttggtgccactttcttctgatcagcttttggtgcattcttttgtccagtttttgaaggttgtctattttaataaaagaatttaacgaagaattatgaaacattgaccacaaagatcttaaaatgaaacaaaattcgaatttttgaattcaaaaatctgacccaaaaaacgaatgtcattggtatcaaaccctcaaaaaacttccatctttagtaaactttgaccaacttttgctgtttttgcttctgatttttgggcgatggaatcggtgttggggcggcaccgccgccaatattggcattgccccaacttttcggcatgttcggacgcactggcgacacactgttttgttcttcggcaagtttcctgttaatgaacgtcaactcgttataagaccagatttagaggatttccaaccctatccccgaaattttcaaatttttgggttcaattggtcttgaatttcatttttttccaagatttgctacgacagaaatgcccaatgcttgtcaaaattggtcattacttttgcggtccatttatgactttgccggatgacgcacttccgttcatttttgtctgaaatttttgctgcccaactttcggcgtcgtcatttgctctgtcgacacttccactttcggcattttgtgctttctaatcgcactgtcattgctctaaaaaggaaatttttgcaccaaaatgagaatttgtaccaaaaaaacctctgattgtgagccaaaactgacacgacgcttctgtcccgggccgaaatgttttctctgatgacgaccacctgctgccgcagatgccgaattcgaatttatgtcaccaccgtttggcgtcttgagaatctttacaaattttaaaaggtttaaaacaaaaaaagattttgtttgtccttggtcatttaaattaaataattaaaggtttttaggactaaaacttttcatggagcgtaaaatggcaggaattatgagtttttgaaaattggggcatttgaaatgggttacagtgactctcggtcctagtattttttccaagaaatccactttcaggaatccattcccgtcaacaagaattcgttgttaccgaaaccatttcgagcaatcaacacccccaagaattgttggctaattgccaaaaatgagaaaacctaatcaccgattttatggccgaggccggagtttggtgttgctgatactgtctttggaacggctttctgggctccgattgtaccatccgtttgccatggttttcgtcgtcgttttggcgcggctttctcgtcatcggagtggtcattttccgaccagccccaccaccaccaccgccaaatctgttgcccggcttttgcctattattactccgattctctgacggcgttgcgaccgccggtgaagaagtggaggaaacgatattcagtttgaccattgaaaagaaagaattttgcctatttaactcttttctaaaaaaggaataattgttaaataaattaccagtaaaaccgccaaaaaatacaatgagaaatttactacaaataattcaatcaattcgagtaaagtgaagcggagtgagtctgagaaaaaaaggaacggcagaaacaaaagtatgtaaaaatggaaattctagtttttttttatttggcattgtgttttgtaattttataattaaattaaaaataagttctttccaggaaaaaattttttaattacatatgcccacccgaataaacatattaatataattattatctcccttttgtcaccatctattagtggccccgtccaaaatttcactgtttggaggaggttgacaaataaatagagccccagggaattaacagagtgaatatggtaacgtgtacaatactcagagggaatacggtatcgtgtgtgtacaaaacaaaatcaaaaaagtgggagcccagccgcttcatcgaagcaaaggagacgacactttattgtctgcatcatcgggacggataaaatcctccagtccgctcaccgacgcgtttcttttccatgcccgcgtccctccgcaattatcaacgataattatcctccaggcacaggctgccgccaccataattttttttgtctttttgatgtcgcctcg

SEQ ID NO: 6371 - DNA, 998 bp, Heterodera glycines
  unsure (1)..(998): unsure at all n locations
tgcaggtctcatatggccaaaaaataattattaattttntgtttaaaacaaaaaaaaatatttttaattatttcttaaaattttttcgccataaaaaattaacaaaataaaaaatatttaaaattaaagtaattaattaatttaaataattatttatttattattaccagccgccgacgcgacggcggaggctggcaccaaaaggccgggcgctttgtacacgtaggactgagtgtttggcgaagggacggcgaggccaccggcgggcgttgtcggataagacttgaaaaacaaaattaaattacctaatattatttggttaaattatgctaataaaataaatttaccagaaaagaaattacttaaaactttaaatttatatatttaattcggaaattgtaaaggtaaattgattcttccatttaaaaatgccaaaaccaaagttataccaaattgccaaaaaaatggtaacggaattaaatagacagggtttaaacatggaattcgttgaaaaattatgcctaaaagaatacagtatgcccaccataaacatgggaaattcagtgccgcttggcaccatggcactgtccccgtgatgggcgcctgtcgccatgttgctcatcgccggtgccgaacgtgtccgatctcgacgatccctggcacagagaaaagagaaacgtcattttattttaattaaattaacttttctaataataattgttttttagttaatatattttttaattcattttagcattactaaaaagtattattttcaaaattgcaatttgttcattaatgtataaattcgaaaatgaaaattatggcaattaggcggacccgataagagtcattatttctcagttttaaaaatagagaaaatcaatgaatttaattattttgaaataaacccaaaaagtcggggggaaatttaatccatgccatggcatatgacattaattaattttatttattttgcattattaaatgactgattt

SEQ ID NO: 6372 - DNA, 2552 bp, Heterodera glycines
ttattttattttgcattattaaatgactgatttttgtttttatgtttattaattaaccaatgtttttccaaaaaattgaatttattttgccttcgcctgctttgcctcttattccaatagctgacaattgcgaattccacccaaagcggcctaaacaaattaaaaataaatttttaatttaattaaatttcccccaaaattagactcaccaaagaccgtgatgaaagcaaaagttgaggaacacgtccaaccctttgatgtagctgacctttggccattgtgttgttggtggtggtgatcggtgttgtcattgtgagcacctgccaaattccgaaaaggcgtgtttaaccagattttcgagaatttctcgagttgagacccgaggacggagtaaaagcttaacgaataaaattaattttgcgtaaatgccaacatttcgaacaaacaaataatttaatggacagctaataacccactccccgttcacggcttaacttttccatgggcagaaagttcgttgttttgtctagaaagggttgttacaattttttgggggattttgggacaaatatctcacaaaaggtcatttttcgtgtaaaaacttggcccaacatttaaaaaaatagtcacgggtttgtgccgttaataaatcgctttcggccttgctcaatttgcaaacgcaccgttgtgacgcctaaaccgacacgggcgggcgacgcctcgcggctcagccaaaaggacacccacgaaatggcaacaattagcatggactttgaaagggattaaagactaattaatcaattaatattattaaaattcaaacaaattccctaccggaatgacaatgttcatcagatagaagccgagattacgtgacaaaatcacttcaaaatagaggcgagcatatttacctgacaaaaacaataatgattatttttatagggaaattaatcttaatcggacaaactgttgattagggtgtcattgcagttcgtaaagtttttttaaattaaattttcaattaaaacatgaactttttctcaaaaaatctgaaataaagttgccttgaaaaaattagcagaaaattagcaaaattttttataactttttctatagaaaaaaatccttttttttgagaaatgaaaaaaatttgtgtcaggcactgatctgtcctgatcactgatgaattcccggattccgcgaataccaaatgtatttgccctgatcaatcccagtctcagttcccagcaggcaccagaacattttcaaattttaaaaagcatttaaaaacacgaaatttcggacccgatgctgtggtgatatgtgtgccggtcacgcggtaacccgtgcgtcgaaactgtggcaaaaagaatacgtcgaatgccactgcgtcttcgggccgtcgcccgtccgaacgccgttcgccccaataataatctgaaggcttttgatcattttaaatattcaaaaataaatcatttataactataaaaaatttattcaattaaaatattttgaaatttaaattattttagctataattaattcattttttattattaaaatgtaagtttctcctaccaatgtcctccacgtcgtagccatagctttctaggccaagtttgctaaattaattaatctatgaattttggtgtaaaaatggctttaccaagtctgcgaatccattgggaacagctaaaattaaaattgaaaccaatttaaaaaaattattaattgccaaaatattaattaaaaaatgtttgcattttatgagaatgtgacgaaaaatcacctgcagctccatttggcacatcgctttcactgtcagccgttgggacgtgtaaatctgtgaaaaataaaaaatttaaaattattataaaaaattaaattttatttactcggccatccggctcaattcggagaaatgaattgtgagtggtggccaagtgaaagacggcggttttctcattgggaaactgaaaaatgtgaggacaaattaaatgatgctgtttaatttcaatttggaaggttggggctgggctaattaaaatggagtaattagcgattaaatccctaggggaatgatggataattatatttaatcataaattgattaagattagcggtcattcaactgtaaattacagttatggtcagttcaaatagggttttactcccctctcctcgacatttttgggaaattaaaaaaattactttataaattaatttattaatgtgttaattgggtaatggatttccaatgattacaaaagtgtccggtttccacagcctttccaaataatcgacgccaactgtcagttttttgatacgccgtgccaactccgggtccaactgctggaatgccagcctcgggtcgtacctaaaaaaaaatttaggaaaatttttcggggtttttttatagggcctggaccaagtctggcgcaaataaaaatccaatgtgatgtccatgtccacttcagaaacggcactgatcgaagtcacgtgaatggtaatgccaacgtcaaccgctaaaagggtaccaaagttttaaa

SEQ ID NO: 6373 - DNA, 1766 bp, Heterodera glycines
aaatttacaaataaaaacagagtgccaaaaattcgaatttttcaaccttacctccttcgccataccgaggccttaaccgcttgtcatactttttagaatcggtcagccgattgagaatctgagaaaatggagaaataatattatatttttaaacaatcatatttcaagtaattactgttactaacaataaaataaattaaatgaaaaataatttcataataatttaattattaaaattataacgcctcgtcgagcgggcgagttatctttttatatataaattttttatttccagttaatttcaaataattattattttcaaaattaaaaaaaataattatattcagcattcaaatttcaaataattcctattattaccaataaaacaaatttaaatgatcaaataatttaataaattcctaattatttaaaattataatatgccaaataaaattaaaattctcaaatttaattattttattcccaattaatttcaaataatattattttaagaattaaaaattatacataataccaaaaaataaaaaataaaaatccatcgtttcgtttcccaaattcattcatttattttggtcctccacctgtgaaatgtaagtggtgttgaacccgttgttgtcgtactgctgctggttgtgttgcggttggttctgatacgcgtccgaccattggaccatcggctgttgttgttgctgctgctgcgattcgccaacgccatttgtctgctcattttcggtactcaaaagtgtgcccgtcacaccttaaaaaattaattttcaaaaatataaatatttttaaggaaaaatattaaataaattattattaaaaattttaaaaatattttaaataaattaaaatatttattattaaaaataaattaatttgaaaataaatttttatttttgaattcttttatataataattttaaaactaaattatataatattttcaatttaattaaaaattgaaaatttcattcatttataaaaaaaattattttttctaaatattttttaataaaattatttaaaaacttaaaataatatataattaatagtattttaaaacacctccaaattcgcttctgacgaggatgaacaaaagcacaatggaaaatgatgaagaagaattgttgtatttgtggcgcaacattccgccaatttttgtcctaaaaaaacatgtatgccgttgacagggcccgaaccaaagttgcgtaacttgccagatcggacgccgattcgcgacgcgcattagccgcaacaacggaaactgcagctaaagcggaaacagcagaagaagtttcagcagtttgggaacattgctggtcgccatatggacaaatttgcattaattaaaataaataatccctttaataaaatggaaaataaaatattaattttttaaaatttgcgtccctcgcgggggattgaaccgcagcgttgcaaaacttgccatatcggacggattctctcttttttaattttctaccttttttctgtttttttccaattggtcggcctgaaattcgcctgggaaatcatttaacggacaaatggccaaacacaaaaattgataggccgccaaataattcactcttttggccgcttaacgcaaaaggcccccggggaattgttttttatttgtgggagagagtgcgacagtatgccaaacaaataataaatattctttttatttactgtctgtccaacaaaaaattaatgggaggggaaaattttagttaaaaaaa

SEQ ID NO: 6374 - DNA, 2906 bp, Heterodera glycines
tttttattattataaacaactattctttttgtatattattaacatttttatagtccattcgttatctgaattcggttttaaaataagtaattctcttagatctgctgctgcgtcgaggatgacaaggtttctacggactggctcgaggaacagatcacaggtaaacaatccaacttcattccctgtaaaaccatcttttaagacttcgaagacctggtccagtcagtcgatgtggtggcgtttaacaaggtttaaaggaacgattgatcttttaccatttgttactttttgttgttgtttcattttgttaacagtaaatgccgaactatcagtcacgcttattgctcaacttatgtatgcttttagattctattaatggttttagcaccccccccccccaaaaaaaaatttttaaaaattagaagcatgttttttagggttttcggtgtcgttgatcatgaatacgacaccaatttcgaacgaactcgagcaaaatgttgaaaattcaaattttcgaatttcgcattattggttcactttgttaaaaacacggaaacaaactgatgtcatcaatgtattagcttttttattttgaaatctaaaaaataaaccatattagagctatgcttttatattgttcattaaagaaaatgtcctgacagcctttcttgcaataggttttcgattgctgtttccaagacttttttgaggcttaaaactccgatttatcattgtacaatacttggaaaagtagtaatatacttaaacaaaagaacctataatgaaatgaggagtttaataaaaggaatgatgattcatacaacaataatggccaattgccaaattctttgaaaacacggcagtatttggtagtgcttaaaggattaaaacgacaaaaatgaaaggttttagtagttcgaggtgaagaaaaagacgaaataagtaagcgactgtattcatgagtttagtttaggaatggtttctatgcgggacagagaaacagcactggaggtatacaggataagagggaagaacgggtacaaaagaaaatcaaatacaactaaagggtccaaaaaagagggatctgccagccacattaagaaaaatgaatcatctataagcttcgaaatgaatataataactctgaatatctctgtccttttgctatggcagtgttgaaggtgatgccgagaataagccagtcctacagttgctcccacttgttgacggcactttcggttcgaccttgacaaccacgttggtcggtggagtcaccagagcggcagaggtggtaggtggaagattcagcgaaatgaagggaggagaacggctctctttgggatgcagaaacattggcaagacgttgttcggttcagttgtcgccgcctgaggtgcgcatttcgaactgttgactgtagtgaatggagtcccgacgaggccggtgttttgtatggccaacgaaatggaggaaggtgtgaaagaaaagtgcgtttggatgggaatagaaacggaaggggaagacagaggactttgagtttcggttgtctgttgttgctggtctaatgaagggccggtaattgaattcatccgaaattcgctcccgcttccggagccaaccgaatccgattgttgttgaatgtgtttctgctgcgcagcaacagcagcagtaagaaagttttgcatgacgggagggaaagctctgtcgaggatggcactcgtcgtcgttggcaacgtcaaagaggaagaggttgaagggatggaagacacaatgccaaaaactgcggaacctccacttttgtctttgttccttttttcaccgcctctcgccttccgctccttctctgcatattttgctgcagaatcaacttccaacgctttggcaacaatgtccttgaaaattggcaattaaaattttaaattttatatccaatttacaaagtaacctgaatttgccgctcgattccttcctgtttctttgggtcctctgctgtttgttgcttgtgagtgttttgtcctcctcgtttgcctccagctccagtcgttcgtgccggtctcggcctaaacggtttgcgaggtacggtcgtcggcagagcagcaacctccgcaacaaccttaatgataagtaattgctgaaagcactggttaattgactcacttccgcaacggttgattctcgcgtgagttgagacgaagaaatgccgttggaagatgaggacggagttggaacagtggtggaagtgactccggaagaggacgggcaggcgaagttctgactgacttgccgcagggaaagcgaagcaggctgaccaaccgggcgacgatgaccactgctggtggggctggttgtcgtgttattcttaacggactaagcagtttaaaaccaaataagagccaaaagaccccgagattgctcgtcgtatggccaacttccaccgcaacagcggacaaattggcactaatggtggttggcgtactaatcctagtggtagcagaacaagcgcttgggccattgttaaacgactccaaattgttgagaaaattctgcacaccaatgggaccgctgcaattgctgacagtcgtccccccccccccgcccttcagagcgcgacaaatatttcaacaaaaatttttaaaaattgcctagagcaattgaacgctaacggacgacctaatggaaaaaaatccccgaaggagagaatttaattaaatccattccttcgggggaccgtgccgggtgccgcggggtaagcagtgctggttcgtttcatcacggcaccgaaccttttggctagtcagcaatcgttgcttaacttgccagatcggacgggtgcacatgattccactgttccaagcaccccaccaaaagcaaaagaaaggtaaccaaaatataaggaaaaattttttaa

SEQ ID NO: 6375 - DNA, 2300 bp, Heterodera glycines
cgactaaaagaattatttcaattagtaaagtgcaaaataaaatttaacaaaatgcccaccccgccatcgttggctgtttgtttcgaagaatacacattgtcgaaccaattttcaaacactcctctcattccatctgtaattctgtctgtaaaaaggactttaacaaagaaacacctaaaaatttcgataggcccgggtatctctcggtgtaatgatggctttgaatgtctcctccggattgagtttggtcggtgaacggtttgctcaaattgggaaagggcagagccatgttgatagtgtccattggtactgaacggcgttttgcctccgccatgtcagccaaaattgaagcagggtcaatgggctttccctgaaccggacatcatgacgctcacattgtcaaggattattaccgcttgtactgagagagtcatttggtgcatcacttccatgccatcctttgcgtcgtccgacaaccgtggcatcttcggactcgcatgcgtcccaagcattttgtccgctttgctgggccttccacgttttccgccaaccgtcggctgaactttttccttgcgttcattgctccgtttcgccacgtttttcttgccatcgccctcgtcgttttttcgatttgcgactggcgttattggctctaaattcgaggtagaattcccattgtttcaaattcaaaaatattcaccaaattttgaaacttcatttattaaatggttttgctgctgatggatgggattcacaactaatgcattcgctggtccgactgaaatgtccaccaccggtgaactctccacgagcggttcctcctttacagaatttatcaattccgggatcgaagaaggtcttcttaagttgttaacgcagatggtcttttgaggaagcggcgtgttagcattggcattgtttggaagtgccgtggacacaaaaggaggggcagaagaggcgctgacgggcgtaggggtgccggaagaagagttggtgacactccgctcgtcaggcgtcgtcgaactcccagcgccgcccttccgcttcttttgctgttcgagatcacttacgtattcatgccattttctccgagtcgttggaccaaaactacaaaaataaatcatattaaagatggagcacttttgtataacttaccaaatatcttctccgttcgtccttccgttctctgatttgtctctgagatccaaactcgattcccgagaatttgaagccttcgaattgggagtggacgaacggcggctgccaaagtcggacgatttgcagcgcgaagagttcttttgggtgaaatacatttccaacttcttccggttgattgtgtgcagatagtagggaacataagctgaagtccacgagcaagggttagggcatgctttcatttcaacgacatcggtgatcacagaaatatctaaaaacacttcgaaatgatgccaaaaagtattgctcaccatttagttgtctatcagtgattgcgccctgtttgttcagcggaacgtacggtttggtggaaataattcttgttccttgtttgaggtcactgagcaattcgcgtttaatacgcatctccaaatcggattggaatgcaaaattgttgatgaaaatgatggttgcttcttcagtgatcaggcttctgtgttgttcatttaaaaaatcgccatgtttcaactcaaaagggcgaaattgacgtccaaaccaattcatcaatctgaattatataaaagaattcaaatttatattaaatggaaaaaataaaataccttttgaactcggactccaattttctcgcaaaatcagctgggagtttggcaatttctattccgactgctttctgcacttgcgatccgcccgccacttggacgaccaattgaccaacgccactgcccaaatcaacgaaaacgtccctctgtggtgagataagcaatcaaatttaaagccttggcccacctccgttggcctcaactcgtcgatgatcatcctcatccgctcaaagctcgtctcgccatacgtttgtgatgagaatgcctcgtaatgcttattcagtgccttttcattgtcaaccgcgcggttgtaacagcgagtgacaatttggtgcagaatttcccttgatttggttttcaacggcccatcgcttctctaaaaaacaaatgcataaatattgctgaaacccaataatttattacaaattggcttgtctgcgtcaaaactttgttaaattttttagccaatgagcgcatttgatcataactaaaaaagcaattttaaataattatcccggtacttgt

SEQ ID NO: 6376 - DNA, 2377 bp, Heterodera glycines
gggttcagatcagcggtgccgatcattgcatgatctgtacagggacaaagaatttataggcttcctgtaccaataatgccctcattggcaagatgccatgagtataccattatgcttcctgtaccaaggttaccctcattggcaagatgccaataaggatatcatccatacaaattttataattttatttttgttcgagtccgtgtcaggggttcgaaattggcaaaaatgggtgctgtattcgtgatcagcgacctcaaaaaccccttaaaacttattttcattaatttcaaaagcacatttatatgcatttgaaaatgtatgtgaaatctgtaaggtaaaccacacaagtaccttatccctttaaaataagctcgtaattattatttttttaaattcaatataaacggcatggaattaggattttgccagaaaaattcagatttttaaaatgtaaagaaaaaatttttctctttttcctcgggagaccaattacgaagaattacatttttattaaaaattgatatttttcgagttttattaaaaatagtttgaaaaaaataaaccctcaaaatacagcaaatttagaattggccaccccaaaaagtaaatttacgagctaaaattattaaggaaaatgaagagtttaaagcgaccattaaaaatgaaataatacttggaaacatcgacgttttcaagacgtcctttcagtggctcatcgaattctggataatgacagatggctaaccttcattataatgggaaaatatttataggtaccaatactcgggaggaaataatatttcctttgaataaatttagaaaagaacgaaaagtatccatttgttttcagggtcagtaattaatactataagatttattcgttcaaatccgaaaacaattcgctaaatttgaattcggttctttatacaaatttaattgagttcaatccaattaaaatgggtgtgaattcgtccaaaaaactcttgggtaaacgtcttcaatttttgggactaaatttcttgtcaaaaattagatctgtattccccgctctttaccctccgtaaatcaccttataatgtcaagaacctcaacgcctaatgaagaccccgccgcctctgcactccaattccacgtgatgggctgcgcaccgacggggctttgcagtcggatgggttttttccgctcagctccgtctttgcattggtaagactttccattcatttcattagaatggccatgcccatttttgttctttgcacaactgacgacatttttgttgattaggtcacaagaagcaagcgaagaagggttgggttcattagcagccgcgttattattcatgccatccatttgccgttattagcatatgtcgacctgaaaaggaacttttctttcttctgcttcatttaaataaaaagcaaacaaacaaaaacaattttaatgtggcaatttccacaatttatgcattttaattttaaatatttagcaggtcactcgtgagaatcgaagaacgaatcagttttggatagaaacgagcacccgatcgattgccgaatggtcgcaaagggaaagagggagatattgtttgtgtgtgcagagagttgacagacccctccactcccccgggcgagttgagtagggagacggaaagtccttccccaaacgcaccccccccccccttccacccaaaccccagcagcatttcgtcgcggggagctctttccccggacgagcggaaaacgatcgataatacagagaagataaataaatggaggctggaagcaaaaatgcgaaagaagagagagagggaggacgcattaaagttgaatttagaaaaaccgacactcacatacggtcgaaaatttgcaaaaaaaaaaaaaatcgcttataaaaatgttaacagtagggtttttaccgcatttgtgtgaatacgtgagtttgtaatccgtttcattggtttcttagagaaataagcaaattttataaggagaaaagtatgtagatgggatagagaaaaacacgctggataaatattggtttgctagtggctgaatgagtggcggactgactaacggctttggcagtggaagcgagcgaaagcggtcgattttaacccttctgcagcaaaaaagacgaataaaaatcgatgatttccaatgttgtcgcctttgctgtcgcccggccggaacccacaagtattctttccaccagagaagccgctcgcttgtcaaatgacgcatcgaaggcgtgcgatgaaactttttaattttcgaggattggtgccccttcgcttatccaaggcaaaactatcggtccttctctcgactaaaacagggctttcatcaaaataattcccaaaataaaggatatcact

SEQ ID NO: 6377 - DNA, 4849 bp, Heterodera glycines
acacgtctccgacacccgcccctcgttgaataccgtagccccgctgaaaggggctagtgccccggaagaagtcaaaatcgtccttttctaatccaccaccgtattgtacatactcgtcatactgcgcaatgcttgggtcaaacacaatatgaaccattttattgttattaaatgaaaaatgaatgaatgaaatcagaaatttatcactttcttaaatatcaacacaaccatcgtcgtcccataggcgaacggcactaatcgacctttgtccattgtgcgcagttcaatctcaatttcgtttatttcccgtggtaacactcgcgcaaatatcggtgagtcgtaaatcttctcagtgtagtccccaggggtggcaccgctgatagacacaacccggagcaaagagctcaatgtgttcccgatgatcatattctcggtcagtccttttgagtagacagcaaagcttgagatgccacctcgcaaatcatgtccgtatttggcaacttcatttgacaccacatgctgggggttttcgaacccaaggacatagcccaattgcggtgagaaggacaaatgactgatgatttcctcgttgaacacaaccttgaatcgttccacatcattgttaaagagaactatcaccgaattcggcacatagttcaaagggttttggttagctggaggagtcttaaaatatattcttggtgggtcgagcgtgtgaatcaaacgcgatgggtcaatttgagctgctgatgtcggcggtggtggtggctttgcaaatgatttgacgtttttattttcctctccttcaaaacgaggtggagagtctaatggcggagtcggtgcactagggatcaatttagcggaaagagaaaccgggggtgggggtttaggtggcgcgtcggtttttggcactattggtttggtggatggtgtcgggctttttggttgttgagccggtggtgctgaaattgtcggtttaacagatgggcttgggactggtggttttgttgttgtagtgagaggagcaggcgttgacggcttgggtggttgaggtgcaggcgatgccggctttatcggtttaggagctgccgttggtgtcgttggctttgttaccggaggggttggtgtcgttggctttgttaccgaaggggttgatgtcgtaggttttgctaccggaggggttggtgtagtaggttttgttaccggaggggtaggtattgtttttgtagttgttgtaattgatgggttaactattggagccgacttagtaggcggcggtggcggtggtgcctttgttattgttgtttgtggtggaggggtggatactgtaggttttggtggttggacagccggtgtctttattgaaataggagtcgaatttgtagacggtggtggtggaggagggggagccggcttagcagtgcttggggtaggcggcggctgaggagaggtcgcttttgatgtttttacagtttcgttttgcgtttctacataacgaggcggtgaatccgcaatcacaccttcataatcttcattgtatgatgagggaaagtcaattgttacagtctcgtttccttcataatgaggcggtgactcagaaattatcccttcctcctcctcatcctctttatctccattgtaagacgggggagagccaagctcgttcccgttctcatcaaaaactggtggtgactcatctcttttgtttctcttcgccggtggtggtgagttgagaggctttgtccgatttcgattctcttccaactcacgagggagtggcaacatttttgcaccactatgattccgcaatgtagcagtcaaaaagtctcgcagctgttcaaccctactatgcgatgccttgggcaccggcaccctgataattctttgtcggtcctcatcaatagcgctgcggtcggtgaagtgaatgtcaatccattgctcatccaatgtgccaatggttgaccacgagtaggggtaactgatactgtgcaacccgcacacccacgttccattaaaatgcaaaggttttgggagtcggacacgaaatttgttgggctgattgtccgggtaatcactcacattactgggtaaaaacacaaagaaactgtttgacatggttgttgtttatccgcataaataatgaaaatggaaatgcttttatacaagctgagactcattaatccactcccgattgggatatcctataaatttaacaagcatctcggttgatccatcatctcttttcctctttctgaacaccttctcgatacggtagcttgtctctgcatcctttcttacgcgtgccagctcctgctcatagaagcttcccttgaatttctcgccatgctcatcccgtagtttgtaccgaattgggcgcaccgctttcagcacctcatcaatctcgagtatttcatccccgtaatttggtaaatatcccttctcgaattgccctttatctctgctcatgcgcacaaattcatctttatggaagcggggagtttttctgtcaactgattgcggtcggtacattcgcttccacaccttctgagcatttgaaaagtcaacatcaattgggcgcatcccgtgaacacgtgagggcgagctgttaattccgtccacaattttctgtactgtatccacccaattcagtgtctccttttccgcaaagtacctatacaatcgctgcttcacattccggatggctctctccgcaattgatgcttttactgtcgaatggacgggttcgtgcttctcaatctcccgctcctcaaagaattccttgagcaatctgttcttgaactcggtgcccttgtcggagaaaactcggtggggcgccatgggcatttgatcgatgagttgcttgaatgcctccagcatttcctcggctctcttgtttctcagcggtacaacaaacagacgtttggataggacatcaaccgcaacgagcatataccgatgaccccgattgtggcgcaaaagatctagataaactgacaatttcacttgaacatcgttcatgaatcccgctgcaatagttataataccttgtaatacgaacatcgatttttaacattgcacagtaaacaattttaaataatgaacaatgatgtgaatagaaccgcattaccccgcttaagcttgctcctccctttgccgtgccattgtgagtgactcctccctcaccacggctgagattggctccacctcaccccgccacggacagcaaacaataatgtgaatgattgatgggggaaatttgaatatgtttttgtctttctgtgccatccctcccccatcatcgccactgttgggagtgggcaaaagaaatttttttctcaatttcgttggatgattgatagggaaatttgaatatgcctttgcatttcggtgcgcttctcccctgcgaggcaccactccgttattgcccactgcgatgggagggcaaaaatggactgaaagaaaatgaaatttcttcgcaagtttagttttgattgacagttcagtgtcataaaaaaagaaaatttgaaggaccaaacggaattgtcataaaaaattcaaatgcgaaggacgaaagaattgcgattgcaaaaaaaccaaaaatagtaacgatggacaaaaaatttttgtgcgtttgtgcacaatttactttgggcaaaaaacgaatgagaggaaaaaacttgtgcgtttgtgctcaaattatgttgggcaaaaaatgataatggaacaaaaaactttgtgcgattgtgagcaattatgattgggcaaaaacatagcaaaaaacttgtgggtgcgtattttgtgggagaaatatgatgaaaaaccagaataaatagagatgatggtcgactatcagtcaaaatgggcagattattaaccaaatgagcattagtttttgtgtaaaaaaacatgttttttgtgagcattttggtttcggtttgccgtttgtggggctatttaagacggtagaaagttattgtgatcgtcattcgagcaaatggacgtaactcttcccgtcagcaactcagttggtgaatggatcggtgaggaacggggggatggcagtgttgtgctctatgcgccgtggacggacgtgtggcatgtgcagcaacaacaacaacaacatcaacaacaccaacaacaacaacaacagcaaaacgaggtgcagcagcagcaacaacagcttgtccggtgaacaggcacggggtggacgcagtttccagcatggaacgaaccgctcgttgccaacgattggcgagagaaggaggaaaatctgatccaaaggaagcgactacagcgtgaaaacccggtgtattgggcgcgaatattggaggaggaaaagcgagccggtgaggagcgccgcttaagggatttgcggttggagcacacatgggatggctacaaggaaggccacttcgagcgtcggcacaatgacggctcgtttttcaaggcaatgaaaattttttcttgtgtttttatgatttgaatttttcatttaagtctactgcttcaatgggaaatgctatgaatggaattcatggtgaaggtggaggactgtggtgaataacatggtggcagaggaatggagaattcaaattaaataaaattgatttgcgtatttaatattgcaattctacatttgatgtaatgggggtgaggggataaaatgattcacagaaatttacggaaacgcttggaaaaataaaaattggtagtttgagttggtccgtgtacgggcgaccgcctcacacacagtgatattgcccctcattagatttcgacaacttaagcctcacacccgagcttaatcgttatgtggttggtgttgtttcatgccgccaccaaactttct

SEQ ID NO: 6378 - DNA, 2734 bp, Heterodera glycines
aattgggttcccggtctatccgtcagtggtcaatccgtcagtggacaatccgtcagtaagtggacaatccgtcagtggacaatccgtcaatagctaatttattttggctttgatcaattattggatcgaaatgattcatttttggcgcattggatttttttcaattcgttacatcatcatatcaccttcattcttcgccagtttaatgccataaaatgaacatcgtcactaaatataaattaaaatgattattaacaaaataaattaaaaattcttaggctggtgccgaaacgacccctactcttttttttaactttatggcgccgggccaagcttctcggctttgctggtgctgtaactgttactgttcgacttcaagtcgtcagcaggctgatcaagtttgatcaactgatcaaagctgttgcacactttgccgtcgaccaactcatcacaatgacgacatttccacaaatccccagtagctaaccaacaataatcgtggaaaattgccgggcactttttgtcactttttgggaagcatccattcacgcggaaaatgtctttgccaaacactcaagatttaaagaaaacttttaataacatatgaacagaaactaatttgctgactatctttgcaggtatatgtcaggcaaccccaaaatccgccccaaattgtgccaaattcgccatatggcacgcaatccgttgtaaatgtgttgcggaaaatgtccgcctttttggctgcttcccgcagttcaggtgtacgcaaagtgccatacacgtactcataaagctgcaatgtaaaaatttgccaagtgtttcaacaaaatagttatggccagggcccggatttatatttgctagaaaagcctcgaaattttcgctaaaaaccccaaaaagtccaaactaaaaacatgtaaaaatatatataaatccgtgccctgtggttttggcacaatgtattcgaagaatttttggtttttagcacgtattggaattttgccaagcgaaagaaccgaagaaataattacgggaacaaatatttccaaaacagaggccctaaaatggcacaaaactatacagactgacaccatctggaatctcagaccgattacgaacggccacaacacaatcatccgctgaaaaataataaaaattaattaatgaccattaaggatttaatttctaaataaacgaacaagcgggattaaagagactgttgttgacattgttgttgaagcatggacaaatcagcagcatgatcagcagcacggtgagaaggaaaatgggtgatttggatgaagccattaattagttagggcgagagacgaattagagagcagcactgggatgaggaaattcaatttaaaactgaaaaactcgaaaaaacaaaattaaattaggaacataaaaaccaaatttaaaaatagattgagttaatttaggtgattggtcttctttcttgtaaattcttttggcattgccatttaacggcaaattgccataattttgctgaaatgcaacaaaaattaatttgacattggaaattttttgttttttcatttatgaagcgatctgttgatgatgctttgattatattaatcaattttgtccatcctcaagactttcatgaaataaatggtgaaaaaaaattccagagctgatcggggggattgtgacaatcattaatattcccaacaaacaaacattgaagatgtcaaaacaacgtttttttatggatgtaaaaatgagaatttattacgaattaattaagaaaaataatcagtaattttaattaatattgtaaaaaatctattaacaaaattttattgctgctcgagagttcggtcttcaaattcagagaattttcattttttttttttgtggggctcgattctctctgctcttctcgaatttggcttccgaggcttggaaatttttcaactctcaagcagattaagaaaatttcacccaacttgcttgtaatcgacttaagatacaggcataataaatggttaattgctgtgtattagtgctgtttgagagatgtaccgacacttgcgccgtccagtaaaaatggacataatttttgtttttttgtaaatgcgtgtgcatcagcagcaaaggcaaatttggtgccaaggaaaacaaaataatgaagaattttacgtgctgagacaaatgcgaaaacaaaaaacttagtgatgattaaataattaaatttaattattctatttattaaattcataaaattattatggcgctatgtaaattcgacactgagtattttcgacactaagtaatgtcgacactattgagaatttttaaaaattaatatgaaattttgaaggtgttagtatttagttctgataaattttcctatttcattttctaattcttaatttttaaaagggtaaaaccatgagtaaaacgtcaaacccagtgtcagtgttagacaaaatgactcataattagggctgccaattttatgtaaatacatattttttcctggattctccatgctctaaatagtaggaaaaacactttcttttttgtgtttgcgaacaaaaatcgagacttttatttacatatttttacatatttcgggattttatacatatttggtacatattttggactttttcttacataatttcatttttttacatattttgaggattttttacggaaatatttgggaatattcaaaaaaaattcaaaatttcggcaaatt

SEQ ID NO: 6379 - DNA, 4873 bp, Heterodera glycines
  unsure (1)..(4873): unsure at all n locations
ttgaaacacttggcaaatttttacattacagctttatgagtacgtgtatggcactttgcgtacacctgaactgcgggaagcagccaaaaaggcggacattttccgcaacacatttacaacggattgcgtgccgtatggtgaaattggcacaatttggggcggcttttggggttgcctgacgtttacctgcaaagatggtcagcaattcgggaataaatacctgattttaaaaaactggggattataattcaacaaaaacggtaaatataggatcaattttgggaggcgcgtcaaacagattttagtgattaaatatcgtggttttaccaaaaattctttttcatttattttccctgctaaaatataattcaattataaaagttaaaaaatgccatattttccaattgcttggactgtgtcggtgctgaaaaacaatgtaaaattaaatttcttaatctttttaagagcatggtaaagacattttccgcatgaatggatgcgccccagaaagtggcaaaaagtgcccgaaatttttcaacacattctgttgggaagccggtgggacttcgtcaaactgtcgccattgtgacgagttggtcgacggcaaagtgtgcaacagttttgatcagttgatcaaacttgatcagcctgctgacgacttgaagtcgaacagtaacagttacagcaccagcaaagccgagaagcttggccctgcgccataaagtaaaaaaaaagagtaggggtcgtttcggcaccagcctaagaaattttaatttattttgttaataatcattttaatttatatttagtgacgatgttcattttatggcattaaactggcgaagaatgaaggtgatatgatgatgtaacgaattgaaaaaaatccaatgcgccaaaaatgaatcatttcgatccaataatcgatcaaagccaaaataattttaaaaattattattattatattaatatatgtatgccaaaaattgaaatgattaaagtatatttgttgttgaatgattctaagtatattaacgaaattttaattacatgtcttttttgcagtcaataagtcatttgtataaagggattttattttgcaagattcaattttatccatgtaaaattcgcttgttaggccttaagcaagccgtataaactgtaatttattcaattctataatttcatggttcaagaatagccctgctgaagtaaataaaaattttattcatttttaataactttaaataatattnataataattcgtggctgggtaatttcgacactgggtaaattcaacactgagtattttcgacactattgagaattttttaaaattaatatgaaattttggaaggtgttagtatttaggtatgataaattttcctatttcattttctaattcgtaattatataaaagggtaggtggtataactatgagtaaaacgtcaaacccagtgtcagtgtttagacaaaatgattatgaagacataatggtggctacaaaatagctggaaatctcacaaatttttttttttgttgattgtcaattttttagcactcacttcttttcaaaaaaattaattaacaattttgttttggttagtttgtgatgccgcgagttatggatgatcagaacaaccaatgcaaaaaaggcagtgatcactgcactgactgatcagtatttttttttttgaattagcgcatcaaaatatcgctatttggcattatgagtagggctgtcaaaaatatgtacaaaaagtggtccaaatatgtacataaatatgtatgaaaaatcccaaaatatgtacaaaaaaacacaaatatgtaaataaaattttttttaatggttattttttgaaaaaaaaatcctcgtaaagtatgaaatatgcacaagtagtataagacgtcaaaagcgcacggttgcgcacgggtgtttaccgcacaaacccgtgcctatgggaggggcgcagccctttgatgttaccgcccggggacattttcccgcacaatcccaagcctataggaggggtgcgtgccaaccgaaccctatgtgaggggttgtttctttgaagtctgccgccttgtagatttaatttcctcaaatccgcactggtgatttttttttttcactccccctctccgcgccgcgcagcgccgcggaaggtcatcaatcatccacctgtcaccaaagtggcaggtgaaggaaattcaatttttctttgaaaatttaaaattttgaccccaaactacttagacattacattattcgcaatcctgagatttttttttgtgatgctttttctgatcctgaaattaaactcattttgaaaatttgccaaaacagtgcgggttttttttgcatttcctccccgctcgccccgcgccgcgatgccgccgccgcgaaaaaaaaatcgataacggaatttggaagaagtgcaaattaattgaaatgactgcaaacaatatcaattataaattggacaataaaattaattatttaaattgtgtttaaaaataaaaatcgaaaatgaataaataaatcgggatgaaaaaccttttcaaaatatgtcacctgccaaccaaaattgattgatgtgtttttatttctcttccattatttcgcaatctgcacgtgactttttgttccaattatttcgcagtgtggcccattaattaggtcaactgtcaataaaatgggattgattggtttcttattgaaatttctccaccacctccccagagcccctaaacctcgcgggtttctcgctggtgtttcccgcataatcccaagcctatgggaggggcacacaaacttttgaagatgccgccctaaaattccatttccccgaatccgagcgggcgtttaccgcacaaaccggtgtctatgtgaggcgtcaaacttttgaagatgccaccaagatgcaaaacctattggggcaaaccgaaaacatattagattctctttgaagttgccggccacataaatccgatttccccaaatccgtgcggttgctttttttttgcacattcctccccgcgccgccgcgcagcgacgcggaaggtaatcaatcatccacctgtcaccagagtgacaggggaggaaatttgaattcgttaaaaaggtgctatttttaaagtacccaaaaccgtgcgggtttttgcattttctccccgccccgacgatgaggcacaatgcaggcgtcgcgcaaattaaatcgataatgaaattgtagaagtgcaaatttaattggtaatgcagcaaataatgccgataaataaattaatgaactggacactaaaattaattatccaaatccaatttaaaaacaaaatcgaaaatgaataaataaatatgatgaaaaaaaacttttcccaaaagtaggtcatctgtcaataaaatatgattaatgatttttagcaatatgggccaaaaattttttaaaaatctttgattgataggctttccgtttttgaaacgatttcgcaatatggacccatttttgaaatgattaatgagttttatccttttccagcacaatatgcaagtgacagacccaaaaccgagcgggtaccggaatggcccctccaaaatccaaaacctattgaaggggtattttcctttgaagttaccgcccgcttgtcgctgttttttgaatgctgttcattaaaatttaataatacgtgtttaaaattcccaaatcctagaaaaagagcgaaagtgttctttaactgaacataaagataaagaaattatggtccgacgaaaaattttaaaataaaaataataaaataagacgaaaaaattaaacgtaaagataaatttaaaaattgaaattttcaatttttggtgctgtgtaccatatttctttccaaaatcgaaaactatttcgcaaatttgaccaacaatttctgaaaaactgccaagcaaaattgatgatggatttattatttcgaatttctcatttattacacaatatgcgcgcgatttacattaaaaaacgagttcaaaatataggctgcccaaaattttgaaaattaagcaaaattaattaattatcatcagtcagctcaatgacccaaagataattcaaatcccatttaaaaaaataataaaattgaaaattctgaatgtatgttgtttaaactcattcgtagcaatttaaaaaataatttttcttgataattttttgctcccttcaccccttccccataaattgtttttttctgttattcatcattatttttagattttggatttagggaagttaaaaataattactcttatgtctttgccacgtaattctcgttgttattctttctatttcaaatttaattgaattcccaaactcaatggtaggggattttcatctaaagttttcccgctgagctaatttatatacaaataatgctctggtaaaagattcccttttaactctttaacgtaatttattattgtttttgcatttaaaaatttgaaatatttcaataaataatttaatatgaaaaggcaatccttttgagttcccgaaccttttcttttgaatatatattttaaccgttttacatttttgaatgtttaaattataatattaattttcttcccttaaaaatgcttttttttgtgacataagatggtatacagcttttgaatatgtatagataattgaaaacacttcccaacttagaccttttaaaaatctccaagcttaaggcattgaaaaagatcgggacgatattaagatattgattactcatgtaaaaaccctaaaaacaaaaagctttaaaatcgcaaattttgtccaaaaattcattttaatgtaatgattttatatagattacacctaataagattatacattttcatggattaaa

SEQ ID NO: 6380 - DNA, 980 bp, Heterodera glycines
agaggtacaatagtgattagaagaggtacaacagtgactataagaggtacaacagtgattaaaagaggtacaaaagtgattagaagaggtaaaacagtgattaaaagaggtacaaaagtgattagaaaaggtacaacagtgattaaaagaggtacaacagtgattagtaaattcattaaattaaaataaaatattttttaacaaatttaatttaaaaaatacatgaaattctatcaattaaaaaaaattaatttaaacttataaaatttattcatcaaaaaaaaattaatttaaatataattttttatttattaactcaacaaaatattttaaattaattaaaatcattataaataacgtaaaaatgcacagaaaaataatgttacaccgtccggattcgaacctgccgccccccccccccagaagatgactcagaatccccaatcacacagggattctgagggcttaacgatgtaacaattgaaatctgatgtcagattagtgatcagcaccctcaaatagccctaatgacatgtttttggaagatttttgtgaaaaaaaattttccactcaaaaatcctggtcacccccctttggtcccgaatccaaaatcacttttatttttgtatctttttttaaaaatgtgataaaaatgccaaataaaatttatttggtagagcaaaaaattgcggatttttgtagtatgttatttttccaaaatgacttttcagaagggagttaagaatttttttctgaaaattcggatttttccagaaattctggaataactttttttcatttgaagatagaaattccaaataaatcccataaaattctcccgattttttgctatttttaaagctttaattcacttaaattgaccagtcctccattgagttatgaattttcgaatatttcgacaaattttcaaggaccaaaaaaattaaaaatatttttcgaatttttaaaaaatttcaaaa

SEQ ID NO: 6381 - DNA, 4909 bp, Heterodera glycines
aaaaaaattttcgaaaatttctagggggcctagctccaaaattttgaaaatttccgaacatgttgcacatcatccgatagagcttaaaaagctctacaattttgctctttggccatttttggctaaaaccaacccctaacgagttatgagcccgggactcaaatgtcccgctcaggccaaaatttttttctatttccgggaaaaaatcgaaatttttccgaaaaaaataccagtcgatagagctcgaaaaactatgttttggaagtggtctccgtttttctgggaaaaatcgttaaaaaatcctaaaattcaaaaacccgaaaacctacttttaggcctaactcgaaaaattttgaaaattttcgaaattttaaaatttggaaaaatcgagctcattaaactctacaataagttcgctggcaccccctccctcagaccaaaccctgacgtggtattcacctggtactgaagtgggaaaaaaaaattaactgagtctccgtgtctgtacgggtccgggatttggtctgatcaaaaaataaaaaatactggattatagaggacacttctgcggagtgccctcacagcgggaattttttgatccgagtttcagaaaaaaagttacgggcccgaaactgcaagaaaaagtgagaaatcggtccccgggactcagttgggcgtcgagaatttttttctatagttttcccggattctcctcaaaaagttgtaagacccttccactactttcagggcgctcccggccttcggccgggagattttgttttttgaaacgaaactccttgtcaatataacgtatatattaataacaaccaggtaaatcattggaatcaaattcatatttcccttgttctatttgttcataatatttttcaattttatttttcaaacttttaaccaaaataggaattcgggttctaatagttccggacattttcgtaagtttttaaattatatactctttgtggactaatgaattaatagggtgtaatactatacttctttcagatcttctccacttttttaataaattttttctttctcttgataaaacttttagaatgaatttgacaaatttcagtcgtttttcagggttagagttgagtgtttctcttacttttaagtaagcttctaaaattacttcctgtgatattctttccaaagaatcggctttatctaggttatttaaaatgcagtatggaaaaatagttattgtaaaagtgaatttatatacggttttgttttggtatgggaagggttcagtttttaaaatttggttcgttactttggaaattcctgggtaaatatgcactattggaaaggaaaagtttgcccttctttcaagctcggtaacaatttcttcgggtgttaaaaccggaatttctacaataggtacaaattcttcaacttcttcaataatttcttccaattgatcaaaattttcaaaattttcttcttccttttccagttcagaaattagtttctttggccgacacagtttgacgtttatttggaattttttttttattaacaatacgatcacagtatcaacaatagtgatcaaaaatcttggtatctgatcgcctcaaataatgttaaaaaaaaaatcttttttctccaaattgttcgcactagtggacggttcgtcttctagcgggattttgaatgtctttcggaggaattcagctgttttttgttgtccaatcaaaaaacggtggtgatgtgtaaggttgtcctgcagtttattcacaatgattaatgctttgtcctttccagcgcgactgttgtatgaaggactgttgatggcttttgccaactcggtgagtagtcccttgttgaaattttcagctttgatagcctttcccacggcttcaaaaatattttgcgtttgtttggtaacagagtttatacgcttttgttctgctctctcacaatcggccacggcacgattgtagatatcgtcgtgtgttgattcaagagagttaagttcttccaaaaatttgttgttaatttctggagagaaattcgaatggaagttcaaattgtcggtggcttcgtcctgctcaggaatttggcttgctttctgtaaagctcgtgaataactaataaggtcagtgttcctgttgaaattgattgttgcttgaacttctcttattacttttgacaattcttttgcctgtgcgattgcttcttgttgtctgagtttttgtaagacaaattgagtctcctttgacaaggatgatgtgtctacaaaattaaaatttattcagaatcagaagtgtctgaacgtttgaacaattcagaatgctcaaaaattttggtaaagtaaactctggcctcttttctttcagatacagaaatgctactgggatgttttgcttttttcaacaaaaattctggttttttaccagttttcggtttttgaccttcttctgattttccttccttctgttgtgctggttgttgctcaggtttggactgtttcgtgtccgtgtcgggttttggctcttcagttgattttcttttcactaaaatattcgtattttagtgttttttttttttttttgtggtttttgttttggttgtctgatttaaaactcagcgcttaaatctgacttttggttgaagcaccgcagctgtcagaagaaggtttttcagatgattttgcaatgagtttttgtagaacagatgaccggctttttgaacttttgatcgctgatcagtcttttgttattgttggtggtgttgtcgtttgccttcccgggtcgtggcaccaaaattgatgggatgcactggtcgatccaatcaattaatttaatattttatttgggatggggcgacaaaagacacaacgtggaaaatttggtggatttctgatcacaattgatcaatatccgcgatgcttcgaatgcccgagttgtgatgtattcagagcgagttgttgtccggcttgttgagtgaagagaacaataggctagtagtgtgaattggttgaagcatgcctaaactgaaaacccttcccctttttataccaaaattttttggttatttaatagcattcaaaatttccacattatcattttatggttttttcatttttaaattattttttatcgttttagttttttcttcctttttatttaagaaaggaaaacttttcataaacaattttaattgcttttacgttcaaccgttttattgtggaataaatttatttattatttggggcgttttattagattatttttagtttttattgcgagaagcatttgcttcgtttttatgaattcattttattttatttatttattttattttacttttattttatattcatttatttatttaatttaattttaaaaataaaaattttatgaaatgtttattttattttggatttatttttattaatattttgtattttcatgtaaaattcttattattttaatttagttttgtttttattaatagttttatattttttcggatttaatccgacaataattgcaaatataaactttcataaagcaaaagaaatggcctttattatgagcaacttttttgaaatacaaaccttaaaaatagggcaaagaacgaaaattctggaacaaaattaaatctccgttttattagtttttgtacgacttttgcgttagtgaatttcataaaagtcaaaaattggcctactttatgcggttttcttgaaatttagagctctaaaattatataatcgttataaaattatggagcaaaagtgcatgtataattgcaaatataaactttcataaagcaaaagaaatggcctttattatgagcaacttttttgaaatacaaaccttaaaaatagggcaaagaacgaaaattctggaacaaaattaaatctccgttttattagtttttgtacgacttttgcgttagtgaatttcataaaagtcaaaaattggcctactttatgcggttttcttgaaatttagagctctaaattatataatcgttataaaattatggagcaaaagtgcatgtataattgcaaatataaactttcataaagcaaaagaaatggcctttattatgagcaacttttttgaaatacaaaccttaaaaatagggcaaagaacgaaaattctggaacaaaattaaatctccgttttattagtttttgtacgacttttgcgttagtgaatttcataaaagtcaaaaaaaaatttgcctactttatgcggttttcttgaaatttagagctctaaattatataatcgttataaaattatggagcaaaagtgcatgtataattgcaaatataaactttcataaagcaaaagaaatggcctttattatgagcaacttttttgaaatacaaaccttaaaaatagggcaaagaacgaaaattctggaacaaaattaaatctccgttttattagtttttgtacgacttttgcgtttgtgaatttcataaaagtcaaaaattggcctactttatgcggttttcttgaaatttagagctctaaattatataatcgttataaaattatggagcaaaagtgcatgtataattgcaaatataaactttcataaagcaaaagaaatggcctttattatgagcaacttttttgaaatacaaaccttaaaaatagggcaagaacgaaaattctggaacaaaattaaatctccgttttattagtttttgtacgacttttgcgttagtgaatttcataaaagtcaaaaattggcctactttatgcggttttcttgaaatttagagctctaaattatataatcgttataaaaatatggagcaaaagtgcatgtatcgattgccgaataacatttataatcagtaaaagagaagatgctttaatataaggctattttttcaattgcaatcattatgtat

SEQ ID NO: 6382 - DNA, 5232 bp, Heterodera glycines
cgaactgccgtttggccttgcgccttcacaacggtcctttctaagagcaaggcgaatggggaattgaaatctttcaaaacttacaccgtcaggacgtttatctttaaatgtatgccggtttcggggaatcccaataattataccatttccagacgatccgctaccaatggtttcacattcaattaaattgtcagttaattttttaataagaagtcgggtgccattacaaagaccttttgaagtgtttaaatttacgagtaagacgacaattgatccaattttaagccgcagcaaatgggtgggcattcccatcggattcagctgatttagttgtgctacatcaaagtcagccgcatttacggcaaacgggttttcatctgttgccttgtcaactgaaaaatattcaataaagttaccaagcattgattgcgaaatttgagaattgttcaaatcaacaattctgtttgttgtagccaaaagaagccgcttaagcatttcgctacttggcatattaagcccttgatcaaacacccatgcaataagatcttcacgtgaatcgacgagcatgccttttgggattgcgaccgtgtctccatttaatcctcttccaatatcatcaagccatttaaggaactctatttcgtttggattaactcgcatgctttgcgtcaatttgtattttgaaaatattgggtaaagcggtgaggactggatgcatgctgcaacttgagctgcactaccataagaatttattacgactggaagtgattgcttccaatcaccggagattataacacattttccaccgaaaggtaagtgccgtttttgcatgcacaactggcgacagagtaaatcaatattttcaaaaactgtcctctccagcatagtcatttcatcaattattataatgtcactttctattatacgcctgccaaagaaactatcaaaaggaattgcaggtaattttccaggctcaacattaattccaaatttaaacgccgaatggaccgtggtgccacctacataaaagcgggtggaagccattccggtcgatgcagtgggaatgatttttgcgccgatttttcgcagttgaaataaaatataattaagcaaaaaggtctttccagttccgccatcaccacataaataaaatagacgagaattcgacgttttcaaaaaagcattttttaccatatcaaaaaatttttgttgttcagcattcaactttccacgttcaaatgctgttgtgtcaactgggtcatcatcatcatcatcatttaactgctgggggaagaaaaactcgttaagcccacgttgtggatcattcataattgaaatcactggggttggcagtccataatctttacattgtttgttttgcgcaactaataatttttctaaaagagcaagagcatggtcaatacgagcagtacgctcagcatctgtgcagcgtgtgtcatacatttgtgatttaaatttttcccagagcagggctccatcaatgagacatttttcagtggctccaaaaattagtatattagcaaacaattgacgcatttgtgctggggtgagcgaggcagcaccctcttccattgtccgaacccacacatcattgtcatcaataagccccttgagtcgggctgtctccagaaatgtttgacagatatgcgtggggtttaccatttttaattgttgcgggtttccggggaaatgttttgtcagtaaatataatgcaaataactcaggatttcgtggtgaaaccgggtaaattcggccaataattggttttctgttttttatattatctggacgtgctgaaaaagtacgttttttccaaaatttaccagatttgttgaatgaatactgttcgggcatacgctcaaaaacaatttttctaacatcaggatccgtttcacacattttccaatatgctgttaaaggtgtttcgggcaaaatgcctgcctgaacctgctgagcgacggacgctttttcacttggtttgtagtaaatcttttgctgaccgggcaaatggagtgacaacgcaataacggtatgagataatttagcatatttgagcgacatgatccggcaataggcctcaggggatgaacgatataacattctagcataataagcaggctcatcaatacctgtttttccattttcttcattagtctttacgtacgaaaaactgggacctttgaatggatatttgtataaatatttcaaatttgtgctttgcccatatgcatattccaaattatggtgagtttcaaagtgaaccaaaatataaggattgtacgcggacactcgtgaattatcataagttatttgtgtttttcctcttttaacagtcaatgtttgcccaccatcttcggtactcggacggaaataaatagctggtcgatcatcatgtaaaattgtgaatttactaaacggctttggaaaaccttttttacatttccctttatggtttaagcaatggcgcccgcagtcatggaactgatattttggcaataattcacgcactttacaaataaaaatagcccaatcagatttgtcattcttatttggctcgggaggaatatgtgcccatatcaatccgtcaacattttctggtattgcgagcagatcggtatgataaactcgatgggcatgcggaccgccgtattttttctgaaactctctgcattcctggccaatcatttttcccaaaatatttttcttatccaataaataatgaaggtgtcgtagtttgtcctcataaatgcgacaaattaaatcgggtctatcaacagtcctctgaccttggtgaagaaaatttcgagaaatttctggccatctgggatttgtcgtaaatgttaaaaagaatgatgcaaatcctggcctcttaaaccttgacataatagtagtcgcatcgtaaaatttatgttgaaagtatgcccgtgtcccaggctcagatctgcgaaacataacaacgctacctaattcttcggttgagttaagccccgcattacgggaaagccagcgaagcgcattttctggtaaagtactccgtaaatttaattctggttttcgcaaataatttgcaacgtttgtatcaatgcgagctgaataatctaaaataaatttctgactgaggcctccacccgcgctccaaatatggtgaaaattgttgtcttttcgcagcgccatacggtagcgaatataagttctaacagataaaaactgtcgtgttccacttttatcaactgaatcaagtgaacttgtgaccgataaatcgtcatcgggtccattttcatccgaatcaaaagcattttcatcagattcgacattaacttccattgcttcgtcatcgcgctttttatttttgtagttgtaaggaattttggtatgaaaaccgtcatcgccatgtggaaataatgtggggtaacaaagagaatcggtttgtgggtgatgtggttgaaatttttgaagctttccttcatcggtagtgatccaaatgccttttaataatggtggctgatcgctttcagcccagatagcaaataaagaattgccctcgtcgggtaagttggcttgtcttggatggagagaagggtcccttatatttaatggtgcttcacgagattcgaccaatgtcaaacgaaaattgagaacagcttctgggcctagctcgtccaaagttttttggtactgtgtatggaagttcattagctcttttgcaagtggatgatattttcgaataataaaatcaagttttcgaattgttttttcgtttactctgtcaccaccatattctgtgttttttgtcctttgcataaatgcagccatagggtcaagaatatacaattgtgcaaaagacggagcgaattttccaggtaataacccaatttttcgtgtgaattctccattcaataaatagcatttgtcaccaccaagggatgattcatgatatccaacagaaactgatgcaaacgccagcaaggagttatatacattttggtgggataaaaattcattagattccggatcttgccctgccaaaaatcttttaagtgttggtgggtgctcttcataagagggcaaaacaaccgaaccgtgattacaacaaaaactcgaagaaattttcccgtgttttttatctgcttcactatttaataaaagagaatgacagtgttcacatattttatcaccaatatttccagaatcataatactcagtagtgtgctttgcacgcacatccgcacaaggaattccctggtgctttatatgacaacgacgagtaagatcattaagaggagtttttgaagtaatattaagattatcaacagacgacagctcagtatttatgctttttagtcggagcgatcggcgggttgcagtactcataatactcgctgaatgtggtctcaaacgaacgtcaggagttctgtcaatatcgggttcaatgcaaataaaggtcccagctccatctctcgggcatgtttgttcagtaatagactccacattataaaaaggcaaggaatgaagacttgaagtgttctgacggacatattccacattatcactatttatcagcagtgccaagtgccataaaattctgtgcctttcaaaattaatgtttaggtttggaaatttcagtgaacaattatttaagtaggcctcagagtaaagcaaaacaaatacgccacagttaattccgtcatgttggggtgtaaattctgatggacttaaagtcctaattagcacatcatcgtgagtcagaccaggtgtcaattcacaaattccgtttttaattatttcaatccttctcacatcatagccagggtatttaggatcaaaaagccgatcaaaatgcggcaaagaatcaatgaaaagacattttaagtttttccggtcagatcgatcaaaaatgattaaagcgaaatgaccatgaaagaatatagtcatcaacaatacatcatagttctcagaatagttaaaacaattatccagcacattatattggaatgcatttggtccaatgtgaaaattttgtaaatcagtatattgtgggttaacactgcaacaattttgtcaattatttttgatgcaagataaacgttgaaacaatagactaaaatcatcactgaacatatcagtaggagaagaccacgtctcctttgatgagttctttatttattgactgaatacaaacacgtcctggggctacttgttgcgagccaggga

SEQ ID NO: 6383 - DNA, 953 bp, Heterodera glycines
  unsure (1)..(953): unsure at all n locations
tgaagatacactaacagaatcagagcagcntgaataatntaattcggtgaaatgaaaagattcgtgcgaaaaaacaggcattaatatttggttattttctgtcttttttggccgtcctgacccagaacgattcttagctggtcgtcctcttcttttgactggagtttgatttatgtttgaatcaatggacatagatgaatcgcgcgaatgatgtaaagaacccaaattgtcattttcgccggcaacaaacaatgagcacgggtgatatactacgttatcacgattataaagactgtttatatgccaaagaattctccttttttccaaatttatatcaatgtttggtaaaataagcgattgattgttcatcagccatgcctcagcatataagcaaacaaaatatccacaactgcatccgtcatgttgaagagtcagtttggaaggaggaagtttttgtattattatatcttcagaattgatttgacacaattcaccaattatatctttgacacgcaatacacgagcaaaatttaactcacttatttgcaacgaatccatgaaaaaagtgccataatttatgtcataaataagcaaagtccaatgccctgggaaattgagtggcataagtattatctctgggggcgactgctgattagaattaaagacattttttttcagattagataaaagtatttttggcatttgctggatatcagtatacaaggagtcaacaacaacaacattttttgtcgaaaccgtgctaatatagcagagaaatgaataaataaacgaatcattgagccattccgataaatcattccaatttttttcaatttgcctaaagccagagttgtcaaagtcattttggtaaagattaaggctagctttacgccatatttggcaattcaggttaatgtccgtcgcaaaaactatatttttaaaatcatgaccag

SEQ ID NO: 6384 - DNA, 1133 bp, Heterodera glycines
  unsure (1)..(1133): unsure at all n locations
aattttacaaaaaattaaaaaaatggataaaataaatttttgaatgttctttataaatatcttanaatgaattattaaatattaaaaaccatgaatacaaaatataaataaaaataagtaaagtaaaagagaaaaaattaatttatcttacagagcggcacattatattaaatgaatttttcaaaaaataaatcccgggatatttaaaacgaattaatgaactaattagttattgtaattaataaacatttcgaaaagtgtgccatttttaatgggatgtccctttgcgatgagatagatgttgactgacgccctctaataaatgtcggcgacaacattcacactttgcccgcttttttccctgaggattatgtgccaaagtgtgtgccctcggggcatcggtgtggcttaattatcgcctgaggcaaccgagcgcggaatgaacacagaaatcacgggtgtccgtcccctcgcgcttaattaattatttatgatgaaaagcttatttgtcagcgttttattactggcaaaaaaaaaagtaaaagtaagaaaaaatttttttaatttaaatgaaaaaaatttaaatttcaatttaatgtacaaaaattaaaaatttgtaattaatttaaaattttctgttgagtgccaacaaaagagaaatgtgctgctcatttttttctgatataaacagataaaaatgttttatcgtggtgagaagggaggtttgaatgaatgaaatggcgtgagagaatatgcaaattgaaaatttatttttgttttattttaaaatggtcacgaatatttaattatttagtggaattacattttaatacaatttaaataattgaaggaaataatggtataatttgttgaaccaattctcggaaacatttctcattaaattccaatttattttgaaatcatgtccatggtttaggtcccaacttggctctttcatctcgggtttcgttcccgggattcggcttttttaaaataaaaacccgtttttttttgaaattctccgtcccaagtctcggcacccattttaggtaccgattttgctctaagcaggtcattatttcccatgnntgccgtgtctaaaacgggtcagtcaattcagtgtaatccttggc

SEQ ID NO: 6385 - DNA, 3422 bp, Heterodera glycines
ttttttttatttatttaaaaggcattttttggcgttgagttcatttttcagagagtgccgtctcctcttcagtggcttcttctgatggattcatttgttgccaccgcttcaaatttcaattcggctaacgcccagcaaaagtcaaaaagtgaaattttcattccgagaaaacatttatgtatattttaaaattacattaatttgtaaggaacaatgaattttagttcaacaaatttataatttcctttttcttaaaaagaaaatattaaataataaatttatttttaaatttttaaacttgaaaaataaataaataaaaaaaaactcaatttcaaatattctatttaaaattattaaatttaataaaacgaaatatttagttcatttttttgaattttacggaaaaatgagcaaaaattcaggtttaaactgaaaatttgattttgcgtgctgtgaggcgtgaattgtgaattaatttcgccttaagcgagcacatttttctccattgttattttcaaaattcatgaaatttgcgtgttaaatttgcaatttttatattattttctctttttttacccccctcccccggtgccattcaaaaaaaatttatattgcccgacggcataaaaaattggaattacattgcccccggggagcactaaatttgatggggtccatcgggcaaattgcccgaggcaattctcgtaaagaataaaacaaaacaacaaaaaaatgtttcgcaaaagctaacaacacaattttatttgctgctgcaacgttaaacaataagcaaataaaaaaaatgctaaaaataaataattttcgatttttaattaatttttttttcgtgaaatttacgccttacgcggacaaaagcctccattaaaaaaagttcaattaagttttgcctcgggcgtccgtcctttcattttaattaaaagtatgttggcgttatgttggtgcataatatatattgcctaaggcattctctaaaattaatttcaaaatttttttgattgacaatttcctaataaaaattttctggcaattttttttgtatttatttttcgatgtcatcgccaaaaacggaaaatttgccaaaaaactgtgaacacattgtccaaggcgttgtcaaactctcggccttccgtcttccaccaaaaaagtttttttatttataaatttttatatttaaaattattatttttttagttttcgtggatcagatggcaatgtgaggccattgtattccgatcaacttcacatatcggctaatcagccgtcaaaaagggcatttgcaaacggtgccagcaaaggaaaatgtacaaaattaataaatatttgggaaatatataattaaagtaaattaaaattgaaatttttgaaatatgtaaacaaaaataaaaataatttacaaaagcacaaatatttttggtaaatatacatacttatatacaaaaattaaattaaaataaaaatatttttaagaattttttaataatatgtacagaaaacactatgtagttagtaccttacattaaagaaaatgagattttttggtgaaaaaaatcaaatttatataaaaaaaattaaaaaatgttgaataaaaataagcatatttgtaaaaaaaaaaaaaaaaaaaactaaaagtaaacaataatttgaatttaaaatattcgcaattcattttctttatttgatttgactaaattttaatttcctctgaatttttggtgcaatttttctccccccggcccagtgctttcttcggccatcgccgaacgtcccctgtcctgctcgtccaacagtttgttgcgcgtggcatcgcctggcaccggcaccggcaccggcacggcagttgttggcccaggcggaaagcggcttctgtccctggattcgtccgtccatttggccgccgcggtgcacaacgaggatgaatggttgcgcacccagcgcaaattgggcaagttttggccaaacttttatatacactggtcagggccaagaacgaatctggcatccattacgaccaaatgccgaatccatagcccgaatttgaacaaaaaggtttcgaagtcttttaaacttttcgttcaaaactcgggttaaggactcgccattgagaccaaatttaagtcagataggtattcacgattagctctcatttataatatttattccctaccccaatttttattgaaataattttgaaacttttttttttgaacgatggatttttgctagtccctttttgttgaatttgccattttcccagttgccgaagctgctgcacttcggcgccaacgtgagcaggtggtgtgctgtgcgtcggtgggcgcttcctacgcatttttggcactttctgttgcactcagtttatccgtggtcagtaaaaaagcaaacaactttttttttaaactttaatttagattttttcctaaaaatttctcaaatatttaggctaaatggaaggaaaacttttggtatttttttattttctaaagacagggcaccgattaggacacactcaatcagttcacgctattgttcaatgggtcttgaccctacaagagtctcgagtttcttggaattggtcgtctcggctttgaattctccggaaattcacattcgagcaggaacggaatttctgaaaatttataagctaaaagtcaattaaatgttttttgacaacgaccctaaattgattgatcactctgatcagaggaaggaaattattttgctgatatttttaaggtgatcgccgtttgtttgtttctgcattcatttgtgccaaaagaatattaccagcatttgcgcaatgcttcatcatctcaaaatgctaacagtttcgtggataaacaattgccatcacaacagcattcggtgcttacaaatacggcacggaatacggtaaaatgaatttaaaattgttttatattttaatttaaatatttttaaaacaattttcgagtttctgccctgaattcatgatatacggctttttaaattaaattatcatttcatatttttcaggaagcctcagtcctggcaaaaaattctaattgacaggcagcaaaaaattttcaaaatttttttcaaagaagccatttttttatacaagacatattccaatgagcaaatctttataataattaaataattaatcaattaatcattgttgaccaaacaaattattacaaaatatgaataatgtgaacaacaaataaaacgcatttttgcaaaattccgataaaattaaaaatgcattaaattttcttaaaatcgtatgcctttttcgcttcggccccttttccatgcgtttgttgtccatttttggcactttgttgtggtggtgcccaaatggcactgacaattgactcggcactcatcggaatggtccaacgccgttggccgtcgaccac
